United States Patent Application Publication US 2004/0214272 A1 - sequence listing, part 21

SEQ ID NO: 86619 - DNA, 1533 bp, Zea mays
  Clone ID: MRT4577_179003C.1
atggcgcgctcgtcaaatattctatcgcatttggtaacattaaaggaattaatggaattaggaggcaaggtggcgtaccttgcaaaaccggctggctctggtaaaaaggctgctctcgggaactcaacggcggcgtacggctataattcaccggactgtccggtactctcaattggtatcggagccgttctcttcacaaaagggactaatcgcccgaagagatggatcctaagggaaaggggggtggtcaacgacaatgagaaggagtccatcttcaacgagccaagggacgacaaagtcaatgactccggcttgagtcaaaagcagaaagacggaaagaagaagaggcgcatcaggaaggttgtctactacgacagcgacgaatcttcctcttctcaaaaggacgacgaatacgaggagaaaaagaaaacggttaactcgaacttttcttttgattactctcgtattccgcataattctaatgctcatttgctttctattctacttggaaaacctcctcactttgatggagaggactacggattttggagtcacaaaatgcgtagtcatttgttctctcttcatccaagtatatgggagatagtagaaaacggaatgcaatttgatagttcagataattctatgtttatcaatgaacaaatccataagaatgcacaagctactactgttcttttagcatccttgtgcagggaagaatacaataaggtgagcggcctggacaatgccaagcagatctgggacaccctcaagatctcacatgagggaaacgacgtcaccatgctcaccaagatggagttggtggaaggcgaactaggaaggctcaagaccctcgtcaacaaaataaggagctatggaagcacgcgatggacggaccacgacgtcgtccgacttatgctaaggtccttcaccgtccttgatcctcatcttgttaactctattcgtgagaatccttggtacatcaagatgacgcccgaacaaatacttgggaagtttgtgagcgggcgaatgatgatcaaggaggcaagatacgttgatgaggcgctaaatggcccaatccatgagcctcaagccattgctctcaaggcaacaagtagcagggagacgctacctagcaaggtggcgcaaattgaggcggccgggctaaacgaggatgaaatggccctcatcatcaagcgcttcaagacggcgctcaaaggtcgcaaggagcatcccaacaaaagcaagatgaagggaaagcgctcctgcttcaagtgtggtaaggttggtcattttattgctaattgtcccgataatgacagtgaccaggatcaagaaaagaggagggaaaagaagaagacctacaagaaggctaagggcgaggcacaccttagcaaggagtgggactcggattgttcatcgtccgactccgacgacgaaggactcgccgcctcagccttcaacaagtcggctctcttccccaacgagcatcacacatgcctcatggcaaaggagaagaagcttaaagagtattaa

SEQ ID NO: 86620 - DNA, 567 bp, Zea mays
  Clone ID: MRT4577_179004C.1
atgacgcccgaggaaatacttggaaagtttgtaagcgggcggatgatgatcaaggaggcaagatacgttgatgatgcgttgaatggcccaatccacgagcctcaaaccgttgctctcaaagcaacgaggagcagggaggcactacctagcaaggtggcacaagttgaggcagccgggcttaacgaggaagaaatggccctcgtcatcaagcgtttcaacacggcgctcaaaggtcgcaaggagcatcccaacaagagcaagacgaagggaaagcgctcctgcttcaagtgtggtaaggatcaagaaaagaagagggaaaagaagaagacctacaagaaggctaagggcgaggcacaccttggcaaggagtggaactcggattgttcatcgtccgactccgacgatgaaggactcgccgcctcggccttcaacaaatcgtccctcttccccaacgagcatcacacatgcctcatggcaaatgagaagaaggtaagtactcgaaataatgctacgtatgcttctttaagtgatgatgaaatagactatgcatgtttattcaaaggataa

SEQ ID NO: 86621 - DNA, 305 bp, Zea mays
  Clone ID: MRT4577_179005C.1
gcgctggcttgtgctccccctcttaccaagtcctcctcgggttagggttccttagggttttgtggaggggcgatggcgtctgctgatgtggagtgcgcgtgcttcttcagcgggcttgcctaacccaccaacaactaatctctatagaatgccttctcctcctactgcgagatcctctacttcaaagtcatcacctactcggagacggggaggtcccccttcttctttttttaccttttccatacaaaactccatgctctattctttctagaacattaactgcaatgatctttactgtcgtaaca

SEQ ID NO: 86622 - DNA, 726 bp, Zea mays
  Clone ID: MRT4577_179006C.1
tgggaccctcgggccggccggccctcaccataaacccactacaccgcgaaagcctacctttataagtcaccgacttgtgagcatattacgaacttttctttacctttgataccccaccacacatacacatcgacatcatggcacccgcgattggtatcgatcttggaactacctactcttgcgtaggtatcttccgtgatgaccgcattgagatatcgccaacgaccagggtaaccggacaacaccttcgttcgttgccttcactgacaccgagcgtctcattggtgactccgcaaagaaccaagtcgccatgaaccccgtcaacaccgtcttcgacgcaaagcgcctcatcggtcgcaagttcgccgacgctgaggtccaggccgacatgaagcacttccccttcaaggtcatcgacaagggcggcaagccagttatccaggtcgagttcaagggcgaggagaagacattcacacccgaggagatctcatctatggtcttgaccaagatgagggaaactgccgagtcctacctcggtggcaccgttaacaacgctgtcgtcactgttcccgcatacttcaacgactcgcaacgtcaggctaccaaggatgctggtctcattgccggcctcaacgtcctccgtatcatcaacgagcctactgccgctgccatcgcctacggtcttgacaagaaggccgagggtgagcgcaacgtccttatcttcga

SEQ ID NO: 86623 - DNA, 3770 bp, Zea mays
  Clone ID: MRT4577_179007C.1
ggatcacctattcaccccccctctaggtgctctcaattggtatcaaagccgttctcttcaagcaagggactaatcgcccggagagatggatcctaagggaaaggggatggtggtcaacgacaatgagaaggagtccatcttcaacgagccaagggacgacaaagtcaatgactccagctcgagtcaaaagaagaaagatggaaagaagaagaggcgcatcaggaaggttgtctactacgacagcgatgaatcttcctcttctcaaaaggacgacgaatacgaggagaaaaagaaaatggttaactcgaacttttcttttgattactctcgtattctgcataattccaatgctcatttgctttctattccacttggtaaacctcctcactttgatggagaggactacggattttggagtcacaaaatgcgtagtcatttgttctctcttcatccaagtatatggaagatagtagaaaacagaatgcaatttgatagttcggataattctatgtttatcaatgaacaaatccataagaatgcacaagctactactgttcttctaacatccttgtgcagggaagaatacaataaggtgagcgacttggacaatgccaagcagatctgggacaccctcaagatctcacatgaggggaacgacgtcaccatgctcaccaagatggagttggtggaaggcgaactaggaaggttcgcaatgatcaggggggaggagccaacgcaaacatacaataggctcaagaccctcgtcaacaaaataaggagctatggaagcacgcgatggacggaccacgacgtcgtccgacttatgctaaggtctttcaccatccttgatcctcatcttgttaactctattcgtgagaatcctaggtacaccaagatgacgcccgaggaaatacttggaaagtttgtaagcgggcggatgatgatcaaggaggcaagatacgttgatgatgcgttgaatggcccaatccacgagcctcaaaccattgctctcaaagcaacaaggagcagggaggcgctacctagcaaggtggcgcaagttgaggcggccgggcttaacgaggaagaaatggccctcatcatcaagtgtttcaagacggcgctcaaaggtcgcaaggagcatcccaacaagagcaagacgaagggaaagcgctcctacttcaagtgtggtaaggttggtcactttattgctaattgtcccaataatgatagtgaccaggatcaagaaaagaagagggaaaagaagaagacctacaagaaggctaagggcgaggcacaccttggcaaggagtggaactcggattgttcatcgtccgactccgatgacgaaggactcgccgcctcggccttcaacaaatcgtccctcttccccaacgagcatcacacatgcctaatggcaaaggagaagaaggtaagtactcgaaataatactacgtatgcttcttcaagtgatgatgaatctagtgatgatgaaatagactatgcatgtttattcaaaggattagatagaactaaaattgataagatcaatgagttgattgatgctttgaatgagaaaaatcgacttttagaaaagcaagaagatctcttatatgaagagcatgataaatttgtaagtgtgcaaaattctcttgctttagaagttaaaagaaatgaaatgctttctcgtgaattgtctacatgccatgaatccatttctagcttaaagagtatcaatgatgacttgaatgctaagttagaaatagctaataaatcaacctcttatgaagaacatgttgtgatttgcaataggtgtaaggattttaatgttgatgcttgtagtgaacacctagttgccatttctaaattaagtaatgaagtgactagtcttaatgctcaacttaagactagcaaaaatgaattcgataaattaaaatttgtaagggatgcctacacgattggtagacacccctcaattaaggatgggcttggctttaagagagaagccaagaacttaacaagtcataaggctcccattcccgccaaggagaaagggaaggcccctatggctaatagtgctcaaaagaatcatgcatttatttatgataggaaattttctagaaatgttcatcatgataggagttgtaatgcttatgattcaaatgcaatgtttgcttcaagttcttcctatgtgcatggtagagatatgcctaagaaaaatgtcattcatcatatgcctaggagaaatgttgctcaggatcctaggaaaatagttaatgaaccttctacaatttatcatgcttgcaatgcttcctttgtaatttgtagaaaggataagaaggtttatgcatccgggggctcaagctggattatcgacagcggatgcacaaaccacatgacgggggagaaaaagatgttcacctcctacgtcaagaacaaagattcccaagattcaatcatattcggtgacgggaatcaaggcaaggttaaagggttaggaaagattgctatttcttccgagcactccatttctattgtgtttttagttgagtcgctcggttataacttgttgtccgttagtcaactttgtaatatgggttataattgcctattcacaaatgtagatgtgtctgtctttagaagaagtgatggttcattagcttttaagggtgtactagacgtcaaactttatttagttgattttgcaaaggaggaggccggtctagatgcatgcttaatagccaagactagcatgggctggctgtggcatcgccgtttagcacatgtggggatgaagaaccttcacaaacatctaaagggagaacatgtgttaggtctaacaaatgtgactttcgaaaaagatagaccttgtgcagcttgtcaagcaggtaaacaagtgggaaatgctcatcacagcaagaacgtgatgaccacatcaagacccctggagctgctacatatggacctcttcggacccgttgcctatcttagcatcgggggaagtaagtatggtttagtaattgttgatgatttttcccgcttcacttgggtattctttttgcaggataaatctaaaacccaagggaccctcaagcgcttcctaaggagagctcaaaatgagtatgagctcaaggtaaagaagataaggagcgacaatgggtacgagttcaagaaccttcaagcggaggagtattgtcacacccaggtttcgggggcaccaagacccgggcgcgaacataatcaccaggtgtgctgggaccaagtgtcacacatatgatgaatcatggcacagggtcaaatgtcacatctttactatataataggagttctatacaaaataaataattacattataaggagacaacggtccagcaacccaaagttgactgggagacgacgacctagaccactcacgaactcatcgcagcatcttccatgagcatcatcctgcagtacctggtcttgacctgggacttgagattctaggtaccaggatgatcttcagatgacacgtgtcctcactgcttggattatgcgcactggtgccctgaccacggcgcacggcggaatgccccagactacacgacgtcggcgagcaatccccatgctccacaagtcctcaataccgccatgtgaggtcgcgaacgtgttcggtgtgctctggagactctcctcgaccatcaaccaagcccagagtaaagctcctgacgggatgcccatgcgagcggacatacatctccccatggtgctttgaaacgacatcttcttgcacc

SEQ ID NO: 86624 - DNA, 383 bp, Zea mays
  Clone ID: MRT4577_179008C.1
gggggcgatgaatcttcgtttctaatggtctggtatctatgctactctttccttctaaattgtacacatattcttacatatattacttggaacgttcaatcatgtaatcatgctctacgcgagcagccccaaagaaagatcaaacgccatggcctttttacaagtgtgatgcctatgacggtacggagggcatgccgaccaacacctcttcctttttctccttcgagagtgattcctccggtgtcgattcctcgctataaggctcctcctctcgcgcctgattatcgacaacgtcgggattgtcagaaagttcgttcccctgcacaatatcatgttgcgacgcgacagcatctgagccagggccaagtggtcggaagagctgt

SEQ ID NO: 86625 - DNA, 275 bp, Zea mays
  Clone ID: MRT4577_179009C.1
gaaacataccaatggttcccagtttttcataaagagtgttacaccgtgcgctccaaagtacaacaaagcctgctccacacctggatggggtgcatgtagtctttggactggttatttctggttttgaagtaatcgaacaaattgaaaatctgaagaccgatgctgcaagcagaccatatgcagatgtgcgagttcttgactgtggagtcacttgccacaaaatcaataaaagatgtttttgagaaacaaaggaagaaaccaactcattcagaagg

SEQ ID NO: 86626 - DNA, 250 bp, Zea mays
  Clone ID: MRT4577_17900C.1
gttctagatcgcgagcgcccgcccttctttttcatttttttcgattatctgaaatacgaggactgttttacttttaataaacaacgcggggcacagattagcgcattcatttatatatatgcccttggtaatgggcattactataccgctatggcgttggatgacctaaaattacattagtgactgggtccttcaaaaatgagaaacaactcaataatggaaagcattctccattacgagaagaacccaa

SEQ ID NO: 86627 - DNA, 417 bp, Zea mays
  Clone ID: MRT4577_179010C.1
aatgactcaagcataaagtggaaacgaataacgggctacgaatactggttacaggcaccaaattttaagtgcactcgctgttactgatacaaggttaaacatgacatatgtattgtggattaagcaccacacgcgatactggactgaaaaaccaattctgatgatacattgtacactgaggatacactgaatacatggatgtacgttcagggccctgcagcaagaacctccatgacatgctcattaaaattatattgacaatagctctgagtccacacacatttggcgtatatttactaataccagctcgcgttgtacatttaagctatatcgggtaccaataggaagagagcaatagtatcagatatcagggaacattttgacacaaaccaactgtgagattgttagcacccatac

SEQ ID NO: 86628 - DNA, 321 bp, Zea mays
  Clone ID: MRT4577_179011C.1
tctttcgtctacgcgttctgtttccggctatgaatgggtcccccacaaactacgaaggaaaccccgaatactacccatctatctgtatatctataattaccaatcgacttaccaaggcgattgctagggaaaatctgcaaaaaaatcctggtcaaagtgatgaggcaaggtaggcggctatgtcggcgctagctaatggggggcctaacgctggccccagcgctgtccccccggtagctgcccgggtagctgaggccctggctaacacgttgctgtacacgtgggtctaggagggcgacctgtaggactccgacttggact

SEQ ID NO: 86629 - DNA, 167 bp, Zea mays
  Clone ID: MRT4577_179012C.1
tacaccacatgccatttgctcaatacacactttgtcaatgcaagatacaatgtaattagatataaaaaggaaataaaatagggactttcgttggattggcacgacatagatgcagcatagaaaaaagggtctaggacagaggcaagttgtggataaataattaaggt

SEQ ID NO: 86630 - DNA, 355 bp, Zea mays
  Clone ID: MRT4577_179013C.1
agaagcagcaaaaaaatgcaaaccaaaatgttgcaactgtttctgtagaataacactgtatggacacctgcagacaccatggagtgtttattagaatgcttactctgagtagaagctgtccttttgcatgtactagttcttccattatattgtctaattacattcttatcatattcagcttgcagatctcattgattcccttccaaaaaggttattagttcttgttacacatcatcatcaggatcacattgagggtctttcagtcgttcagagatgcaatcctgatgctgttcttctgacacaccaaagtacaatggatcgcattgggaaaggaacttggcagattgactacact

SEQ ID NO: 86631 - DNA, 235 bp, Zea mays
  unsure (1)..(235): unsure at all n locations
  Clone ID: MRT4577_179014C.1
ggcacgaggcgcggcggcggcggattagngagaagggaggacgncattgntttttcttttctctgctcgaatgatggaactcgttttttttcctgtatcatgtgtaaaagcctgcgctatgtttttttaatccatgggtgcgcgacatgtagcgcctcagaatccacccaagccaaaacatatgcaggagcatactagccaaatcagcccccccaaccgccacccccaaccaaaa

SEQ ID NO: 86632 - DNA, 620 bp, Zea mays
  Clone ID: MRT4577_179015C.1
gtgccgccgcccgctcgccctcatcccccaatcccccaggcctccacttctccgattggggcgacttcatggtgagcgggcacagatccgacgtgggcgcctccgctccgacgaccgctctctcctctgtgcctccaccgcccctctccctgttaggcgccgacgaccaagagaaggaggaaggtcaggccaccgctggtggccatgacatcccagtgtgcgccgttcgtcttgtccaacagggcagacaactggtcaagcaaagtctctctctagaacacctctctctcttctctctccccatgccgatcaaatccaatccaatccacaaccaaacaatggcgtccgacggcaacggtgtggtgatggtgtacgtgacgctacactactggagccgtttaagcaacccaagtcgacgactttctctgtcaaggtaagcctggcacagatgctctgcgacggggtcatcatggacgtggtcaccaagagcaggcgtgcattgcagattcacagtacacaactcttaaggacaaaatgaccctcgtcatcatttgcatcttcagatggtttggttactcctatggcttactgccttcccatgttgtatgtatattttagca

SEQ ID NO: 86633 - DNA, 526 bp, Zea mays
  Clone ID: MRT4577_179016C.1
ttgaagctgatctcgtcctcctagctatgggattcttgggtcctgaagcgtctatcgctgagaaactgggtttggagaaggacaacagatcaaacttcaaagcgcagtttggagacttcgctaccagtgttgatggtgtgttcgcagccggggactgcaggcgtggacaatcactggtggtatgggccatcacggaggggcggcaggctgctgcagcggtagacaagtacatatcaaggcatgatcagaatgtcgcaggcgacatcactccctttggggcagggctcgttcagccggttggagcataaaaaaaacatagaccgaggcatgttttaggttctcgtcagtggttcctcacagcaaattttgttcttgtatattttgacgatagataaacagttgaaagttttggtgtctattgtttctttttcttctccggttattatgttttgcgtgtctgcatgtggttttctagtccaaaatgtacagttttccttttattaaatagatgtaaatttggtgggtg

SEQ ID NO: 86634 - DNA, 1654 bp, Zea mays
  Clone ID: MRT4577_179017C.1
gcttagcccggcggccggccagaactgcaagagagaagaccaagaaacagagagagacaagcgcaggggacagcagcgggtagctagctagctagcgatcgacgacagacgatgcagatgatgatgctctctgatctctcgtctgacgaccacgaggccactggatccagctcctatggcggggacatggccagctacgccctcagccctctcttcctcgcaccggcggcctcggccaccgcgccgctgccgccacctccgcagccgccggccgaggagctcaccaacaagcaggccgcgggcggcggcaagaggaagagaagccagccgggaaacccagaccccggcgcggaggtgatcgcgctgtcgccgcgcacgctggtggcgacgaaccggttcgtgtgcgagatctgcaacaaggggttccagcgggaccagaacctgcagctgcaccgccggggccacaacctcccctggaagctccgccagcgcagcagcctcgtcgccccgtcgtcggcggcggcaggctccggcggcaggcagcagcagcagggcgaggccgcgccgccgcgtaagcgcgtctacgtctgccccgagcccacgtgcgtgcaccacgacccggcgagagctctgggggacttgactgggatcaagaagcacttctcgcggaagcacggggagaagcggtggtgctgcgagcgctgcgggaagcgctacgccgtgcagtcggactggaaggcgcacgtcaaggggtgtggcacgcgcgagtaccgctgcgactgcggcatcctcttctccaggaaggacagcctgctcacgcacagggccttctgcgatgccctagcagaggagagcgcgaggcttcttgcagcagcagcaaacaacggcagcactatcaccaccacgaccagcagcagcaacaacaatgatcttctcaacgccagcaataatatcacgccattattcctcccgttcgccagctctcctcctcctgtcgtcgtagcggcggcacaaaaccctaataacaccctcttcttcctgcaccaagagctgtcccccttcctgcaaccgagggtgacgatgcaacaacaaccctcgccctatcttgacctccatatgcacgtcgacgccagcatcgtcaccaccaccggtggtctcgcggacggcacgccggtcagctttggcctcgctctggacggctcggtggccaccgtcggccaccggcgcctcactagggacttcctcggtgtcgatggtggcggtcgtcaggtcgaggagctgcagcttccactgtgcgccacagcagccgcagcaggtgccagccgcaccgccagctgcgccaccgacctgacaaggcagtgcctcggcggccggctgccgccggtcaacgagacctggagccacaacttctaggcccgctatatacttcaagctgcattgagactttgagagacgaatgaacggaacacccaaactgcatgcactctagcttgaagagcaaccaaaactggagtagcaagtatggtgcactactgttgttaatttaccttaatttattgatctctgttagttctattttcatttagggcaatgcgggctagctaattaattcgatgtgcacaacttttgatgaatggaccagaaagtttatctt

SEQ ID NO: 86635 - DNA, 402 bp, Zea mays
  Clone ID: MRT4577_179018C.1
aaaaccccccccaccccccaggggggcgctgggacaattaaaaaatttctggaaccaaattttcaaaccccacaatgttgccaaaaaccctaaaaatttttaccgaaccccaaaaaaaacaagcccctcaaaatcatcaccccctaaaaaatcaaaaccccaaaacaacttttgggccatccttactgggcccccggggtaattttttttatttcaaaatcccccaaatccaaaattcttgggccccaaacaccgaaattttttccaaaagcttttccaaaggaaaaaatttttccaagaaaaggggggactggccccttacccagcaaaacaaaatccccaatttaaaactcccaaaacggagaaaaatttttaaaaaaaaacactaactttgactaaaaa

SEQ ID NO: 86636 - DNA, 310 bp, Zea mays
  Clone ID: MRT4577_179019C.1
gcggtgcggtctccttcgaccgatgccttcgtgccctacatcttcggctgtgacgccggcgaggccgagaccgacaatcggatccggcgacaaggcgagagggaagagattgggctcacgttcaccaagctggtcaggctggtgctcgccaagaaggggatgcggatcctgatggtgggactcgacgccgacggagagactaccatcctctacaagctgaagctcggcgagatcgtcaccatcatcttgaccatcggattcaatgttgaaactgtggagtacaagaacattatcttcactgtctgggatg

SEQ ID NO: 86637 - DNA, 481 bp, Zea mays
  Clone ID: MRT4577_17901C.1
agccggcgtcgccaacaagaagaggctgtcgaagcagctgtccatgaaggagaccaccagggaggtcaagtgggagaagcggaagcggcagatacaacggcagaggagcatcatgcgcctgagcgaagccgacgacagagctcgagcgcggagcgggtggccactggtataaccgacggggacctggatgagctgaggggatccatggatctcggcttcaggttcgacgagcagaagggcggtcaggacctctgcgacaccctccccgccctcgacttctatttcggcgtcaaccggcaggtgtcggagcccaggatgtcgtttcccacgagcacgagctcagggccgtctctgtcggccaccaagttctcggccaacctatgtggcacgcccagcccaggtagccctggtgcgcactctagtaacgccttggagtcatggaagatttgcaacccaggagataaccctctgcttgtgaaga

SEQ ID NO: 86638 - DNA, 228 bp, Zea mays
  Clone ID: MRT4577_179020C.1
cggccttccaaaaggatttgggggcacggttttgccaagttgggcccggggtcccccaacctttttccctttggttggcatggttcccgacatagtggccgcccgtcgtcccacccactgggatttccttacctattacaaaaattacaatggtttggttttaacccatttctttcatttgccggtcgtccgtaagacaaagggggggaggctttcaagcatactaat

SEQ ID NO: 86639 - DNA, 333 bp, Zea mays
  Clone ID: MRT4577_179021C.1
acgccccaccggaggggcaccatgtcttattttaccccttacgggggcctcggtttcatccttagccagaagcgaccgcccgtcaacagagatgctcaccctttctcttacgggcccgctctgcgaaaccgggcatctaaaccctaacttaatctatttcggctctcctgaattccaaatctagaagctagttacattacgtatacagatgtctgtgtgtgtgagcgcccccaccaaaaagaacttctttgacctaaagatacaccccacccgatagaccctacacgggactgtccacccccattggaggaaacaaacccaaatggaacccct

SEQ ID NO: 86640 - DNA, 285 bp, Zea mays
  Clone ID: MRT4577_179022C.1
atcagaggtctgctggtttttactaggcaaattgaaaaaagagtgcactgcaacatctgtcattacacccacgggttaagtacgggcgctcggtggtgtcttgttttgaatacaaaggactggacaccatgactgatcaactgttaagctgaaaacctgagcaatcaataggtggcatcggtgataacttttttcttgcacctttacagctctggcatttggcccagtagagccgggacgaccaccttggacattttaccgggggtattggcctcctcaacgatc

SEQ ID NO: 86641 - DNA, 609 bp, Zea mays
  Clone ID: MRT4577_179023C.1
aaaaaaatacaaaaaaagggaaaaaaaaaaaaaaaaaaataacaaaaaaaaaaaaaaaaaaaaaaaaaaaaaaaaaaaaaaaaaaaaaaaaaaaaaaaaaaaaaaaaaaacggggggggggtaggggaattacaacacccctggaagggcaaattcccccttgatgagaaaaacccggccggggtgggggaaccaccccccccccagggggaaggccaaaaaggaccccagggctcccgggttcccaaaaataaaaaggttcaaggagaatttgcgcaaggccttccccaggaaaagggaggccccccggggggctttaaaaacgggggccggccccttcccaaaagggataagggaaagcgggtggaacccgttgaaccgttttttccgcaagaacctgggggcggggtacttgaccgggaaaaagttaaagccccccggggaggagggaaaaagggggttccgggcccccagggggggaaagtttttcaacccctggttcaatggcttaaggggggggaagggaaaccccctgccctttggttggggggggggggggaggcccccccgggggccaaaaggaaaaacccccaagggggggaaaggacc

SEQ ID NO: 86642 - DNA, 314 bp, Zea mays
  Clone ID: MRT4577_179024C.1
gtacggtcggcgacaagataccgaggttgcggagagagtctgccatgcccttcatctgccgacagtactcttccacggagagatccacctgagagaactgatggaactaggcgtcgaggtggagtgtccgcattcccctcctacgactaggatagtgctattgcggtgttcgcttggtcatgcactatgtcttgcagctcgactgtgatggtgtcgttgagccacgagaggaccacactatccatttgaacccacgatggagacagcggggcgacggggtcgtcgaggacgtggttggcaagcacgaaccgccg

SEQ ID NO: 86643 - DNA, 456 bp, Zea mays
  Clone ID: MRT4577_179025C.1
cgcgggccctccaaaatttagtacaagggaaagctacacgttcctgatttaaaataaaccacctggggggggtggcaaaaaagttgtatacgtaagggagctttattttatttccgaaaacaaaagcagctggcatcgatgggcaaagaggaaaaagcactactaaggcaggctaaggccacaacggccgctcccgccttgagctttttggcaaaggcggaaaaatagctgccctggggcgcggccatttgcagctcggcgtcgttgggaaacctgttcctcccgtcggccccggaaaacgtgccggccccgtacgggctgaaaaacctgacctcgtccatgtaaaacatgccggccccaaacgtgtagcccacgggcacaaacaccatgccggggtgcgtaagctgcaacacggccgtaagcgccgtttcctcctgcccgccgccctgggggccc

SEQ ID NO: 86644 - DNA, 572 bp, Zea mays
  Clone ID: MRT4577_179026C.1
ggccgcttttttttttttttttttcttttttttttttttttcttttttttttttttttttttttttttttttttttttttttttttttttttttttttttgttctattatttttaagtggggggcggggaaaacatcatcccacaaaacaacaagaacaaaaactgcaagccggtcatcttttttttttctcctattaccatctttttgttttcctttgggaccaaaaaaaaaaaaaggggcgacaccgccggacaacaagagtccatccctccaacaaaaagagggccgcaaaacaaaaagcatggaggccccatcatcgctgccgctgcacaaccaattaatccggagcgaggactcccaccaaaaaagaaaaaaaaccacgggggccgtctgttaagaaagagggggcccctgcaaaaccccggggccccacccaagaaaggaagatcataacgcccaatccccgcggaaaaaaacaaaataactcagtaaatagcaccacacagcggggccgagagaccaacaacatggtgtcacaagcacccccccacaaggaagaaaaaaaaaaca

SEQ ID NO: 86645 - DNA, 581 bp, Zea mays
  Clone ID: MRT4577_179027C.1
ctactagcctactacctttgtcccaaataaactaattgagtaaaatcatttccggttcttaaacttgtagtccgtcgccctgtgttatcccggtccacaaacttttgaagtgtgtctcttaagtacgtaaatgctccatctctgtcattgatccattatgcctcctccccataccagcgctgcattgagtattcgttcaagcgcttatgggaggctgcaccctctgctgtgttgccacagaatcccttccggaagtggagcgcaaggggtcttatctgagtgctggtgtttaccattgtgctgtgccactgtttatcatgtacatgtttgggctgtttgtttctccggggatctcgctgtggcgtctactgcaacaagattatggcgacacggccagaaacaacagcatggcaaacctgaagccgacgctaattgtactgtactcattggccgctccagggcgtgctattctattacagggccatatgttctttggaggagcaacaactggtgaagctagtggcccgagtgtatgcgctggatgcgggcgacgaggcacgtggatccatttcagactatct

SEQ ID NO: 86646 - DNA, 1378 bp, Zea mays
  Clone ID: MRT4577_179028C.1
ccggccgggaagaaaaaagctcccgaaatcccctcacctactcctctccctctccctctggcagcgccgcctcgccggcggttgcctgcctgcaccttcgccccccgtctcgacctcgacgcggcctccgttcctccgcgagacgcagcatggatgtgcgccctgcgaatgcggccgacgactcgtctctcggagacctgttcccgcaccagcccgccggtttggagagtgacgagagcaacacagaatggctctctggttacgtagaggactgcttttcgagctccacgtcgtacacaaatcccgtctctgcaatggcaagcgagggtgtcggaaaaccaaagctacctccaccaccatcctccaacggcaggagaaagaaacggagcttggcctccgtcatgaccaacggcgactaccaacaattcgtcctcccgctgtacgtcgagccaccgctgatcctgatcgaccagaaacactggatggcagagagcgagctgatccaccccaagaaggacgacgacgaccgagaggtttgccagcaacaagggcaggagcaagagaagggcgtgcggcggctggtgaagatgtgcagcaactgtctgtcaagccaaacgccacggtggagggacgggccgtcggggcgccagatgatgtgcagcgcatgcggcatgaggctcaagccagagaccaggttgtcagccgagcagcagtgcggccaggaagaacccaccaggaaggagcaagagccagacaggaagaggaagaaggcggccaagaagacgtgctacgagagcagcgacgccccgccgtcgtcggaccagcaagagaagcggtgcgcccactgcctgtcctccaagaccccgcagtggagggcggggcctctggggcccaagaccctgtgcaacgcctgcggcgtcaggttcaagtccggcaggctgctgcccgagtaccggcccgccaacagccccaccttcgtgagctgcttgcactccaactcccacaagaaggtcatgcagatgcggcaggccgtcgcgcagcagcagtgaggccccgatggccggccggccggccgagaacgtctcccggaatctatcgttggaagcgcgttaggggatctcttagatcgtagcttagtcgatgctcagagaggatgagaacagagactttggttatagtagtagtaggcaatcgtcgttagctctagcggtgttctagctcagactgatttgctcggtgtttttagacgtcggattcaatacaatctcgatgttgtcctgaattgtgctatgggttttcggtccattagatgttcaaggtttcaattgggaactcggtgtttaaagagaattgctatgaaaaggcatcagttcctggg

SEQ ID NO: 86647 - DNA, 500 bp, Zea mays
  unsure (1)..(500): unsure at all n locations
  Clone ID: MRT4577_17902C.1
acatattactagaccactagcacatagaaagccaatagcgtaccaacaatggcagacaaaatatttcgcctccttatgctccttggtatctgtgcaagctgctgctacagcgaccattttcccgnaatgctcacaagctcctatagctcccctcgttcccccgtaccttccaccagcggtgtgttcggtatgggaaaacccaattcttcaactctacaggatccaacagcgcaaacgacgcctggcattccacctttatcacccttgttcctgcaaacaatcattagctctattacagcaggttacctcttggtggagtttattggcacacaaacattagggccacaagcaacttacacaagtttgtgtttagcaaacccactgcnggcctacttctccagcaccatcaggattacttccatctcaaccaaacttagctgcaattggatctcttgcttccttaattacgcaacaagcaacaaccttaccaatccaagccg

SEQ ID NO: 86648 - DNA, 189 bp, Zea mays
  Clone ID: MRT4577_179030C.1
aataatattgtttatgttgatgacacctttatttgtggcgcctgcttcagggggaaaagggcgcagggctttttattattaccccttgaacaagggaaaaaaaacacattggggggacgttacctttggggatccagacgcggggtttttgcaaaaaaacaatgaccgttaaaaaggggcgatccaagg

SEQ ID NO: 86649 - DNA, 663 bp, Zea mays
  unsure (1)..(663): unsure at all n locations
  Clone ID: MRT4577_179031C.1
cccgggtcgnacccacgccgtccgtcaaacggctcaacatgccatatnacttaaacatgccttgnagnacacctcttatgtcagcnnccgccgggctatttgcattgnnttgttgtttccgtggnnagttcaacccaccccaaatcaaaccaagggggnacaaacatnnacaagccctttatttgttcttggcnccccttctcatttcaccattcttcgnncccagttcattcgcttccttccgaggtcgtgcttgaaccaaggctnntggacgagcagcaacatttcaagaacaagcaatgnnagcgatgggttcaggggttcccgggccttccacaaagccacagctattgaccgaagttatttcgcgcccgtntgttccagngttggcctcctttnctccgaacagtggagacgagncangagaatcatgtgntcgtcaccacagatgcgcagccatagcacgagccgcacaatgccggcnaaaccagtagcgccgtcatgcctctcaccgtcggtgagcatgctgngcatgaagaaaacacagcaagttattattgttgagaaatcaatggaggangaagagatggagctgatgaagganaagtacacgaagttgctgcttggggaggacatgtcggggagcggcaaaggtgtctgcac

SEQ ID NO: 86650 - DNA, 623 bp, Zea mays
  unsure (1)..(623): unsure at all n locations
  Clone ID: MRT4577_179032C.1
caacggcacttgnnnnnngaatattatcgttgccatttacattattcataaaccaaacagcacctcgaggttacatccagctatgctattacaaaactgacaaagtaacagatccannnnnnnnnnnnnnnnnnnnnnnnagaaattcacttggctttaatccttacgggcttctactacttctacagtannnnnngtctctatggattaagaagtgaaagtctnnnnnnnnnnnnnnnnnnnnnnnnttcgttgactttgtcgccacggttgcctgaatcgccgccatccttgtacggtttcctcttcatctgcagcctcctctccggacacttgagctggaagggcatgaggaacctcgatgcttctcggaagtgcgggcctacagtggcgatctcgtgcacaaggtcttccaagcatatgatgccatgatctccaagannnnnnnnnnnnnnnnnnnnnnnnnnnnnnnnnnnnnnnnnnnnnnnnnnnaacccgcggcctttcttgtagataagctctttcacactctttaagttcggaaacccagggacgcgaatcgcgaagacgagcctggagccgagcgcctcgacgggcggctggctgcggaccttgatgcggct

SEQ ID NO: 86651 - DNA, 1363 bp, Zea mays
  Clone ID: MRT4577_179033C.1
ggggccgttcacagttgtaagtgtgcatacattataagcgtgtgcactacactagcacactacattattcataacacagctgatatattgtcgcatcgcatgaaccgaaaaggcatgtggaaggggatgaccaaagaagcgcctgctatttcatgacctgatcgcacaagtgcaggtaaggtttgaaagcccaaggtacacccaacttatgctattacaaaaccgacaagggaatactaactattcaaacttattaccaagttcattctagtgtgaatcattatcgttagcattatatttcgtaaaccaaacagcacctcgagataatatcacgctatatcattactaacatttctgattaacagatccatcactccaccacaaaatcacaactagagagagacaagtctgttcgcttggtattaatccgtaccagtttcaactacttatacagtattattgactctatcgattagtccgaagcgaacaactctgctttaattcaatttttcaattagttcgttgactttgtcgccccggttgcctgagtcgccaccatccctgtacggtttcctcttcatctgcagcctcctctccggacacttgagctggaagggcatgaggaacctcgatgcttctcggaagtgcgggcctacagtggcgatctcgtacacaaggtcttccaagcatatgatgccatgatctccaagagccttctcaattagatcgttgctggtaagagggaaaggttccatgtcaaagaacccgcggcccttcttgtagataagctctttcacactctttaagttcggaaacccgtatgtgacaaagggttcgaccacaagcagcctcttcagcgtcaactcggtggccctgaggaacaccccagtgaggaccttcgtcagtcgtagtttcctcaaaaccttcctgatgtgcgggtgcaagtccacggagccagggatgcgaatcgcgaagacgagcctggagccgagcgcctcgacgggcggctggctgcggaccttgatgcgggtcctcatccgcaggaagtcgcgctccttgttgcggaacgcggtgacgaactcctcgggccgcctgacggcgaccttgtgctcgtcgcggatgcgctggcgcttggccgccctgcgctcccggttcctcacggcccagtccacgttctccttgcgcttctgcagcttcgactcctctacaaacgccagctgattcggggtaccctccaccgccataggcacgattatccgcggcgcttcctccccaccggcacccattttttctccttccggcggcaggcggcggccggaaaggaagagggaggcgagggtttcaaaatcgcgagcccggccgg

SEQ ID NO: 86652 - DNA, 1305 bp, Zea mays
  Clone ID: MRT4577_179034C.1
cccgggctgcaggcggcacgagccagatgggtcttggtcgtctcacactgttcggcccagaccacatagtgcccttaactccccagcaaccagcagcagcaaaaatcttcacgatttagaaaccctcacctcttcccttcctccccgccgccgccaccgccggaaggagaaaaaaaatgggtgccgatggggaagaagcgtcgcggatagtcgtgccaatggcggtggaggggacctcggagcagctggcgttcgtggaggagtcgaagctgcagaagcgcaaggagaacgcggactgggccgtcaggaaccgggagcgcagggcggtaaagcgccagcgcatccgcgacgagcacaaggtcaccgtaaggcggcccgaggacttcgttgcggcgttccggaacaaggaacgcgacttcctgcggatgaggacccgcctcaaggtccgcaagcagccgcccgccgaggcgctcagctccaagctcgtcttcgcaattcgcatccctggctccgtggacttgcatccgcacatcaggaaggtcttgaggaagctacggctgacgacggtcctcaccggcgtattcctcagggccaccgagctgacgctgaagaggcttcttgtggtcgaaccctttgtcacctacgggtttccaaacttgaagaacgtgaaagagcttatttacaagaagggccgtgggtttttcgacaaggagcctttccctcttaccagtaacgatctaattgagaaggctcttggagatcacggcatcatatgcttggaagacgttgtgcacgagatcgccacggttgggccgcacttccgagaagcatcgaggttcctcatgcccttcaggctcaagtgtccggagaggaggctgcagatgaagaggaaaccctacaaggatggcggcgactcgggcgaccgtggcgacaagatcaacgaactaatcgagaagctgaactagaagcgcagaccttgcctcctccggctgtcgttttgcgttggagcgatggatctgttattaccttgtcggttttgtaagtagcattagctgggtgtaccttcggctttgaaaccttacctgcgcttgtgcgatcaggtcatgaaaaagcaggcgcttctttggtcatccccttgcgttctgctccacatgcctcttcggttggtgcgacaatatatcagctgtgttatgaatgatgtagcgtgctagtatagtgcagacgcttataatgtatgcacacttgcaactgtgaacggacatatatgcaaacattacttctatgatcttcgaaggagcttgatgt

SEQ ID NO: 86653 - DNA, 393 bp, Zea mays
  Clone ID: MRT4577_179035C.1
caaagcggtcgcccttttatatttttcataataaactttcgaactcagaagaacaccacgagtaatctaaaacactcatggagaaaaaccttaattacaaacttgatctcaaacaaaataccaggggctgatgaaaacaagatgacaaccataagttcacgtgcataagcataactcataaccaaactcagcctacatctcaaatacaaaaacaaactactcagaaccagccaccaccatgacagcctgatcaacttagaaaggcctgcaaacattaacaccaacatcccgttggtagtgaacatcaacctccatgtgcccacaaaaaaaaaacttgggggccttaagaatcgtaaccgtgcggatcaacacgtcaggaaaggggaaaacgct

SEQ ID NO: 86654 - DNA, 151 bp, Zea mays
  unsure (1)..(151): unsure at all n locations
  Clone ID: MRT4577_179036C.1
tgtttaagctcatgttgctatccaaatatccatcttgaggaataccaaataaaacaaacctattaaactatctctgtattatacaaacatcttcnatccttacctagcccgactcgatactccgtaatggctatatatagctggtgctact

SEQ ID NO: 86655 - DNA, 782 bp, Zea mays
  Clone ID: MRT4577_179037C.1
ttgtatcagtcctgatttgtgcaagttcagaaattcatatggggaagagcctcaagaaacactttcggtgcctttccacaagaggaaaatacacaaatctgctttggtcttctctgagaagtctgtctctactttggagcttctcaaggtctcatggtccaaagaatggcttctcatgaagaggaattcatttgtattcggcatcaaaatagttcagttgtgatcagggacaaaattccaagcattatagccatgattaacaaaacctatgatgaaatagaagcccagttggattgacttggtcgaacagtcggaggcaatgctgggatccagacaaaaaatgccaagaaaagagctctaccgagaagggcatttctccatcttcggctgctctgtgggatattggcccacatgacgacttggtacagacattgcgtttagcagtgatgtgcactgtcgattcactctttatacgttcaactatgaagcagaccgttcaacaattaaagcagctacaacctccaaatcgtgaacatcgatagagataaatagttttacaccttctaaatgtagaaggtaaggatagttgtgacctcaccctcgatgttttccccttatcatctgttttactagattttatcctatagatggcagctttgttcaatacatttttctcttgaatctcacacttctcactaatgtatctactgataagaagtgcatgtgaaattaatagtcttaataccaaagattttatttaagatcgtttgattgattcttcc

SEQ ID NO: 86656 - DNA, 990 bp, Zea mays
  Clone ID: MRT4577_179038C.1
cccacgcgttccgtgattcttaagatggagctcagaattgcttatttaaccaacttggcttctaacatgtccattaggctttaagtttaacctgatgacatgtcataatttgggcgctaaactcatgtgcatgagatatattcttttgtgcacaatcgttttcttagcgggtgtctgattctgtatcacctttgtgtcgttgacttgttttatgtggctctgttattgcgggtgcagctctgttataagggctattaataaggtggtggttgttaaactatgtcctgcatatagtagagactgtgagctgatatgttttcagctaatcattaaggatcggaaatcttcatacaaattccatctctactgattattcacttgctgtagcttttgtgatccttaagatggaacagataattgcttatttaaccacgttggcttctaacgtgtccactaggctttaagtttaacctgatgacatgccatatatttggtactttttagttgcccctatggcttatatgctttaagttctaacctgctgtgattctgatgctgctcgacttggtggatttcaatgaagccgaaagatgttgctgccttgcagaatggtgtgatggtgtctagacacgacccaatatgtattctaatggtgtgtttcgttggacgtacgaggaaggatggaagagtgtggatacattttctataatgtttggatgagagtcatgcgggagtgaggtgaacaatagagcaatttttagtggtggtgtggtctaaaaaatcgagcggacggtgtcgccttcgtcttatcctactttgaccttaaacgaaacaatccaactcgtaccagagaagaaactatattgtcttggttagttagaagaaaagaatgtctgatgtgtttcatactcagaccggggcattcaacataatatgtcagacatgttcaaatggagataaaaaaaaaagaaaaaaaaaaactcgaggagg

SEQ ID NO: 86657 - DNA, 618 bp, Zea mays
  Clone ID: MRT4577_179039C.1
atggcggcgctcctagccccatccacgccacccaaccctagcaccaacagggtattctatggtggggtggacgacaccctggtgtacgatgggtcgtccggtgaccacggcattccggccacgcatacccacagcgtcgctccggatccaaacctcgggctcgccccaccacgcttctacaagctggagttccccacctacgacagcgctacagatcccctccactggctcaatcagtgcgagccattcttccaaggacagcgaacaatggccttggatcgcacatggctggcctcctaccacctcacaggcacagcccaaacatggtactatgcccttgagcaggatgagggtatgccctcatgggagcgctttcgtgagttgtgctccctccgctttgggccaaccatgcggggtacacgcctctctgagatggcgcaccttccgttcacctccatggtgcaggactacgctgaccacttaacgcagtgtagtgccactcccgcaacctctcggcacccccagaaggccaagttgttcgtgggcaggctccagaccacattcacatcgacgtcgagcttcacgagccgtgagacctccagtcgaccatgtacttag

SEQ ID NO: 86658 - DNA, 1286 bp, Zea mays
  Clone ID: MRT4577_17903C.1
tttcttccccctcggtcactttgatattggacgagtttccggccgcggacgttctcctgccctgccttctctcgtcgacgtctccttctccctccttcctccagcacgagcggcagctgtcggagcacgacagttgcagcgtccttcaggggaggaagaaaggggacgacggcacgagtttaaaccaacaatctctcgtcatatatatcataatagagagtaggacgacaaaagccatgggcagtaatggcagagatcataggcgcggagtcccacgcccgccacctttaccactttacagggattgggaggaggaagaggtcgtcaaggctggtcgacgtcggcagtcgccgttggcgcagtcgtcaacgtcacccgcggccgcagccggcgtcgccaacaagaagaggctgtcgaagcagctgtccatgaaggagaccaccagggaggtcaagtgggagaagcggaagcggcagatacaacggcagaggagcagcatgcgcctgagcgaagccgacgacagggcaggtggcagcactgctgtctgtcctgttgacggcgaggcgagctcgagcgcggagcgggtggccactggtataaccgacggggacctggatgagctgaggggatccatggatctcggcttcaggttcgacgagcagaagggcggccaggacctctgcgacaccctccccgccctcgacttctatttcgccgtcaaccggcaggtgtcggagcccaggatgtcgtttcccacgagcacgagctcagggccgtctctgtcggccaccaagtcctcgcccaacctctgcggcacgcccagcccaggtagccctggtgcgcactctagtaacgccttggagtcatggaagatttgcaacccaggagataaccctctgcttgtgaagacaaggctcaggcactgggctcaagtagtggcttgttcagtgaagcactcgagctgatcctcgtcagtgttttattcacgctcttcttccatacataatacccgtacaagtggttgcgatggcgatgaattagtcgtgtccgagtgaaactagatcaattgaccttgttgctcgatctaatgtcgtcccaggtcacattgttgtggacagatttaattagcgtcgggttggcaaattaaaaaatgtatatgcaaagtactgttaaaggttggcatggtgtaaaaggtgtgagctatctccctaaatcattatgtcacagatttgaaacagtctttccgtatctgcgaaaacaaacgtgtctcgttttcggatcctcga

SEQ ID NO: 86659 - DNA, 423 bp, Zea mays
  Clone ID: MRT4577_179040C.1
aaatcccggggcggaccacacccttccaaccttagttccggaaattgccgcctttattttatacgcccgaagccttgccgcccaggttggacccttccaaggtggggggggggttcttccgtttaaccgccggcaaggtcggcccacctttttcgttggccccaaaaatcggcccgttcggtttttcccccaaaaagatcgggggggccatcgccaaggaaccggccaaggactgaaagggcttccggttaaccgtaaagttaaccgtccaaaaccggcaggccaaggtttccgtggtcccttccgccggggggtttgtaataaaggccttaaaggggccaaaaaggaaccccaggaaggtcaagaccttaaagcccaggggcaccataagccttaacaacttatataaaatcgccaggacct

SEQ ID NO: 86660 - DNA, 1263 bp, Zea mays
  Clone ID: MRT4577_179041C.1
gttaaactatgtcctgcatatagtagagactgtgagctgatattatgttttcagctaatcattaaggatgggaaatcttcatacaaattccatctctactgaccattcacttgctgcagcttttgtgatccttaagacggaacagataattgcttatttaaccacgttggcttctaacgtgtccattaggctttaagtttaacctgatgacatgccatatatttgggactttttagttgcccctatggcttatatgctgtgcctgtgggatgaacacgtcccaacattcacctcatttttttcactttgtcagctaatagccatacatgtttagctgattgttaagattgggaaatgtacgcttttcatactgtgttgtatatgctctgtttgcctgcttgaacatatcttgttttgagagtaaatacgttgccccgatggtggcaatggtgcctgtgggatgagcaggtctcgatgtttgccaccattttgctcagttgttgttattccataaaccatttgttggtcattcgtgacttggaaaaagttaagtgtatattttgtagccttctgttttcccagttctataccttgaatgtgatttcgtggtggctgatttgtttcttcgtgtttctctaaagttaagaggtgtttttctttaacgaagaggtgaatcacctcctagcccagtgtttttcgtgtttcttctatgcatcagcagcaagcttgtgcttgccttaaagctacagggggataataggctgaacttttagccttggtaatgttgtatgtttacacaaatatcctggcaggtgcacttgctgctgctgtgattctgatgctactcgacttagtggatttcaatgaagctgaaagatgttgctgccttgcagaatggtgtgatggtgtctaggcacgactcagtatgtattctaatagtgtgtttggttggacatacaaggaatgatggaagagggtggacacattttctataatgtttggatgagagtcatcggggagtgaggtgaacgccagggcaacttttagtggcggtgtggtaaaaaaatcgagcagactgtctctctgagcagactctctcgtctcatcctactttgacctcaaacgaaacacattctgactttgactagtgaagaaactctattgtcttggttagttagaagaaaagaatgtctgatgtgtttcatactcgcaccggagcagactgctctgtcaaaatgtttaatgtgtacaacttgttttctg

SEQ ID NO: 86661 - DNA, 564 bp, Zea mays
  Clone ID: MRT4577_179042C.1
aaatgcaaagatcggctccctcgccggaggcctccaccgcggccctgctggacactggcgaccctgagcgcctccgcccctgccatgggcaccgcttctgtcttcccaccgcctagcatcacccccgcgccctcctcctcgccttcaagccccgcgcccggttccctcgaggtctcgtgccgccggacctctcctgcacctccaccgcacgcagcggcccccgtgccaagttcgtcgttggcctctgttgactctgcgttgagcagagtgtgttcgtccccgcgtcttcgcgcctctaccaggtccatctctatgaccgccagtggccctcgtgtctttccctgccgtgctcgcccggccagatccggaggtctgccgccccttgccgcccgttcacccgtcccgctgcctccgtcgatcgtctcctggaggaagcgacgaggcagccggcagcgactgtgtctacccgcgatcccctggtctaatgccttcctcccgcatcacgaccgtcctccagccccggcgggaaaccccggggctaaaccgcaagcatcaatgttccac

SEQ ID NO: 86662 - DNA, 207 bp, Zea mays
  Clone ID: MRT4577_179043C.1
gttagtagtagcaatagcgaagccggacaagacaaatccattcagtcatgtgatgtacttgctcagctgtgtaatgtagtataatgccgttatgcaatgcaatgtttacctgactgactgtaaaaaaaataaaattataattatttaaaaacaaaaaaaaaaaaaaaaaataaataataaaaataaactataaaatgtagagttttt

SEQ ID NO: 86663 - DNA, 600 bp, Zea mays
  Clone ID: MRT4577_179044C.1
agttcctatattattcacttatcagggatattcctgctcgaccagctcggcttctggcgacggaccttggcgccgtcctgctagcgatacggcgatcctgcgaagcggaccgatcttgtgcgagcatgaacgaaatccctatctatatgtgtgcttctcccgctcgtgtacttctaggtacctgcccctcgtggcgagccgcttgcgctcatagtccgtggccgagagcccggactcctctacggctatcctcacatgacgatgcacgccacggcccaccgactctcatatacggatccgtatgacgcgctcgagcaagagatggacatcccccgcaatgatttcgctatgatccaccaggtaagaagagtctcttacagctagattccatatcgttggtggtgaactgacatgatcaatcaccctagctaaagatctacggactgtcacgagatccttgggatagatattatggaactaagctcgatgacatgcgggacttgatacaccaactaccttgtgccccataggataatgccaagtacacgatcatattcgatcacgggtttcactgctggatatacgacgtcgctgaatgtc

SEQ ID NO: 86664 - DNA, 273 bp, Zea mays
  Clone ID: MRT4577_179045C.1
cccgcttcttctggtcactccgccaccgtagaatcgcctaccatttggtgcaagccaaaagcgatcagcaattggacaggaaaagaatggcattgaagcagatttccagcaacaagtgctttgggggattgcagaaagtttttgaacatgacagtgttgaactaaactgcaaaatgaaatttgctgtctacttaccaccaaaggcagaaacaggaaagtgccctgcactgtattggctctcaggtttaacttgcacagagcaaattttatatc

SEQ ID NO: 86665 - DNA, 286 bp, Zea mays
  Clone ID: MRT4577_179046C.1
agggtccctgtatgcaggtcgctacttaacttgacaagcagtgttgctgtgtaagagattgtgtaggcgcggttcgcgatcacttctttcctttcccaaccaaataaagaaatgcaaaaaacgactaattctagaccagaagatcttctcatgttggatatcagaaataaaataggtgatctttcgggagggagtgccagtagcaccagttcatcgtcttttttgtcttgcaattctagtctacactctcatagtccttcttcttcagaaggattcatttcttttg

SEQ ID NO: 86666 - DNA, 194 bp, Zea mays
  unsure (1)..(194): unsure at all n locations
  Clone ID: MRT4577_179047C.1
cttaaaccttttcccccataaattctattcattcatttcttttctttgttgagaaagaaaatatctaagctggatattactctgattattgctgtccggggacacaggatacttggggtggttccggtagcaaaacaggaacatttttttatncgagggggtacataccggacaaggccgcatcattttttttt

SEQ ID NO: 86667 - DNA, 427 bp, Zea mays
  Clone ID: MRT4577_179048C.1
gccggccttttcaaaagggggcagccagccctgcattatcccattgtgcgacatctcactacagcttcgtacactcgaagagagagtcgctatggaccaagaaacacccggcttactacagactcaaaaatggacggactcaggatgaacttcgacgaagttgacgtcatggccgtcgcgctcatggcgaccaacgtaaccggcgaggctcccgccccggttaccacgaccgacgccgtgtccgacttaatcctcaccgtggtctcactcatctccgacgacttcaaatacctcttatgctagattcacactatatacaagcttcctgctcccaaacatcattcgactaggacggcgagcgcgagtccagctctgtaccgtgagcgactctgtatgaagagtcagagggagtgtgtatgtatgaagt

SEQ ID NO: 86668 - DNA, 286 bp, Zea mays
  Clone ID: MRT4577_179049C.1
aaatgttcagattcaggaaccatgcatatggactgggctgtacggttctctggatacgcgacttctccaacatcgtgctgtggtaagaggagcaagggctacaatccagagatggatgatcgttccctggtaaaatagtgctgtttctgtggcttgggctggccatctccatgatctggagctttgttggcctacccacctgtggtcagcacctgcattcgtgctgctagaataaggttggtggcaatcgatcgatcgatcttcggtgatggttgttcctccctgt

SEQ ID NO: 86669 - DNA, 635 bp, Zea mays
  Clone ID: MRT4577_17904C.1
attcatctcacaagcctcaaccccatttcgctgcccccttcccagcatctatagcagcatacctcaagtgttccatcttctccagctcacatccatcgcttgtcataccatcagaaatggccacttacgctggaggaggcaataccgaggagaacaatcagactgttctaagcacattacccaaggaactgccgttggacttcttgaggactatcacagatcagttctcagaccagcgcattcttggtacgggtgcatttggaacggtttacacgggagttatgccagatagccaaaggattgccgtgaagaagcttgcggagagtgcaccggttgcacgcgacaaagcatttaccaatgaggttcaaaatatcatggctctccaccataagaatgtggtaaagttggttgggtactgccatgaaggacaaaagaaggttgttcaaaacaatggaagatatattggttgcagatgtttatgaaagcctactctgctacgaatatttacctatgggaagccttcagaggaacctttttgacaaacccattaacatggcttgggatgcgcgcttcaaaataattaaggggatctgcgatggtttactctttcttcataggattcctattatccatat

SEQ ID NO: 86670 - DNA, 343 bp, Zea mays
  Clone ID: MRT4577_179050C.1
aaaaaacatctttttacgttgtcttatattgtagcatggtgttgcataggctccagacacagcaccctggaactccacatccaaactcacggaaagtacacccagcctgttcggtgcgggggcacatggtgacaacgggaccctcctagaaaacaacattgacccccaaaccaaaatgttggggcccccaacgcgaaagccccggtaaaggtaaaacaagccggggacaaacaaaccaggaactggaaacaccccaacgaatacatggacgccccggcaacctctgggacaaggagggggcaacccccccctagagcgcggcacaagccggccgcggccaaga

SEQ ID NO: 86671 - DNA, 1074 bp, Zea mays
  Clone ID: MRT4577_179051C.1
cctgtgcggcgctcgaggtcgcgtcgaggacacggccacacctctcctctctctctcctctctctctccccctctgtccagcgcactctttctcctcactagctacccacctcagcgagccaaggccggcgaagcgcatccatcggtccatggagttgtacgtggacgagaagtggaagttctccaagaagagccggaacaacggcagccggcgcgtcccgggatccggcggcggggactctctgctgaagagatcgtccagcatgagggacgtcgcggcgatcggccggcgcggtaccggcggcgccggcgccgcggcggcgggcgggtgcgcgccgcagccgtcgttctcgagccggtgcgcgggcctggtgaaggagcagcgggcgcgcttctacatcatgcgccgctgcgtcaccatgctcgtctgctggaaggactgctcgtagccacggctccagggccggccggcgaagaggctcgacccctcgcagttccccccgcccgtccgcccgcccgccaggatcagagagagagagagagagagagagtcagccatggggctgaagcaagcaagctgcaagccggggggacacggggaagaaggcagattaggtgatgtgtgtatagatcagtcatcagtcttgattaggagtcctcatctttcttcttcttttttacctcccatttctgggacgttttctcgattgccggtgctcgattaggtaaagagtagtaactagtacagtacctagcgttgcgaggtagatgcgtgtggtatcgtggacagttttgggaatccccttcttcaaggggaatggggatctgggttctttacagctgcagtgctgcgaaggagcaccgcaggcagctgagatgaaatctagtggatctcttctgttgttagttgtaccacgaccacggtaaaaaaaaacaacaacaacgtcgtcatcgcccggccatgtatagctaaagaaaccagacgcaacagcctgctaaagatgcatgtcacctcgtatcctgtttatatatattttttaatctctctttctgtgcaaaaaaaaaaaaaaaaaa

SEQ ID NO: 86672 - DNA, 511 bp, Zea mays
  Clone ID: MRT4577_179052C.1
aacgcgcaaaaaatagatattatttagaaggcgagcacagtttttataacagtagcaacagtaggaaataaaccggtaaaaaaggtgctaccgacaaaaaaaaaagagacgcgctgggacaatcacccactaaagtttttatagcaggccctatacaataccatatttactgctcttcgccattctgggcaactcctccttttccagtcgagccttcttgagtcattccttcagatcctggatttgcgctactgattccctgatacatttatgcgccaattggttggcctagagtcttgagttctgttatttcatgagctgattttgcagcttctgcaaactgcgggttatctattcatctaccatgctggttatttgcgcaagctgtctattcctagttctatgaatctacttcttaaactgacatatctgctctatgtgaatatgcgaatgtatgcacgcgtttttctctatcatgcacctgcttgatactagtgaacattgcttctgt

SEQ ID NO: 86673 - DNA, 280 bp, Zea mays
  Clone ID: MRT4577_179053C.1
ctcctttcatctcttcgtgcgtcgatatgtacgatggatcaggcctagtattctagcgacaatgcagagtccggtcagtttgcacataattaaaccaattttgactattcatgttaaaaaattggcagctcgacactcacttgacaaacacatgctgcctccaaactaatcagcagtcaaatattccgttcatttttttttcacatgccatatcttaccttcatatttctatctttgaccaaccactttaaaaacagatcatatgggctgacaacatgag

SEQ ID NO: 86674 - DNA, 243 bp, Zea mays
  unsure (1)..(243): unsure at all n locations
  Clone ID: MRT4577_179054C.1
tgtgtgtgtgtgtgtgtgtgtgtgtgtgtgtatttatatgtgtgtgtgtggtgtgtgtgtctccccccctgtgtgtgtgtgtgtgtgtgtgagagagagagaccgcgcgagagagagtgtgtgacctcctctcactatattntcacactagagancgtnctgcgcgcgcgcgtgtgcgacataaagagagcgtgagacagagagagtgtgtgcccccgtgcgtgtgtgcgagagtgtacacac

SEQ ID NO: 86675 - DNA, 535 bp, Zea mays
  Clone ID: MRT4577_179055C.1
ggttgggggttttttttttttttttttttttgggtgtttttttttttttttttttttttttttttttttttttttttttttttttttttttttaattttaaaaaagtcccaaaaaacttttttccttaaaaaaaaacccctcccatttgagggttgcggggggggcattgctcaaactcccccccctgggggggggggaaaataacttactcattgccggtaaaagagaaaactacccagctagggagctagtaaacggctccctttcatttttactacaaaacaaaatttccccaaaaaaaaacaccccccccaacttcttttcaagggaaaggacctggtttttttaattttaggccccaaaataccctaaatttttgggcttccttggcccccattaacgccccaagctcccccttcggtttttttttaaagaaggactggaggaccacaccctattttgcctggtaccggggcaaggggtccacccgccttattttgtgggaaaactttttttttaacccctggcactttg

SEQ ID NO: 86676 - DNA, 1345 bp, Zea mays
  Clone ID: MRT4577_179056C.1
agcagatcattgtctcccgtgcacacgggaatgtaccttgggtcagttacaggacttgcattttcccccttgctgatacataagttcggttggccatcagtcttcttttcatttggatccctagggcttgtttggttcacgacatgggcaaccaaggcatatagttccccacttgaagatcctggaatcagcgctgcagaaaagaagcttattgctagtcagagcacagcaggcgaacctgttaaaacaattccatggagattaatactatcaaaaccacctgtttgggcacttatagtttctcatttctgccataactggggaactttcattttgctcacatggatgcccacatactacaatcaggttctgaaattcaacctcatggaatctggccttatctgtgttcttccctggttcaccatggcggtttctgcaaatgttggtggttggattgcagacacacttgtcagcagaggagtatctgtgacaactgttcgtaagatcatgcaatcaatcggattcttggggccagcattttttcttactcaactaagccatgttaattcgcctgccatggcggtgttgtgcatggcttgtagccagggaactgatgcattttcgcagtctggtctatactcaaaccatcaagatataggccctcgatatgcaggtgtactgcttggtctttccaacacggctggggtcttagcgggtgtatttggcacagcagcaacaggatacatcttgcagcatggttcttgggacaacgtattcgagttatcagtagtgctttatctggtagggactttggtatggaatgtattctcaactggcgagaagattcttgattgaagggtgtatgtacacagtgtgcttacagttcgtagtgacaaactcatttcggatcgacaacttgacccctggacataatacacttcaagataacaaatgtgtcatcgcgcagcacgagaagtatcaacctctacatcccggatattaaattgcctggttgtgatgttgctctggtagagacgatttgaagcatatggaattatggatgagttgagcgatgcacccgttccgagcatgccactgtatattgtgttgagcataggtatcatgtacagcatggtagaaagattcgtcatacagagtagttttttttttacttgtacaatttttccctcttgaatagtttgttcctgtaacagcccgacgtagataaaaacaaggaaacctggggatgggggtactactaatgcaaacatttggtgaatatttatccaaaaaaaaaaaaaaaaaaaaaaaaaaaaaagggcggcccctcgggccctagaactag

SEQ ID NO: 86677 - DNA, 444 bp, Zea mays
  Clone ID: MRT4577_179057C.1
attattttttttttcataatataatatttattctaatgagggtgttttttatttataaagtatgattctcccactattcaaacacccaaaaatcaggaagttaacatggcaacacaaacagactggggatgtgggcagcacaaaaaaacatacagcgatcgggggcggtggacaaaagtaaaaacacttgaagccataaaaaaaaacgacattaacacaaaagaacataacaagggaaaaaaataggcgcctatagaacaaagggggggcgaaacattaaccgcgaatccaaatttcgggggtggggacaaacttgaccaaaaacggagaaaaaagggcgattggggaacttaaaagtgaaccccaaaccgggcttaaaaaaaaaaacccggccaattcacaaaaaaaaaaaatatttctttgggggcaaaaccggcaaggttc

SEQ ID NO: 86678 - DNA, 528 bp, Zea mays
  Clone ID: MRT4577_179058C.1
gctagctagcgcgatcgagactaccgtacgtgtcgccatggccgcaacagcgtctctgtccgccgtcgcggcgccgctgtccgtggccgggctcaggaagccgctcggcgcgtcgtcgttccggcccctgcagccgagggcggcggcgaggatgacggccgtgcgcgcgtcgtcgtccgtgaaggagaaggcggcggccgggctgaccgcggcggccctggcggcggcgctggtggtgccggacgtcgccgaggccgcgcagtcgctcacgccgtcgctcaagaacttcctgctcagcatcgtgtccggcggggtcgtgctcgtcgccattgtcggcgccgtcgtcgccgtctccaacttcgaccccgtcaagagggcctgatccgatccatcgttaggaggcacgtctcccctgtgccctgtcctgtctgtatccactgctggtgctgtatcttcctttgttgtgttaattaattttggagaatgtccaaacatatatatctctatgatacggagttcgagttattc

SEQ ID NO: 86679 - DNA, 512 bp, Zea mays
  Clone ID: MRT4577_179059C.1
tgctcggaattcggctcgagagactgccatgcaggtttttactgacaaaagtcttggaatgatgaccagcgagctcctcaacgcatcccaaggtggaccaacaatgctccctcacattgagaatgagtgtgggccacaaagcaaggagttaggtgccgcaagtcaggcatatgtcaactgggcaagaaagacggcagacggatcgggcactggtgtgccgagagtgatgagcaaagaggacgattcacctgatccaatgatcaatgcatgccatggtttctactgtgaaggatcttctgctaacaaaccatggaagagcacaatgcagactgaacctaggattcgctatgccacggaatgagctgggaccatacaacaacgaccggctgaagatcaagcattagctgctgctcgatatgacaaaaggccggtgctcatatcaatcactacatgtgttatggaggaacaaattttgctcgcatagctgggggtcccgtcaacacacaagctat

SEQ ID NO: 86680 - DNA, 440 bp, Zea mays
  Clone ID: MRT4577_17905C.1
accacccacgcttgcagcggggggggccgccccaccctatccgcgcgcgtgttgatggagatggcacacaacagctgacactcccatgctgagccacgtgatgaacagcatcccggcgcactcgaggccgatgggcctgtcagggcattgcgctcacccggacccggccccggttgagggtggtgaaggtcgccatcgagcccgagaacgccacgggagatgggcggccgccgatcaacggagacccgtacatcggcagcctggagacgcccgagacctgcagcccgctcgtcgtgtgttacctctccaacctgccggacgaccggaccgacgtgagtcctctgctgagggtcgccgaggtcggactgccccacgggtacctcctcggcgggcccttcacgctcaccggcccagtccagcatacgcccgtgcacggccag

SEQ ID NO: 86681 - DNA, 1020 bp, Zea mays
  Clone ID: MRT4577_179060C.1
atggcagatcatcggatctcgatttatttccatcttcaagttcaattatcatgtgaggagtccatgctgctcataaccatggctcgtattaggtgcactgcacgtaagtctgtgatcccctttttgccttctcacctggcggagcgtccactgtgtcgcacggtgtcaggtcagtctagtcacctggagagactgcatcgtcgcctgcatgtggagcaggagcgccgacaccaagagcaggagcagcaggactcttctccctcgcctcagcgggaggtggagtctgagaggccgccttcccctgcacctcagccagagatgccccctgcaccaccacagggcatctcggctgctggaggagaccctgatggtgacggagacgacgatgacgccggtggcagttcgagccacgacacggagcgctcggaggagccggagccagagggatggatcgctagacccatcactcgtgacgctgctcgcaagtgtcacttccacgatgctctcgataccctgttgcgtcaggcctttgaccgacacacctggtctatcgagtaccattgtgtagtctaccagcatcgtcgcgggttatacctggaccagtgggaggctacttgtttggccttctcagagcactattctatcacagagagggacactgtcgaggcagccatgcaagatgcagcacgacaggcaatttctcagtattgctcgttgttcagcggggtagctgacggccttgacctgaagtactaccctcgccgttcaaccggcagtgctggaggcgtgattatctcgcccgttggtgagggcaatcccaggctgagcagcatggtcaacctggccattgtgctcaacacagagttggaccacacccttgacgagttgggcaaggttcgggcagaggttgcggaattgcgtgctgaatgcacggcacgccactatcttgatggtggttctcccacccctgtcgggattcagcacccttaccgttcaccgcccggtggtcacttcgactaa

SEQ ID NO: 86682 - DNA, 205 bp, Zea mays
  Clone ID: MRT4577_179061C.1
gattccggtcgaccacgcgtcgcacgcgtcgccaccgtcgccactcgtacggtgggtaagctcctgggcggctgtgctgctgcatgccgctgccgcctccttgctggccatattataagagccggggagatggctagaggaggagccaaggccggggttaactcaggaccacgccacgtaacaagcagaccggcccggccgccgg

SEQ ID NO: 86683 - DNA, 390 bp, Zea mays
  Clone ID: MRT4577_179062C.1
atgcaagatgcagcacgacgggcactttctcagtattgctcgttgtttagtggggtagctgacggccttgacctgaagtactaccctcgtcgttcgaccggcagtgctggaggcgtgattgtctcgccagttggtgagggcaatcccaggctgagcagcatggtcaacctggccaccgtgctcaacacagagttagaccacgcccttgatgagttgggcaaggttcgggcggaggttgcggaattgcgtgctaaatgtgcggcacgccactatcttgatggtggttctcccgcccctgttgggattcagcacccttaccattcaccgccccgtggtcgcttcgactatggtaccctagactgcaggacccggatagatatggatccctag

SEQ ID NO: 86684 - DNA, 527 bp, Zea mays
  unsure (1)..(527): unsure at all n locations
  Clone ID: MRT4577_179063C.1
annnngagcanncagaaacacaccaagcgaagcacgggagcaacaacccaacaacaanggcnaccaaganangagcccnccgggcgccccnagcgccccnagcgagcgcaacaaaagcgnncaaaannccacaaggcncacnngcnccaagnnccaaaannacacagnnccncccaccagnnacnncaaagggcngcgaacacccagcggngcaagccnanaggcnacaacaagcaanngcggcgagcgncnaacaacaaccaannncccaggngcaacaacaagccnnggcacaacnaacaanacaaaccagcgcaacgcaacagcaacaacaannccaaccagcacngagccaccgagccanggagaacccngccgccaacnngcaacagcagaggcnggcaacaaacccacnngcacnggcaaacgnagaggcaaaccagccacaacaacagcngcaacagaaagggccagcgcacagacaaccagccanggagaacccngccgacaaccaacaacagcaacaa

SEQ ID NO: 86685 - DNA, 365 bp, Zea mays
  unsure (1)..(365): unsure at all n locations
  Clone ID: MRT4577_179064C.1
tacttactctgcgcacagaaagaaggacccgttggtgggtgaaaggaaagnacgcagcggccaaagagacaaacacaataagggcaccgacacgacgcggcacgaaagacaaaccgcgagcgcagacagcaagacagccgaaacagcgaagacaaacgagaaggaccacagacaagctgcaaagcaagaaccacagcacacaggaggggaagagcagggggccagcaagcgaccagcgaacacaaagcacgggcacaggcaggccacggcacacgcgagccaatgacagcggcggcgcgcaaagaaccgggaagaccggacaccccggaacgaagggccgacggccgcagaagctgcaaagagag

SEQ ID NO: 86686 - DNA, 185 bp, Zea mays
  Clone ID: MRT4577_179065C.1
aagcaggccaacgccagccgcgacggctgacactgcacacacaatccctccccatggcactctgctccagactgctgctatataagcgcgacccggaccggctctgcttccccaggagtcctctcctgccatacatctgatgcttcttgtccacgcgcgcacccaggcccaccagcggcagctcc

SEQ ID NO: 86687 - DNA, 425 bp, Zea mays
  unsure (1)..(425): unsure at all n locations
  Clone ID: MRT4577_179066C.1
caaacaaaaaattttttgttgccggcagaagacacctaacaggttgaagaggcgatacagggctaagattccatgggccatacggagctcctagccagtttgcataagatattcaagccttgaaaaaaaagttgctgggaagggggaccaagccctccttcagacccttaccaggagtggcacaagagctctgaaagtacacagnggaggtgcgcgcaaggagcgaaaaacaagcttggcaatgatctcagcaacacttatggccttaagaacgaattgctggctggctaaaacaagcaggacagcatcacggtacgtcatcctcgttaaggatcctgagcagctcatgtgtggcttcaacaacacggaaacggccattgatatccacaaaaaaggaaagaccctgaatgttatggaagtaatgc

SEQ ID NO: 86688 - DNA, 138 bp, Zea mays
  Clone ID: MRT4577_179067C.1
gctacaggacctgactgctgactgagagatatggatgagcagaagataatacacttacgaggattcccctagaaacggcatagcgactcctggagcagcccagctcggatacggcatgaaaggggccaaattcaatgg

SEQ ID NO: 86689 - DNA, 565 bp, Zea mays
  Clone ID: MRT4577_179068C.1
cttaaaacattttaataataaaataaattatttacatgggcaggtacattaatttgtgagtgcacccactaattaatgtacctgcccttgtaaataatttattttattcttaaaacattttaatagaaatttcattgtaagaaaccgatgttagattcagaggttcatagactactaactaacctacccgctggtgtatgtaaattggttgtaatacattcgtaaggcacatatgaagtttctgctattatttaaacatttctatttgaaaaaatataatgtgcagcgtttagctatatttttgagtaatttcgatgcaacgtgtttttttttaatttccgaaacagatgatgtttactaaaacaaattggcataataaaagtaattagagatactaatgctgatattatttctttaaacctagttaaattattctaaaattagaacggctttatttttggggcggaagaattcattggttcatattggggatttttaggtaaatgtgtctgttggtaaattggagtttaagtaacttaaatctgttgtcaacatgggcttacat

SEQ ID NO: 86690 - DNA, 548 bp, Zea mays
  Clone ID: MRT4577_179069C.1
aattcggcacgagggggggggaccgagcttccgatacacacaaaattaattgttaagttacccaccggacagcaaacccagagggagacttataaaaataaagagggatttttttaaaggcttggaaggacaaagggaaaaaaattcctttaccgatttattttgcaaccagggcttaattttaggggttaatcaaaatacttgggtaaaccagaatgggacctggggggtttttggtttttaaaaaaaaaaacaaaatggttttcttgaaggcttgccaatttttaaggttattccacaagaattggccaaacttccgggccaaggtttttacacaaaccacccttggtggttaacttaatggcaaagaccaaaaatttgggggattctttgattacttccaggtgggtggaacacaagggaacacttcaccttgaccacaagggccaacgggaaaaggcattagcttattggcagataattaaagaagaaaggttattccaccctttggtttgcttgtggcccttggacaaaagaactttaagggc

SEQ ID NO: 86691 - DNA, 189 bp, Zea mays
  Clone ID: MRT4577_17906C.1
tgctgcgcgtgccgcactctaagcccgatggggactttgttatgcagatgggggtgcacaccaagccccatctcgagtttcagcaccatatgctggaagtcaggcgactgcttcgctgagaagctccaaaacctgatgcagcccctgtgacgtaacttatatatggagttccttatagcgcatcatgct

SEQ ID NO: 86692 - DNA, 340 bp, Zea mays
  Clone ID: MRT4577_179070C.1
ggggacgaaaattttgaaagagagactgtttacaaaaactttagtacaaagtacaaactttttgtttacaaaccggcataaaaaaacatacccgggggacaagagcctatagctataaccggaggggggcaaacgactactttttggatttggaagggctataaagcagttgattaaagcacctcctttgaaattgatgggggggaattataccagcaacagttttacgatccccaaaaattgaaaccctttggtcgttggggaggttataactacccggggggtttggagggggggaggaacccccgggagcaaaaaaagggattgatgagggcaaaaa

SEQ ID NO: 86693 - DNA, 2143 bp, Zea mays
  Clone ID: MRT4577_179071C.1
gcgcaataataaacccgtatgctgagccggtgagccccaccatttcaccaaattggcaagaaagccgctagcaatccacagttgcgatttgcgggaacaactactactatcaaaaactttcgacattcgattatgctggcgatggaaatggagctcctggtccgatttcaatgagagccataggcctccaaaaatagggttcaaaaagggccagagagcaaggagtcatcccatttttagccgttgccgtagctggtcgtcgtcgtcgtcgctgctcccaatctgcggccgtcggtgttgccttcgactttaatccacaagggcgagcagcaccgaccgagccgatccgctcctcttcttggttcttcttcaataaatcagcagagcaggaaagatctgtgagcgttcttgcagccggcaggggtccaggattacgaaggaaaccaagaacgcaagaaacgtctaagaagaggggaggaaagatttgggtgtagattggtagatatattacacaggttttgttttggtgtaggttattagcaaataaatagctggagaagaagcctggcaaaaaaaggtgaaatttgtggagaacatgtttgggatccaaaccagggatgtggcagaagatttcaactcctggaggaggacattaaggaacacacccaccgtctcaatgcccatgaacaaccacaacattatgtacaacacaggcaagagttttgttcaatgtacacctcatgtctgtcaagtttgaagacctgtatggattcatggtggagggcaatgtggacgatgtcaatgtgctgaatgaggtgcgggagaggatcagggagcaaggcagggtgtggtgggcgctggaggcaagcaagggtgcaaattggtatctccaaccaaagatttcttcaaacgagggggtgatcagtgtcacatcactcaagttgtcagtgctcactaatacaattacattgaggaggttgatcaggaaaggtgtccccccggtgttgaggccaaagatctggttatctgtgtcaggagcagccaagaagcggtcaacggtgccagaaacatactatgatgagctaattcgtgctacggaggggaaaaccacaccagccacaaggcaaatcgatcatgatcttcctcgcactttcccttgtcatccttggttgaacagtgacaaaggtcaggcatctctgcggcgagtacttgtggggtactcattccgtgattcagaagttgggtactgccagggtctaaactatgtagctgcactcttgttgcttgtgatgaagacagaggaggatgcattttggatgcttgctgtactccttgagaatgtacttgtcagtgattgctatactgacactctttctggatgtcatgtcgagcagagggtgttcaaagatctcctggctaagaagtgtccaaggattgctgctcaccttgaagcaatggggtttgatgtttcacttgttgctacagaatggtttttgtgcctcttctcaaagagcctgccttcagagacaacacttcgggtatgggatatattattcaatgaaggagccaatgttttgttccgtgttgctctcgcaattttcaagatgcgagaagatgatctactgcgcatccaacatatcggtgatgtgattgatattttgcaaacaaccacacatcatctatatgaccctgatgaactcctgacattcgcgtttgacaagattggttcaatgccaacaaatacaatcacaaaggaaaggaaaaagcaggagactgttgtcctggctgagcttgatcaaagaacaagacggctgagttcactcaagatggatggatagtttgtaaaatacaagttcttgaaagctgtagtcttggcctattcggcacctggtcccacagcgtatgcttcactgagcgaaaaatcatgggtctaccgaatactgggagatggaaagctgcagtatgtgtttgttgaacacgagtttttggacttcatattgtgtgcttttgtgtgttcttcctttgtgtttgcaattcatatttacaagatacgggccatggtgctgatttctcttattatgtatatgtctatttcatatctatatttatatatcttataattttcgcggccgcgaattcggat

SEQ ID NO: 86694 - DNA, 366 bp, Zea mays
  Clone ID: MRT4577_179072C.1
tctttctttatctccctaatacaacacatcgggccgccgatatcaagatcacaggcggcaattactagtgtccttctctccaaggaggagatcgataacatgtttcaagacgctcataagtacaagtctgacgatgatgatcacaatataaatgtggaagccaataactctctggagaactacttctacaacatgcgcaacacgatcaacgactataatattgcttccaagcttcccaccgatgacaataataagatctatgactccatcgactcagccatcacctggctggactccaaccatctcttctaggctctactaattctagtgacattatgaatgagctttataacctttgcaacccca

SEQ ID NO: 86695 - DNA, 366 bp, Zea mays
  Clone ID: MRT4577_179073C.1
tggacattattgatgtaggattgctgctcacctggaagcaatggggtttgatgtttcacttgatgctacagaatggttttgtgcctcttctcaaagagcctgccttcagaggttacatagaagttccatcagtatcaatatttctgttatcccctgtatgattttctcataattatttgatgttttttgcacacttatgttcattgatgtgagcagacaacacttcgggtatgggatatattattcaatgaaggagccaatgttttgttccgtgttgctctcgcaattttcaagatgcgagaagatgatctactgcgcatccaacatatcggtgatgtgattgatattttgcaaacaaccacacat

SEQ ID NO: 86696 - DNA, 359 bp, Zea mays
  Clone ID: MRT4577_179074C.1
cagagttttgtgccatccccttcagactggtaccattgccaccagtttcttcacctcacgtagccaggaatttcgggagatttgctcgaccatgtggtgtttgttccatactcaactgatgctgaggacagccttgccgtcgacccgttcaaccgcgtcttcctcgagcaatttcgcgcaagcactgaggtcatggtgaatccctcctgctctctgcgcccttgattggaactctactattctagtgtctcaggatcgggctcgccgggccgtgcatctcgccggcgtcgtgttagtgcattagattgctggacagtggtagtgaagctgtgggttccctttgccttggccgtgaacac

SEQ ID NO: 86697 - DNA, 295 bp, Zea mays
  unsure (1)..(295): unsure at all n locations
  Clone ID: MRT4577_179075C.1
cagctacacgcgtacacacactcggcatgcgcgtctagataaggtgaaaaaatgttttcttcccaagtgagatgcattgttcttcagatgttgaaatgaaagcaaaacataccttctaacttaagacagaatttttaacaaaatgagcagtaaaagtcacatgaaccactccaaaaatcagtgcattttgcatatntgtaaacgaagacagcttgttgaatactgagaagaggagtcaaggagtaggtctgtactaacagagccaaattcctcaagctcttactgggactcagtc

SEQ ID NO: 86698 - DNA, 795 bp, Zea mays
  Clone ID: MRT4577_179076C.1
actcgctggtctcgctctccggcttccgtgatctcgcgccggagtacctgccgaccattgccacggtcgctgccaacttaaccagcatggacctgagctacgcccctgtcaaccccgaccaagtcctgctcttcatcgggcaatgccgcagccttgagacgctatgggtgctcgactcagtgcgcgacgaggggctccaagccgtggcgatgtgctgcaagaagctccaggttctccgcgtgctcccattggacgcgcacgaggacgcagatgagctggtgtcggaggtcgggctcaccgccatctccgagggctgccgtgaccttcggtccattctctacttctgccagaggatgaccaacgccgccgtcatctccatgtcgcacaactgccccgagatgaaggtgttccggctatgcataatggggaggcaccggcctgaccacgtgacgggggagccgatggacgaagggttcggcgccattgtccgcaactgcagcaagctcaccaggctctccacgtccgggcacctgacggatcgagcgttcgagtacattggcaagtacggcagctccttgcggacgctctccgtggcgttcgccggggacagtgatctggcgctgcagcacatcctccagggctgctccaagctggagaagctcgagataagggactgcccgttcggcgacgccggcctcctctccggcatgcaccatttctacaacatgcggttcgtctggatgtcgggctgcagcctgacgctgcaaggctgccaggaggtggcgcggcagctcc

SEQ ID NO: 86699 - DNA, 335 bp, Zea mays
  unsure (1)..(335): unsure at all n locations
  Clone ID: MRT4577_179077C.1
agcagattctttcttagtggatgatgttttagaaggttttttcttttcttttgtatcttcagattcactcccagaatcacttttgtcttcactttcagatttctctggtgttacatccccctacttgggaggatcaccattnncattctcctcctcattttattaatctccctcttcttcctttgactcatcttccgcgtcacttgtactctttctccgcactactgaagaatcttcatttttcttatgactcttcacagaacgcgttgaagttgtcgcaaatcttgatgaaccccattttacaacaccctcgggctttgttcccttactgggct

SEQ ID NO: 86700 - DNA, 365 bp, Zea mays
  Clone ID: MRT4577_179078C.1
cgtctttttttttttttttttttttgtaaatttttttaaaattcccctttatttattttttttttcttttttggttttttttttttattttcacagtttactgaattgaaggcaattttttttctattttttttttaaaaaaaaaactgcatgataaaaaaaaaacttttatctgacttatcaaaaattcacaagagggaacttattcccggataaaagaagaatcgaactgcaaggataccgaagactccccccccaacaaaatataattgggaaaacccggggattttgacccccccaaacttgaaaaattttactccccccaattttggaacaacccacaaaggcattttaccccgcgtggg

SEQ ID NO: 86701 - DNA, 232 bp, Zea mays
  Clone ID: MRT4577_179079C.1
attcggctcgaggtcaaatctagctctcaattttttgttgtagatctaacagatgatcataagaatatgctttccacacgcgtcgcgcccgcttacttgagcgcacacactacctgccgatgtatgcctaaggaatggttaataccctttgcacgaatctggtaggacacacatgagatgggacttgtacgatagcatgactagacagaacaggcgtcttacaccgttccct

SEQ ID NO: 86702 - DNA, 1189 bp, Zea mays
  Clone ID: MRT4577_17907C.1
tgaattcggcacgagggatccattcgcagagggcagcagccacctcctctccccgcggccgagctcgcgcctcgcccgccgcctgaactcgtcttgcctgcggccgatctcccccctccgttcgccgcgccgcaacccggagaggagaccgcgctcggtcgagcaccccctggggcagcgtcctcgcgaccagctccggcgcggcgtccgccctcagcagcccgggtgtccccgggaacgtctccggcgcggccggcacacagctcgacaggagctacatgatctcaggagaaagaattctgctctgcagatgcaacggtttgttggggaggaaaaaaacgacttgctggactatttgagatcactaacaccagagaaggttgctgaactatcagagtcttcatgtcccggcgtgcaagaagcaatccattctgtggttcatggtctgcttgctactctttcccccaagatacactcaaaggtccctccaccgctagataacacttctggaggggtcttaaaccttgggggcgaggatgatgactgtgcagaacttgtggagaatgcttccctcccatttcagcccctaatatctgttccccgtgattatcttgcacgcttgctcttctggtgcatgctgctgggtcactacatccggggtctggagtaccggttagagcttgctcagcttctgcgaatatccagcgacgtgggttctttctctggtggtgatgatcatgttgtttgagggtaccacgtttactgatattcctcaccgggaagaatggaaagatctggccaagcaatgcagaggtggccgttacactgcgttccctctctgaaatgatgccccaagcccccaatacaggtggcgctgctgagctatatattagttgtagttcctgtaaattcagaaaacagtcactcgggtcgggtgtaaagctagtgttacatatgcacgtgaagtactttcttttttttcttcctttgatgttgtgccgtataaaaaaaagtttggtggttagttggtgtttatctactggtagcatgataggcatccttgtattctagttgtatgtatctggtggttgtgattgatgcccaatgtccatttagcttgtgtggcttcttgattcgaataaagtttaacttattttttggaactcacgagcacaacctttcattggaa

SEQ ID NO: 86703 - DNA, 495 bp, Zea mays
  Clone ID: MRT4577_179080C.1
gcccttacattgtcggggggcgggggcagcttttaatattttttttttttttttttcaaattcccataatatccactcatttcatatagcaaaccaacccccaagcataatctcatctcacttaacttgaaacattaatacaaacatataggtaaaacattctctttgggggggggcaggtacttaagtgcctctcctattcctcatatcatcatcatatcatctaatgcagatcaaaattacctattttaacagccaatttacaaatacaaccaacccttactgtggcacgacccataaacacccaaatcaccataactcacctaaaatcatgctaaaagttcacccaccaccaccttgcaggaaatctccaccccctttctattgcactactctgagaactttttttgacttttgccacttaccaccaatcagacaaattatttgtacatattaacgtagcccttgccacgctccaagaacccccttgtaatg

SEQ ID NO: 86704 - DNA, 709 bp, Zea mays
  Clone ID: MRT4577_179081C.1
cattgggtacctcgaggccggccggggttgtttatcttgcgtccgaagtcctctctctctcgcggcgacgactgcatgagctccccgcccccgccgctctacgccaggcgcccagatcttctccggtcccttcgccgaatagcagccaacaggtggccggactgcggactgaatgcatgacgtagcacttgcactgcgatcttcgctactgcataaggacaggtgcgactgccctttattacttcaagataggggtctgtcagcatgaccatccgctgctctcgcctgcaaacaggccagctatatcaccaactcttgtgcttgctaatcgtgcatcaacgccctgatcatcgatgacccctggagctgatgctcacaggccaacctgttgaccctgagaacatgcgaagagcatgtttgagggacattctagtgacgacatactatgatgacgctcgtggaagcatagtgacattgataatgtgaaagtctgtggtaaccttgctgaccacatgcaggagaatgtcgaggtccagactcagagatgagaacgaacactgcgcattacaccatgctcttcaatggcgcctgcactctggccgacccatccatcatgcatattctcactgtgaccgacttcctaagataagcctgtactacgcatgcacagatcatgtgcggccgtggtggctactgtaatttcatgcat

SEQ ID NO: 86705 - DNA, 911 bp, Zea mays
  Clone ID: MRT4577_179082C.1
cttaacattactttggttgatttgcctggaattactaaggtgccagttggtgaccagccaactgatattgaagctagaatacggactatgataatgtcatacatcaagcacaagacatgtatcatcttagctgtatcgccagcaaatgcagatttagcaaactctgacgctctcgcatgggctcgggttgctgatcctgatggttctcgaacaattggtgttatcacaaagttggacataatggacaggggcactgatgcccggaactttctgctgggaaatgtgatccccttaaagcttggctatgttggtgtcgtcaaccgcagccagcaggatatcaactctgacctcagtatcaaggatgctctggctcgtgaagaaaaattcttccgtactcagccagcatatcatggtattgctcagtactgtgggataccacaattagcaaagaagctaaaccagatcctggtccaacatataaaaacagttttgccggggcttaagtcacgcataagcagtcagttgactgctgttgctaaggagcttgctgtgtatggtgatcctgttgattcaaaggctggccaaggtgctaagcttttgaacatactagctaaatactgtgaagctttctcctcaatggtggaaggaaaaaatgaagatatatcgacaattgaactctctggtggagcaaggatccattacattttccagtctatctttgtcaaaagtttagaggaggttgatccttgtgaggatgttacagatgaagatatccgcatggctattcaaaatgcaactggtcctagaagtgctctgtttgtacctgaagttcatttgaagtccttgtacgtaggcagatcagcagattgcttgatccagtcttcagtgtgcacaattcatatatgatgaac

SEQ ID NO: 86706 - DNA, 290 bp, Zea mays
  Clone ID: MRT4577_179083C.1
cagctctacacccggtgctccgcctccatgccgcagatcgatcacgtccccactccccaaggctttggtttacaccggcaactattcgcccttccctactaaatctgcgatcatttcttctcgattgtgaccatggcgactcaggtatccctcgtcatgtggagggcggtcttctcagcgctaggcttgctcgtggtggccacgctggtgtacacattggccactgacggctcgctgatccatcctgagctggttacgccaaatggagcagcaacatttggacgatccac

SEQ ID NO: 86707 - DNA, 373 bp, Zea mays
  Clone ID: MRT4577_179084C.1
ccccgatcgttttgtgtggaaaggcataaaaggataaaacttttatactaatgggggggacaagaattattttcttttaaaatttagggaggggaaaattttaggaataggggaccaatttttaattaagggcacgattggtgaagacaacctaaaaacatcttaaaaacaaaaggatttggcgcgaaaggggccattggaaaaaagactactaatttgttcatcggaggaatgggagcagaaacccccttggtcgctagcgctcgtaagagaggagaacgagcaggccctttggccccaccaggatcttgttggggaaattgacgaggcccaaccaaacaacgggggtgacatttacgccccccaggggggg

SEQ ID NO: 86708 - DNA, 478 bp, Zea mays
  Clone ID: MRT4577_179085C.1
cacccgcgacgccccccaagccgacgacacccacatacactcccgtccctacgccccacgaacccacaccaaaacccactcccactcctccgacgtacaccgcgacccccaaggctgcgacacctaagcggaccgcgccgacgcacactcctggccccaaacctcctacggccagagtcgtactctccacgcgacagtacaccccttccccacaagcctccgacacctaagccgaccgctgcatacatagactccaatgcctaagccagccggctaacaaggctgcgatgcccaaggctaacgcaccaacacataccctgtctctgaagcctctaatgccaaaagctacccagcacgacctacaccccttgtcgccaaggctcatgacttccagagtcgaacctgccgaaggacactcgaaggcacatggctccctggagcgcgtgacccgagacagaccaacaggcgacgtagcacc

SEQ ID NO: 86709 - DNA, 504 bp, Zea mays
  Clone ID: MRT4577_179086C.1
gcaggctgctgctgctattgctacttctactgaacctgaaagctgggagtgatatggggagataaaaggaagcgaggtacacatacacaggtgcccgtccgtccgttgaaggtgccatttttcctgtccaatccagccgccatatgtgcagtgggggatagctcttctcggtcctccgccggaagatcaagtgtatctctctccctccctctcctttcgcttgatgtgtgtgtgtgttttctgctgccaagtcgtcacaaagctagctagtaataagcaggcctcctttttatactttagatttcgcttggctctatatacctagctacctcactgcagtttggccgttgcagtacacatgaatctgcaagggcatataagtcgatgttgctgtgtgtctgtaagctggtattgtgcaaattaatatgtattttggcggtggatcggctataagaaggatgtgcgcgcagcgcatcgttcccccttaattaagcacccttccct

SEQ ID NO: 86710 - DNA, 253 bp, Zea mays
  Clone ID: MRT4577_179087C.1
cggtaatatcaatttctttttgggtctttttatttttacctattcaaatttttttttttttttatcttttacatcccccccaaaaaaaaagggccttccactattcattataaaaaaaaggaacctttgcgtcagaacacaccattaacccctcatcattcgaacaagttcaagaaaactagatagtcttattatattgggtaacgctaccttgccatccaaactccacaacctaaacgccagcatcgccccc

SEQ ID NO: 86711 - DNA, 154 bp, Zea mays
  Clone ID: MRT4577_179088C.1
aagaacaacattggggatggcatgttttataagctgcctatacactaaaccaaaatcgagaacctgggcaatctgctgtacaagaactactgcaccacgatagctggactcagggccatatgctacagcttaaattactatgagtaccactcct

SEQ ID NO: 86712 - DNA, 1298 bp, Zea mays
  unsure (1)..(1298): unsure at all n locations
  Clone ID: MRT4577_179089C.1
aaaaaggatcctgattgggcttcagcttcagatgattctgatggcggctgctcggcagagactgcagatgggcctttgtgcaagcaggaacatgaggactatcctgagaggcctgaatgccctttccttcttagatttggtaattgtaagtttgcatcatcatgccaatattaccacccaaaagacaaattttcaagtacctaccatccagaagacaaattccaaagtcgataccatcaaaaagaaaaatcaagtcgacaccatccaaaaaaagagccagcactgtcaggagaactgatggtttatcctgacagacctagtgaacctgactgccccttctatgtgaaaactgggtcctgtaaatttggggcaaactgtaagtttcatcacccgaaggatataactccaaacatgcagggtccagcaagtccaaaaaggtcggtcgctgcaaaagagcaccacgcagcagctagagcgacattacaagaccagatgtaccagcaacaaaaattccctgagcggcctggccaaccagattgccggtactacatgcaatttgggaaatgtaaatttcaatcagcttgtatattcaatcattcaaaagacatactttcaagtgggtggcatccagcagaatgcccattctacatgaaaactaggacatgccaatttggatcagcttgtgagttttatcacccaaaagatcggtgctcaggcagagggggagtgattgatggtactgactatggacatgattttgccacgaagtcacggaatgttctgcaggaactggcaatatatcctgaaaggcctgatgaacttgagtgttctcactacatgaagcatggctactgtaaatataagatgaactgcaaatttcatcatccaagagatcgtcttccaaagaaataggaccatttgctacaaccactgttgtaactggctgtcgttgatgagtggagcaagtactgatgatgggacagaaatgcaggaaggaagccatagtcttccttttttgaagagctcgattctactcatgtctatgtcgaatttctgccctagtgtcgttagagttctcgtaccagatgcgaactgcctggtggcttcccaactcccgttcattcatatactaccaaacattgctgtgatctagatctagcccgatgcggtgctaacctgagattgtgggttactgtagctcagtatgcagctcaggtacctgcacttgctcaagattgcgataatgatcagattaaaatagcaggccacgcatattctgcaacttgcgacnnnnncat

SEQ ID NO: 86713 - DNA, 720 bp, Zea mays
  Clone ID: MRT4577_17908C.1
cccctcacgaacccctctctcccacttaccaaactccggctcccaacgcccaaagccttcgcatccagagctccaaaccctaggcgaggcgaggcgaggagggagaggccatggatcccgattcggtctcgaaggcgttcgtgcagcactactaccacacgttcgactccaaccgcgccgcgctggtggggctgtaccaggacggctccatgctcaccttcgagggcgagaagttcggcggccccgccgccatcgccggcaagctcggatctctccccttccagcagtgccagcacaagatcgacaccgtcgactgccagccctcggggccccagggcggcgtcctcgtcttcgtctccggcaccatcaccaccggccccggcgagcaccccctcaagttctcacagatgttccatttgctgccagctggagggagcttctacgtgcagaacgacatgttccgcctgaactatggttaaggaagggcgaccgctctggcggcaaagaacttgttcagggatttatgttgaaacaatgaacatcaaatgatgatgctgcagactctttgtttgttcgccagcttgtgcaatttatcgcaaaaaattgccagacttgataggcatccaccagatcttcttttgttttgtgtttcccatgtattgtcgttgcttgggtggcactttctttggaatgttgatggaaaccgtccaggtattagtt

SEQ ID NO: 86714 - DNA, 790 bp, Zea mays
  Clone ID: MRT4577_179090C.1
gccggccgggcctgggatcctaccccctccctccctccctccccgcccacctacccacggacccacccatctcgctcgcgcgcgcgccgatatatcttgcctgctcgctccgcggctctcatgcgcgccggccggtcgatccgggcgccggggcccgatgtacgccgcggcgggggctcagccggatcggatttgctgatcgatcagttagttcggttgtcaggttcgttggttggttgatcgatcgtccactcctcctccttcgcaccggccggtcgatccgggcgccggggcctgacgtacgtcgcggcgggggctctgcctaatcggatttgctgatcggtcagttagttcggttgtcaggtttgttggttggttgatcgatcggccactcctgcgcgccggccggtccatccgggcgccggggcccgaggtacgccgcggcgggggctctgctggatcggattcgctgatcggtcggttcatagtccgcaatagatggaacaagctccagcgctcaaccaaactaggtagccaccacaagtccagaggaggcgggcatctatggagctcgctgcggcggcagtgaagtgcgtcctctccaagctcgcttcccttctgaaggatgagtacaatcttcagaagggtgtgagaggggagatccggttcctcacggaggagatgaagaggatgcaggctgccctcgacgacttgtccaagcagccagaagattctgttagccatcttcagaaggagtgggcaagggatttgaaggagctgtcgtacgaca

SEQ ID NO: 86715 - DNA, 666 bp, Zea mays
  Clone ID: MRT4577_179091C.1
ttctcatgaaactaggacatgccaatttggatcagcttgtgagttttatcacccaaaagatcggtgctcaggcagagggggagtgattgatggtactgactatggacatgattttgccacgaagtcacggaagccgggccgggaactggcaatatatcctgaaaggcctgatgaacttgagtgttctcactacatgaagcatggctactgtaaatataagatgaactgcaaatttcatcatccaagagatcgtcttccaaagaaataggaccatttgctacaaccactgttgtaactggctgtcgttgatgagtggaccaagtactgatgatgggatgatgatgggacagaaatgcaggaaggaagccatagtcttcctttttgaagagatcgattctactcatgtctagtgtcgttagagttctcgtaccagatgcgaactgcctggtggcttcccaactaccgttcattcatatactaccaaacattgctgtgatctaggccgatgcggcgctaacctgagattgtgggttactgtagctcagtatgcagctcaggtacctgcacttgctcaagattgcgataacgatcagattaaaatagcagaccacgcatattctgcaacttgcgacttttaaaaaaaaaaaaaaaaaaggcccctaagcc

SEQ ID NO: 86716 - DNA, 585 bp, Zea mays
  Clone ID: MRT4577_179092C.1
ccggccggggcaactaattcccgtggacgccgggtcgttgagctacctccgtcgttctcgcgaccgggtcggtcgtttcatctcgcttctcaatgcatagaagtcgtgcgccatcaagctgaggaagaatcagaaatcatcaaagcaagagtgggagggaagcgggtgaaatcgagccgagggatgccgccgtcattgttcgtgacgtgcgtcctcgttttgggtccaataggtagtgcaagagcttcaccacgttccctggtgttagcgtgtgggatttccaggcacgatcgggggtcatcatccctcagattgctcgccggtgctcacactccgccgcggatccgcccctcatcgtggctggagctttcccctacaaggccatcggtcaagaacaggtaccgcaggatgaggcgcatggaagatgttgtgacgagctcgtgagaggtctaggctgtcgtctcccagtcaactttgggttgctggatcgttgtatccttatgatgtaattatttatttattttgtacagaactcctattatatagtaaagatgtgggaaaaaaaaaaaaaaaaaatttgcggcc

SEQ ID NO: 86717 - DNA, 390 bp, Zea mays
  Clone ID: MRT4577_179093C.1
tcggctttggccgctcatggggttcattatctgtaccggccgtgccctacccttcatgatcttggctacatgatccttacgcagcttgatatagaatggggttacatcagtgagaccttgcttacattcggattcatgatctccgactcgtgcacactacatcctttcattcttataactacacgctaatacactgtactgatctggcgcatacaacttcgctacttatgagcccctgactttacttcaactaatatcactttatgcacatcacgctttcgcacctactcatcattgtaacgagggctcgcctatggctctattacaacaatgcgcaaacgcaattgaggacgttacgctcactgtagcagcaccttaaattcatcgatt

SEQ ID NO: 86718 - DNA, 400 bp, Zea mays
  Clone ID: MRT4577_179094C.1
gggtgggggttttttcttaacacagaagttcttcttcttacattgccccgtctgaccttttgactgtgtttgccgctgctgactacgcggggtacagttttttctgttcactctggcgcctttgctgtttggcttgtgtgatcgcggggggggggggctgcccctagcccgggcccgcgcgcggtctcgcaaaaaaagaaagctatccgtcatagctcgacaaatgttgacttccagcttcacgatttggggcgttactgattctttctatgccctggcctttggctctttttttgtggtcgccgcggggccttgtgtttccggtccattgttggatgaagcatcggtccttaggctggcggagctccgtcactctgtgtcgtttggtgcctcctccttc

SEQ ID NO: 86719 - DNA, 684 bp, Zea mays
  Clone ID: MRT4577_179095C.1
agtcacccaccgcatccaaggacctcccgaaggttcaaaggccgccgccgcccgtcagcccaccatggccctgtgagtgccttcctcctctccgctgctgccgccggcaggcgccccgtgtgcttctccgctctctattactccgcacgcgcttttgactcggttcacttcgtcaccggcccgtgtggcgacgccacctgacagggcgatcgacattgcgaacgctagctatagtaagggcagacatgcggccatcatgggctagcctgagagtaagagagtgatacccctcacgccttacggcaatggacgtacaactgcgaatgtccgaatgactgtacttaccccgggaagtcatggcttgcaccaccacgagagtggtgatactaccaacgtatgcctatcaactggaccgcattttaatccatgcaatctgacactcgatgcaacagaagaggaagtccgtcgtgcgatatgagcactgaaatattgttgcacatgctgaaggtataggcgaggaaaccagtgatgttatgcagattcgtttgactggatcatattcagaaggtgagaacctgctgggagacatgaaatggaagatgaggtgtggatatgggatcatgatatcagcctctctactggaaatgctagtgcaaactgcaatgcgctgtagttgtgctgact

SEQ ID NO: 86720 - DNA, 597 bp, Zea mays
  Clone ID: MRT4577_179096C.1
aggaaagccatacagttttcccctcaacaacattttgagatactgacttgtttttttcttatgatctactagccagttcaagacccacaaaagatgactgaaattattgtcaaagcgctggaaattactggacaagagaggtatcattaacaaaggctggggtggccttggaaccttggcagaaccaaaagattttgtatatctactagacaactgccctcatgactggctttttctgcaatgcaaagcagtggtgcatcatggtggcgctggaacaacagccgcaggtctcaaagcagcggtaagtgctctctccatgccttatttcaatgtaaaatagttgtactcttctcaaaggcactggagagttgcaagaggaaagggagtctaagaagacatacaaaccacagtcccaataaggtggatgttgacttggatgaagacctaccaaaaaacagctaggtatgagcctacgaccagcaatgaaaacaagaatcattggggcctttggcccctgccatacaccaacgtcgttgcttcatctcttaatgtcctgcatgatgatgctgaaattaagtgtcctacgacctattgtac

SEQ ID NO: 86721 - DNA, 362 bp, Zea mays
  Clone ID: MRT4577_179097C.1
ctctcggcgaggaggaaacggtccagattatacggctgttccaggagctcgcggagaggctctggcgcgcgctggccgacacccggcggcggtcttaccgtccgttcgtcggcgcggccgaggcggctgctgttcggggataagggagaaggagtcggaggcctgggaggccgtgcggtgccgcgccgacctggaggatcgggtcccgcggctgatggcggaggcggtggcttggcaggcaaaggaagctcgcggaccatttcacggccgtggggctttcacgcgcagttgtcatcagcgaggggtaagggcaccgacgccgaggaagggggcaactcggtggacgacgccgggtcgtgctt

SEQ ID NO: 86722 - DNA, 741 bp, Zea mays
  unsure (1)..(741): unsure at all n locations
  Clone ID: MRT4577_179098C.1
gacgcctgcggttccggtccggaattcccgggtcgacccacgcgtccggcggcggcggcggcggggcggcgcagggcgcggggcggcatggccaccaccgcgcagtatctgccgcggggccccggcggcggagctgggggcacagggccgctcatgcatcccgatgccgccgcggcggcggcagcggcggcggcggccgagcggctgcacgcgggggccgcgtaccgcgaagtgcagaagctgatgcaccacgagtggctgggcgcgggcgcgggccaccccgtgggcctagcgcaccctcaatggctacccacgggaggaggcggcggcggcgactgggcgggcggcccgcacctggaacacggcaaggcaggcggtggcggtaccggccgagctgacgacggcggcggtggcggcggtttccacgcccgcctggtgcaccaaggggcggcccacgcgggcgcggcatgggcacaaggcggcacagcgcaccacttgggccccgccatgtcgccgtcgcccggggccggcgggggtcaccagccccagccgctcgggctgtacgctcaggcggcctaccccggtggcggcggcggcggcctggccgggatgctggcggcgggaggcggcggcgcgggacccggcctgcaccacgcactgcacgaggacggncacgaggcacagctggagccgtcgccaccaccgcacctgggcgcacacggacacgcacacggacatgca

SEQ ID NO: 86723 - DNA, 127 bp, Zea mays
  Clone ID: MRT4577_179099C.1
ggtttatattctcacctccgtccactctcttcccggggctaattttaaaacaccgtgcggggcaaaataatccaaagtcagacaatcgaataacgagaaaccttatattctttaccaaacagtcatg

SEQ ID NO: 86724 - DNA, 185 bp, Zea mays
  Clone ID: MRT4577_17909C.1
ttgggaaaaaggagaaaccgtcccccaattaaatagtaaacggctaaccaagggagtgtaacactttttttccccccagctgaattacctacattgttggagcaagacttaaaaatcgtcccataagagcctgaaaagagagggtcacagttcccccccaatagcaggccctgggctagcaaatt

SEQ ID NO: 86725 - DNA, 545 bp, Zea mays
  unsure (1)..(545): unsure at all n locations
  Clone ID: MRT4577_1790C.1
ggggcccggggggggagagaaggaacgncaagggggggacaaaagggcnacagcgagnacacggagcggaagcnnagaacggagaacagcacgagcaggcagaagaagcagcagacgccgcgaggcgcgncgcnggccccgccgaccngcgcgnaggggggggggaggggaatttttttttttnngcagcgagcacgccgcggccggccccgcgggggggggcaccgcgacccccccccccggacgccncgnccacggccancagcgccgggaggacggccgnggccgccgaaacgaagcgcggggcgcngcgcngcagcagccacaggagccccaggagcncgcagccccggncacncncgcccgaccggacggcggccggcnncnccnggcccgcggccnccgcggcggcgccaccgccgggacnagnggccnncaacagggccagagcaagaaggcannnggagcagccggggacgcccggcngcgcgcagccccccnccagcccccccgccgccgcgnncgcagccgccgcccacagcccg

SEQ ID NO: 86726 - DNA, 608 bp, Zea mays
  Clone ID: MRT4577_179100C.1
gtctcgtgttgttcggagcgggcagcagcacacagccccatcccaatcctagtcgatcttcttcccctcctcaaggtatggcgattctctccccctctcatcttttctgttggtgtcactccccctcccttctagattggcgagtttctgtgagtagatgcttctcgtctaggtgaggggatctctgtcttgatttatttggctgctcggtacggataaatctggtcctgcttttcttaattcttggcgcagatcttgtgatctggttctatggtcatagataggtttgtgcgcatgatttgttcgattgacttcgtcctaggtcgtgtttgagtctagattagggtagaatagttgtcttatattagatctgtacctgtatgtcaccaaacatgctcatagttacgttgagttgatggatgaagatatatgattcgatagtcaatggcatgtgctgctgttactcgtttactaggctgtagcttttacacgacgagcgttattatcgtggtggtttgttttgacatgcatgcccgattcatttactgctactgattgttatttggagcatctccaaagtgcctaaaaattaaaatactacatcattt

SEQ ID NO: 86727 - DNA, 848 bp, Zea mays
  Clone ID: MRT4577_179101C.1
ttttcgcccttaagcagtggtaacaacgcagagtacttttttttttttttttttttttttttttggttctgcaaggtttccacaaacatcatatttgttgtgcattctacttgtaatgtcattttaaaaaaaaatcattcctcagttttactgagcttttaagcaatgaaggtttcattatgaattctttcatgttgcatcaacaactcttaggtattttcatgatcattaatagtactctggagacagcacgccataatggtaacgaaaatttttccgatgaaatttgctgtgtaattgcagttcatgacatctgatcaccagtatatttcccggaaacatgaggaggataaggtgattgtgttcgaaaagggagatttggtatttgtgttcaacttccactgcaacaacagctattttgactaccgtattggttgtcgaaagcctggggtgtataaggtatgcatctatcttgcattccctatgctcaaagtgcatttcttttcttgataaatgagttagatatacgtactatcatgctgcaatttatcaagtgtcattattgatctctttctacggtgaagctaggagcagctaagctgttggtgtcagcaattcatgttgtagttaatttaatttgcttgaaaacgtaggacgctagatttggatttttccaatttttaggctgcacgagcaggtaaaactgtaaaaggtagcaaaatactagggcgccatgtttacatgtattaaaaaaacaaaaaaaagaactaggagttcctgtgacggatagccgcatgctcgttctcttggcgtctctgatattggagcacatccgttgttcgaaaact

SEQ ID NO: 86728 - DNA, 310 bp, Zea mays
  Clone ID: MRT4577_179102C.1
acacccgcaccaccgggccagaattgccgggacgtcccacacccacgcgcacgccctcttatatatttatcggcgcacccctgtagcgaccctgccggtgagcgcttacccggccgcctcactcccttctggaagcagggcactcccacatagatgacgctggcggatctaacccacgggtgggcccgtcgccccaagctgggctgggagcaacacccccccgatgagcccgaccagagccccctacccgggaacaatcaggctgaggccgacgccgtgagacacgagatgccgaccgcggcagcaacca

SEQ ID NO: 86729 - DNA, 1431 bp, Zea mays
  Clone ID: MRT4577_179103C.1
gtcccacgcgtccgtgcttttgactaaccgaacggaacgcttcggcaggcacggccggtccatgtagcgcgcgcccggacacggagcaggggtcacgcgcaacggcagcccggcttgtcgggagcgcgaggggcgacatgggggcggaggccggcgagcccagctccatcctcagcttagcttccgccttttcctatggagtcgcatctatggcaatggttttcgtgaacaaagcggttcttatgcagtatgttcactccatgaccctcctcactttacagcaaatagcaacagcacttctgatacattttggtcaagttctaggaatgtctaaacgaaaagactttagctggataaccgcgaagaaacttcttccagtgtcaattttctacaatgcaaatgtgggatttgctctagcaagcttgaaaggggttaacatcccaatgtatattgcaatcaaaaggatcactccccttgctgtgttggtggctgggtgcatgcggggaaaggggaagccaccgacacaggtcattctttcagttatctgcaccgccactggtgtcctcattgcagcacttggagatttttcctttgacctatatggatactgcatggctctaacatcagtcttcttccagactatgtatttgattctggtggagaaatcaggcgctgaggatggtctttcctcagtggacttgatgttttacaacagcatattgtcacttccatttctgtttttcctcattatagcaacaggagaattcccccattctcttacagtattatctgcaaaggcagcctctctgacgttcggtgtcattctcgttatctcactggtgatgggaatcgttctcaatttcactatgttttggtgcacaattgtgaactctgctctgactacaacaatagtaggagttctcaagggtgtcggatcaacgaccctcggtttcgttctgttgggaggtgtcgaagtacatgctctgaatgttactggactggtgatcaacacatttggcggcgtatggtactcttatgcgaagtataagcagaaaaggaaaacaccacggaagatccaacatgatgtagagtcgcatgcccacaagtagcgtcagattaactgtagttatacttcgttctttgatcagataataactggatgcatgtttaaatccattttttttctgaactctattccatcaccagcagttaggttggtgcaattaagggaagcaacaagcttttcctatttcacatcttatagtttttacgatcagtgatatagggtgtaaagtcagttatttttcgcagctccagtgtgcgatgcatcacttttgctccaaagagagaaatccatgggtctggatgaggtgattgccggttcaaaaaagcggttttaaacatatgctcctagttcagctgttcagtttt

SEQ ID NO: 86730 - DNA, 1064 bp, Zea mays
  unsure (1)..(1064): unsure at all n locations
  Clone ID: MRT4577_179104C.1
ctttcagttatctgcaccgccactggtgtccggattgcggcacttgtagatgtttcctttgacctatatggatactgcatggctctaacatcagtcttcttccaggttgtgttatttccttgtgctttgttcttacaaatttattctataacttttgagaggtttttaggcaaggttctttatctttgtaattgacaactgaatgtgtatgcactatgcagactatgtatttgattctggtggagaaatcaggcgctgaggatggtctttcctcagtggacttgatgttttacaacagcatattgtcacttccatttctgtttttcctcattatagcaacaggagaattcccccattctcttacagtattatctgcaaaggtcagtgatacaaatgcagtataatcaaaaatttaccagcacatttaagctagcaatctctgcgtgttcccttgtatcacccctttaactcaagaatgacaattaaaggtagttctccagagtttctgaagcaaatggtttcacacttcgctgctattcattaacacaatagtactcttaaaggtcgtgtcattgtctgttgtatgtctctatcctaacttgcattggctggtgacacttgaactgcaggcagcctctctgacgttcggtgtcattctcgttatctcactggggatgggaatcgttctcaatttcactatgttttggtgcacaattgtgaactctgctctgactacaacaatagtaggagttctcaagggggtgggatcaacggtaaatttgccgacttatgaaagatcagtttgtcctttaatcagaaccctttgatacaattgagctctgaagttaactaataagtaaatcatatatcatgtttttcgccatcagaccctcggtttcgttctgttnggaggtgtcgaagacatgctctgaatgtactggactggtgatcaaccatttggcggcgtatggtactcttatgcgaagtataagcagaaaaggaaacaccacggaagaatccacatgatgtagagtcgcatgccccacagtagcgtcagattaact

SEQ ID NO: 86731 - DNA, 857 bp, Zea mays
  Clone ID: MRT4577_179105C.1
cggccgggccgggaatccatccgctataccctctagtaaaatttatggtgcgtttgtcgtccgctatctgtagcgtgctagttttgctcgctatccgctgttcactcccgcgctgccttcgttcgttgtctcccgcgccggctcggaaccctctcgtcgtcgcgctcactgtgtagcacatcctctccggtgtacggctccaacgacaagggctcaagatgatgtgtgcggagtcggatggagtggcttcgcatgctggacgttggcggcgttgtgcttgaagttgaagacgttgtggtcaaccacgtcgtcgcttccagaccgaatctggttttgggcacgcagaatgacttcatacaatttgtcttatcaaccatgttatgtatgaactataggcactgatggttctgacttcaatatgtgcatacatgatggttgaaagggaattaggcttacacctttttcctaattgattttggtggttgaattgtccaacacaaataattggactaactagtttgctctagtctataagttttacagatgccaaaggttcacaacaagccaataaaaagaccaaagatgggttcaaataaagagagctaaagacatcccaaagacaccctggtctggcgcaccggactgtccggtgcaccagggcactcgacgctgaacttgctaccttcgggaaaatgggaggtcgctccgctataattcaccggactgtccggtgaagcaccggacagtgtccggtgtgccagcgaagcaacactacttcgtacgcaacggtcgactgcaacgcatttaatgcgcgcctgcccgcgcagaggacagagcacgccacaaggcgcaccaaa

SEQ ID NO: 86732 - DNA, 240 bp, Zea mays
  Clone ID: MRT4577_179106C.1
cgcggacgggagcatacgctccttgacttgctggctggcccataataatatatctatctatggccatcgagacaagtataggctgacagaggtagaaaaagcatggggcaagcctcacggctcgacctcctcgccgacgaggtgcatgatgtccgccggccgcgtccagcaagcgctggataagggtaggggaggcaggggacacggcggcgccgtcaacccgcaggacgccaggatctg

SEQ ID NO: 86733 - DNA, 322 bp, Zea mays
  unsure (1)..(322): unsure at all n locations
  Clone ID: MRT4577_179107C.1
ccgggncgacccagcgnccgcggacgcgtgggggcaggcacaccggtggtgggggcgagagaacaagcaagngcnnncngnacgcggcagcaanggcaggcaaggccccggncgcgcagnnccncgccgngaaccnggnggngnncgccanggccagcgccngcggnggcaacngccccacgccgaccccgnccacgggggggacgccnaccccgacgccggccccgaacggcaagngcccccgcgacgcgcncaagcngggcgngngcgccaacgngcngggacngancaaggccaaggggggcgngccgcccacggagcc

SEQ ID NO: 86734 - DNA, 200 bp, Zea mays
  Clone ID: MRT4577_179108C.1
tgcgaactgacggcgacggggaggacgggaaacagcagccgcacctggtactggcgaacaagctgtaccgcctggcacactccgacgtcgacgacctcgacaaggtcgacctacgcgctagcgtgttcgacggcatacaatccggtgacatggcagctctgtacgagtcgttggcggcggacggggaactgaaaaggaag

SEQ ID NO: 86735 - DNA, 333 bp, Zea mays
  Clone ID: MRT4577_179109C.1
ctccttctacttgcaaaatccgcatagcgcttgtttctgtccccgctcgcgcgcttactgggggacgcgctccggcggcaccagcgatggggaccacccgttgtcgccgatctctctaagctccgacgcgtgcctccatccctcgtcgctgaggtcctcactgcgcgcccttcaccgccggcgccgctcgcgctcccattcttactctgggccggccgccagaagggcttacgtcactgcttaccagctttacatgccctcgcctcgctactgtccgcggtaggccttccagtcaaggctgaccaggtccccgacctcatgcggacgcaacgg

SEQ ID NO: 86736 - DNA, 282 bp, Zea mays
  Clone ID: MRT4577_17910C.1
cccacgcgtccgcggacgcgtgggttctctcttaagactatatggcggagacgaacatcatccgtgtgatgcgcctacaaccccctcatcacagtacctctctatcaagaacaataacgcgcacctcaaggggtacaacgcgcaactgcgcatgaccttacacgagtctaacgataacactaaaaacacatctctcttcgacaccaactccgtgtctctcagacctgatgtcaccagacaccacactaaatgtagctttgccgatcctatcaggacatgccc

SEQ ID NO: 86737 - DNA, 210 bp, Zea mays
  unsure (1)..(210): unsure at all n locations
  Clone ID: MRT4577_179110C.1
gcgggtncgcggggcntctcgtgcctcctctgatcagccagtcgctctggccttcctttctcccttctctcagcgnccnccttttcttcccttccgcccgctgtctacgctgggccctgccttgctgcgtcccctcgttggtggtgccctcttttggggggcgtgtgggatgttctcaaccttggtgccctcgtgccggcgtggggttcc

SEQ ID NO: 86738 - DNA, 351 bp, Zea mays
  Clone ID: MRT4577_179111C.1
cccaagttcaaattcagacagtgagcttctctatttaggctctattttgattttgctcacattcactgatcatagatacaagttgtaacgtgtgtggttgaacttatgttgttgaacttgatctgtttccttttctgctatttggtttgtgaactcaagtactcaacttatgtatgaacttattctatatttgaagttctatgccaagtttgaaaagacgtttcaacgtttaaatgttaaaaaggtggttcataacgttttaacgttttaccgcttcaataaccatgttacccagtgtggtatggtgtatggagtccagaagtcttattagctaattcctcctaagcatgt

SEQ ID NO: 86739 - DNA, 491 bp, Zea mays
  Clone ID: MRT4577_179112C.1
agcgtggtcgcggccgaggtacatggacaaatgtttgcactgatggtactacaccagtttcagtgcttctcatagactatgctataacatttatccctcccctggtgacccatatcaatatataatgtatgttacttatagattaaatctataagaagaggttcatgtggctaacaaagcaacttgcactagggtgtaacaatgtactggttgtaaaggcagcaatgtctctactctgcggagagaactacagaataacacatgaattattcgaaaaactaccaaagtgcccaattcacaggaacttaatatttgaacagaaatgatatagaataaacccaatgggcaggactgacgtgtctgaacgcaaatatcacacatctgaagcagcaagactagtgtcattcgaggtcggtgatcactattgaggagaagaacctgtatgacttgattcctgtgaaacagtgatactctctcacatattctcacac

SEQ ID NO: 86740 - DNA, 412 bp, Zea mays
  Clone ID: MRT4577_179113C.1
ccccgcttgcaattcaattatgaataacaagaggattccttctttatggatttttcttgggatccctgaccaccaaaggagcccaggggtgctgtttccaactacttatgtgtggaaccaatcatcgcatacattaccacatcttgatggtgaggcagttccccaccccatggccgcacagtcagcaagttggtgaatgtagtgtacctccacgaattgacatggaattgacatgtgttatatttggcgatctgtatatgtaacaataattgcctggcatgtcgtcttcccgcgtcccacattttgggagctgttgtaacctgtaaacctgaatgttaggatatttaccagccgctgtagatcgattgctggttactgatcacattgatcatctatacatcaaaacggcagt

SEQ ID NO: 86741 - DNA, 434 bp, Zea mays
  Clone ID: MRT4577_179114C.1
aacccggggaaacgctggttatagaataaaatgggcctaaaaaagcctcccgaacaaattttttgggaaaaaaaaaatagccagcagggggggggggacaaccgagtttctttcggcaggcaaagggcaaaaaaaagaccctcgctgttctgaaacggcctgggtttcccccaacccccccacgtttattgggggggttcgtaaaactcagggccatgacccaggagggaggggggtgaaagcccttcgcccttggggcaggcaaaaaaaacttttagcacaagctaacgggtgaaccccattccctggaaccggtgaaaagccccccgttccttgggggaaactgaccacgttgggggcaaacaagctcccagtggaccaattatgttccctccaggaccaccctcaggagattctttccccaaccggaaaaa

SEQ ID NO: 86742 - DNA, 454 bp, Zea mays
  Clone ID: MRT4577_179115C.1
cccacgcgtgcgtggacgcttgggtgagatgtgggttggcttctgctcctgcaccggttcgggttcaggttctagatcgaggacgagacggaagagatggctgagtccgacgtctagtaccgctgcttcgttggcggcatcgactgggccaccgtcgaccactccttcaacaactccttcaacacctacggctaggtcatcatgtcgaatatcatgatgcatcggtagactcataggtgctgcggcttctgcttcatgacctactccacgcacgacgcgatgcacagcgtcatcgagggcatgaacggcaaggagctcatcagccgtaacatcaccgataacgaggcccagtcccgaggcggtcgtggaggctgcggtggcggataccgtgacggacgccgttacggaggcggctacggaggtctcggtggaggctacggcggttgtcgtggaa

SEQ ID NO: 86743 - DNA, 136 bp, Zea mays
  Clone ID: MRT4577_179116C.1
cctgttttttccgggccgggaatcccgggcccactaggtaccttctatctggtctgcaggtacgctagctaactaactaccgctgtggtaggcacagtacgtagtaggatgtcgaaaaaagatgccattatgttag

SEQ ID NO: 86744 - DNA, 541 bp, Zea mays
  Clone ID: MRT4577_179117C.1
cattgggaaagatgaagcagagcattcatgacaagcattcatgacaagcattcatgacaagcattcatgacaagcattcatgacaagcattcatgacaagcattcatgacaagcattcatgacaagcattcatgacaagcattcaagttattcactcgattcagaggttgatttgcttgggatattgaagttgtaatcggtgggcatctcagctttcagtgtcaccacaacaccattgatcctgatggtgagatcgagagctgatgcgttgatgatggtcacattctcacttgtctcaactgtgatcttctgtcgcagagatggaggttgaatgtatgctgctggatatccagggatatacatgaattgaggttgatatgggtagtatggatgagcattgtgttgtagatgattgttgtcattagagtaatactcttcagcttcaggctcatcatctttagcttcgggttcattgtcttcaggcttgttatcagcttgaggtaagacttcagcttgaggtaagacttcagcttgatgcaag

SEQ ID NO: 86745 - DNA, 487 bp, Zea mays
  Clone ID: MRT4577_179118C.1
ctgcgtccaggccgcgcaccccggcgccaaccagctgcggcaggagctacagctgcagcacgggcacagcgcccaggacaaggaccagggagcctgctccccgctcgcgctggccaccgggctgctagagcccatgacgccctactcgttcgcctcaggcgccgacttcccgctcttctcgccgacgggcttggacgggcagctgagaagcagccacggggccggcatcggcgtggagttggagaccctgttcgaggagctgttacaccaatgctacggagcccttccaatgggacctctatgccgccaattagatagatggaatgggctatgtatgctatctatgcaaccatacatgtatgtacacgtgtccggcaacagaattagcttcggactagactagagtatagtcttcaactactatcaacagctcggtgtactgttccgccctgtccatgcagagttgcatctaaaaaattgggggggt

SEQ ID NO: 86746 - DNA, 197 bp, Zea mays
  Clone ID: MRT4577_179119C.1
tgtttgttcaaaaaaaaccatcctatatgtcgaatgttcttcgatatttagttcacttgtaggctaccttcaatgattcgattgtaatctggatttatttggtactgtatatcaaatgatcatagtaaaaaaaaaaaaaaaaaaaaaaaaaaaaaaaaaaaaaaaaaaaaaaaaaaaaaaaaaaaaaaaaaaattta

SEQ ID NO: 86747 - DNA, 2222 bp, Zea mays
  Clone ID: MRT4577_17911C.1
cacgaaagggagggagttacagtgattttggtgattatgatgacggaaggagaaggacgtccgatcttttgcagagaacagggagaggaagcgatttagatgacgatgaagatgatgatgctggtccagttgggtttgagggttccagtgtaaggcagcaaggtggcaggagaggcaaaatggcgaagagtgttggaccacatcgggttgggaggggcagcgatacggactttggtcaccgacagccaaggggtctgaaaaaaattgactttggcttgtcagaggatgatgatgaggtgggggaagttgatgaggaagatgagccatcggggttcgaagatgatctttttgaagacgagggtgataaggaggatgtgggacatataataggtaataagtctggctcatctatgttacccgaagatgagccagctaaaaatgaaagtgtacagggcagaagtgctgggggtggtgattcttatctgagccagaagaggtttgatgaatgcccgttatctcccttgtcactgaaaggtgttaaggctgctgggtatgaacagatgactgctgttcaggaggctactcttcctattatacttcaagggaaggatgtactagccaaagcaaagacaggaactggaaaaactgtagctttcttgctaccagcaattgaagttatttcgaaattgccacctgttgatcgtgatctaaagaaacctcccatcagtgttgtagtagtgtgccctacacgtgagcttgctgatcaggctgctgcagaagctaacaagcttcttaaatttcatccatcaattggagtacagcttgtaataggcggcactagaatggcacttgaacagaagcgcatgcacactaacccttgccagattctagtagctactcctggaaggcttagggatcacatggagaacactccagggtttgctacaaggttgttgggtgtcaaagttctaattcttgatgaagctgaccgcttgttagatatgggattccgatcagatattgaaaaaattgtggctgcactaccaaaacagcgtcaaacacttctattttctgcgacagttccagatgaggttcgtcaagtatgtcatattgccatgaaaagagatcttgaattcgtcaacactgttcaagaaggaagtgaggaaacacactctcaggtgaagcaaatgcatttaattgcaccactggacaaacaattctccaacctatatggtcttctaactgatcatatttctgaaaatgttgactacaaggtgattgtattctgtacaacagcaaaagtaacaagccttgttgctgagcttctgtctgagttgaagttgaatgtacgtgagatccactccagaaaacctcaaagctacagaactaggatatcgaaagaatttaaggagtcaaagggtctcattcttgttagctctgatgtatctgccaggggtgttgattatcccaatgtcacactagttgtgcagttgggggtgccaactgacagagagcaatatattcatcgacttggtagaactggtcgcagaggcaatgaggggacaggagtcttactattggcaccatgggaagaatatttccttaggagcatcaatgacttgcctattacagaggcaacacaaccattaattgatctggatactaagaaaaaggtcgataaggctcttgcacatgtggaggttaaagacaaggaatccgcttatcaggcgtggcttggttactacaattcaaataaggtcattgggcgcgacaaataccagcttgtatcacttgccaatgagttcagcagaagcatgggtctcaacaaccctcctgcagtgtctaagcttgccctcaggaagatggggctgaacaacattccaggtctgagatcaaagtaaccaattgccatgtatactgtatacatgtcttgaagtcttttttgcacatgatctgacatctgagcacgctattccatactgatcgagttgagttagtttctggtaataaatttattgtacgttttatgcttgcagaagtgcacgaatattcataatatgttctcattcgtttgttctgttactgagataacaaatgataaagatgaacgtgttttgctagtaaaaaaaaaaaaaaaaaaaaaaaaaagtcctctgcgttgttaccactgcttagtttccaagggggggggggggggggggggggggggggggggggggggt

SEQ ID NO: 86748 - DNA, 694 bp, Zea mays
  Clone ID: MRT4577_179120C.1
gggattatattcggtggctattatcgatgctgatggcgctgatcttggactctatcgcaaatacacattccagatggaccaggatatcaagagaagttttatttcaaccccggtgacactggctttaaggaatctgctgggatcagtggtttccagagtgtgcaagagcaatggcacttctgggggctgaaatactgttttatcccactgcaattggatccgaaccccaggattgtaacctggattcccgtgaacattggaagcgggttatgcaaggccatgctggtgccaacttggtccctcttgttgcttccaaccggattggcagagaaactgttgacactgagcatggcaagagctcaataaccttctacgggaattccttcattgcaggaccaaccggggaaatagtgaagcttgctaacgacaaagacgaggaagtgctggtggcagagtttgacttggatgagatcaagtcgattaggcatggttgggggatattcagggaccggcgccctgaactatacaaagtgctactgacgttggatggcgagaaacaatcataaaccccggtctcacgcttaatagtggtaaggcacaggcaggctccagcttcacatcaatgttagatttttttctccttttttacccttgccaacgatgccatgcctgcatttgtacaagccatctgcgc

SEQ ID NO: 86749 - DNA, 292 bp, Zea mays
  Clone ID: MRT4577_179121C.1
aaatatgatgaggctaaggcgtgggcaagtggaattgttgatggcatgagcacgccaatattacacaactggggacagatgaatatcaagactgggcttggattaaagcaatttggaacttttaacgaagaatggaactgcacatcacataaatcgggatcattttaaacaaccacgaatctcatgctttgaaaaccgcttggatatgaaacaatgagcaatcgcttctttaaaacctacttttgatacggatcgccttattaatcacctaatggtagatggcaggcacctc

SEQ ID NO: 86750 - DNA, 2291 bp, Zea mays
  Clone ID: MRT4577_179122C.1
ctgggagggtactcagacgctgtccggacctgttgatgaccccagcaagcttccgaagtggaacttcgacggctccagcaccggccaagctccgggcgacgacagcgaagtcatcctttggtacccgcgcgctttctctccagtccactctctgtattcacccaccttgacgtgtgtgcctcactgcccttgctaatgccacgttgcgctgattcaccttgattcttcttttttttttttggcgtcaagccctcgggccatcttcagggacccgttcaggaaggggcagaacatactggtaaccagagacacacccttcttcagattctctgcactgcatgcatgaaagttgatcatgggtatggactatggagagagaccattcgtccattttttttaaatttttttttgagctgtgtgtaggtcatgtgcgactgctacgagccgaacggggagccgatcccgagcaacaagcggcacggggccgcgaagatctttagccaccctgacgtcaaggctgaggaaccatggtccgtaccttcccctgcctgcacgaaatgaaccgacctgttgcgtacagacatttcgtcgaaatggttcttcttacgctgagcctgtgtaaatccaggttcgggattgagcaggagtacacccttctccagaaggacaccaagtggcctctcggttggccgctgggcggctaccctggccctcaggtagattagatggatctgcgtgcctccaggctccagccatatcgatggctttgatcagctgacggaatgatcctggcagggaccttactactgcgccgtcggagcggacaagtcctacgggcgggacatcgtggacgcgcactacaaggcctgcctctacgccggcatcgacatcagtggcatcaacggggaggtcatgccggggcagtgggagttccaggtcggaccgtccgtcggcatctcttcgggcgatcaggtgtgggttgctcgctacattcttgagaggatcaccgagatcgccaccgccgagaggttgattagagaagcacacaagaaaggtgcaaagattgtactcgttcaggaattgtttgaggggcactatttctgccaagctcaaagactggatttctttcggcgcgctaagccttacaaaggcaatccaactattataaggatgcaacagcttgcaaaggagctggaagttgtcatacctgtcagttttttcgaagaagcaaacaatgcacattataattcggtggctattatcgatgctgatggcgctgatcttggactctatcgcaaatcacacattccagatggaccaggatatcaagagaagttttatttcaaccccggtgacactggctttaaggctttcaaaaccaagtatgccaccattggtgttggaatctgctgggatcagtggtttccagagtgtgcaagagcaatggcacttctgggggctgaaatactgttttatcccactgcaattggatccgaaccccaggattgtaacctggattcacgtgaacattggaagcgggttatgcaaggccatgctggtgccaacttggtccctcttgttgcttccaaccggattggcagagaaactgttgacactgagcatggcaagagctcgataaccttctatgggaattccttcattgcaggaccaaccggagaaatagtgaagcttgctaacgacaaagacgaggaagtgctggtggcagagtttgacttggatgagatcaagtcgattaggcatggttgggggatattcagggaccggcgccctgaactatacaaagtgctactgacgttggatggcgagaaacaatcataaaccccggtctcacgcttaatagtggtaaggcacaggcaggctccagctccacatcaatgttagattttttttttctccttttttaccctgtccaacgatgccatgcctgcatttgtacaagccatctgcgcgtgttcaccatttcacattcagcaaaataaataattttcgtgcaatgtcattctatgtcgggggagaatttagagctccagttcatgactgcatcaatggttcctcgttaaactttgatttatgggtagcattggtctatcaaagtaggaaggtcatacctggcagaaggtgcggaatcagcatatttgattccaaatgccattcacgatggtcgatggcctttaaccgtcaaccatccactacctttggcatgtgacatgtacctttttttccatcaaaaagctcaggattcttgcgaaaaaaaaaaaaaaaaagcggac

SEQ ID NO: 86751 - DNA, 276 bp, Zea mays
  Clone ID: MRT4577_179123C.1
cctctcttctgtcaacactgaagcgatttaagaactgacttgggtggatcaaaataactatggtgattccacaggggcaaacagttctgcaccagccaatccacatctgttcaccttaagtagagaaactggggtgagtcaatatttactcagcctcagtgcctcagaaaaggtgtagaatgttatcttattagctgctttcagtcatcctgtaaatagttcacacaccattaatagggagactcattcaccatggtaataatctgcaagtctggg

SEQ ID NO: 86752 - DNA, 280 bp, Zea mays
  Clone ID: MRT4577_179124C.1
tgttgaacttgttattcctcaacgacgccgaattcgctcgagaccttactctactctctcgcactattctggacgggcgactcgcttctgtgagctaccgtgcttagatccagccatgaggtacagtctccacattcaggttgtgcagtgcggcaaccagatcggtacaaaattctgggatggcgtctgctactagcatggcatcgatcccaccggactctatgtcggcacctgcgacctccagctcgagcgcgtcaatatctactacatcgatgactat

SEQ ID NO: 86753 - DNA, 153 bp, Zea mays
  Clone ID: MRT4577_179125C.1
acgtgtaagctcgaggagtcgacgttcaagttccacggtgcggcgagagctcgcagccatggagagcaagagcccatggtcgctgcggctgctagtttgctgcgcggcaatggtggccgtcgcgcttctctcccagcaaggaggccaggccgc

SEQ ID NO: 86754 - DNA, 314 bp, Zea mays
  Clone ID: MRT4577_179126C.1
ccccccgttaaaaaaggggacgtaaatttttatgggccccccttgggacttgccaaccccataaatgggggggttgccccccgattcaacaaaattaaaaggggggtccaattttgtttaaataaaaagctttttaaattgttttgagccccctaaattttggtttccgttgactccgttttctaaacctaaaaaattttttccgaaatttggggtttaaaaatttttttttaaaaaaaacttttattttaaaaattattttttcccataccgcccatgccacaaaaaccccccattccccccttggccaaaaa

SEQ ID NO: 86755 - DNA, 483 bp, Zea mays
  Clone ID: MRT4577_179127C.1
tgacgcggcgtcaaactcttttccccctttctctcagataggcctatcgtcggtcctgccgcttctatcgccagtgcgacgtaccctcatgtagtgtgagcgcatctctgatacacataggccaggccgtcctccaagaggacaacgctggctgaaagctcgaactgacttgagcctgagattcatgctgacggtcaggatgccgcgtggacaaatcattgtgtgaggacgatgaatgctctcgacaccttcttcaccgagactggagctgttaagcaggtgccgcgggctgcccatgatgaccttgaccccaccgacattgctgacgctagggctgacccctacaggctgatgtttgacgctgacgaggttatcactgggacagatgatgcacgccaacgactttccccgatggcactgaactatcatccaggctatggctgacctatgcctagatgggatgaggaagcttggcgacctctg

SEQ ID NO: 86756 - DNA, 393 bp, Zea mays
  Clone ID: MRT4577_179128C.1
aaaaaaaaattccaacataccaccgtttttttgtttatagttaaaaaaacattgcctacgggttatggacaaacattcgagggtacaaaagttttttttttttttaaaaaaggggggggtcaagccatagctccccggggggggaagccaattcctaatacacccatcggatgaaaaaagggccggccccaatgcccgatttaatccccgaaaaaatcgcttttggtgaagcaaaaatttgcttttggaactacgaaccctacaaaagtggggcactgccaaaaggggtgggttggtgatggccattgttccccactgggaatgcccccaatccagcttccaaaaagggattgtttgttgctggacccatccctacctgggggtggatagggg

SEQ ID NO: 86757 - DNA, 424 bp, Zea mays
  unsure (1)..(424): unsure at all n locations
  Clone ID: MRT4577_179129C.1
cgcagctcaggctcagctcagctcagctctgcatgagtccaaagccgcggccagcacgcagcacagtcgcgggcgggcccagccagcgcacgccgcacggtgagcgcgcgggcgcgcgcgcacacacacacacacggacgacgggaccccacccgagcaaaacgcatgcgggcgagcgagcgtgcgtacgcgcagtcgcgtcttacctcgctcgcagacgcacgttttgcaaatctgccccggcggcgacggcgaccctccctcccactcgctttccccgctccctcctggcctgcccataaatagccccccgccgaggacacgggacacagcccgtccccgtcgtgcttcanattcccactctcctggcccctgctgccgtcgccggcttctacagctactagcagctcggaggaccgggagc

SEQ ID NO: 86758 - DNA, 409 bp, Zea mays
  Clone ID: MRT4577_17912C.1
tcccggacgcgtggcttttgctgttatacaacttggagggtttcattttgcggatctaccggccctaaatggacatagatttttacacaatgcttctttccaagagccttcgctgaataatgtttatttggattacatggtcataaacaattactttctgtagcttgggaaagtgaaagctttttcactaaaaggcacagggaagcttactttcaatttcccacgtttagatactccttcttatccaagtcatacctcgtacattgtgagagctctgatttacctcctgagccagctatttatgaatatgcttctgttataaatgctgctgcacatgagaaggaacgcttcacatcttaattctgtgatggacactttttttgataatgaaaatgaacgttttgattct

SEQ ID NO: 86759 - DNA, 1857 bp, Zea mays
  Clone ID: MRT4577_179130C.1
ctcgagccgccccttctcagtctctgaacatcccactatagctggaatagctgatgaagcagaaattcttaactcccttcagaaaccaaagaaggttgttttcctcggaagtgatggggttgaacgtccatttctttgcaaacctaaggatgatcttaggaaagactcacgcatgatggagttcaatgcaatgatcaaccgtctcctctccaaggtccctgagagccgcaggagaaagctctatattagaacttttgcagtggtaccacttaccgaagattgtggaatggtagaatgggtgcccaatactcgtggtcttcggcatattcttcaggacatctacataactcttgggaagtttgatagggtgaaaacaaattcacagatcaagaagatatatgacacatgccatggcaaaatgcctgacgatgtgatgctgaagacgaaaatccttccaatgttccccccagttttccacaaatggttcttgatgagattctctgaaccagctgcatggtttcgtgctagagtggcatatgcacataccacagcagtgtggtcgatggttgggcacattgtggggcttggtgacaggcatggcgaaaatatcctttttgactcgacgaccggggattgtgtgcacgtggattttagctgcctttttgataggggcttgctgctggacaagcctgaggtggtgccgtttaggctgacacagaacatgatcgatggcttgggcatcacaggttatgaaggcgtatttctcaaggtctgtgaaatcactctatctgttctcaggacccacaaggagaccctcatgactgtccttgagaccttcatccatgatccactcgtggagtggaccaaagttaacaagtctagtggaggcgaagtccagaacccgcacgcacagagggccatcaccaacatcaacgcaaggctccagggagttgtggtgggtgttaaagccagcccttccctgcctctctccgtggaaggccaagcccggcggctgatcgctgaagcagtctccctcaacaacctcggcaaaatgtacatctggtggatgccatggttctaagttatacatatctaacagataacacacacatacgctgtgactgtgaaggaggaggaagtgagtcagtagcagcaagcaagggtccaaaaccatctttctgcacggcacagactttgaaaggctcaacccctcatgactcttgaggcacaggggattcagaggcaggtctgggtacgtaggacagaatagtctgcacacacagaaactcttgtccacaccccacccaccatcccaaactttggtgagtgagtgacatacatgaaccctcgcgcggaatgaggcccgtgattttgcttccccttctacagcccagggctaattctatatgttgtggtgctgtgttgggtcatgctgctgatgctagctgcagcaaggttctttttattgcccaaacacaaacagtacctgccggaaagatggaattcctgttgcatatataggggtggaggaaggatgaggaggatgatgaaaaccacgtgtccaagttccccccttctctgcctcctcattgtcatgccagctgaatgcaatgaaacggagtggattgatttctgtgacaaacattttctttagtcgctacgtactaggagcagtcgtgtatacactcttgcaactgctgctacatgttacgtgttcctgatcctacatatgtatatagcagaagcaataatgttctggttctaaactgcaaggagatgggatttgaacgtggaaaaaaaaaggggggggggggggggggggggggggggggggggggggggggggggggggggggg

SEQ ID NO: 86760 - DNA, 568 bp, Zea mays
  Clone ID: MRT4577_179131C.1
catctaaaagatcgaacgatcataaaccccttgatgattcgaaattacacaaacggaaattaaaaagacattaaaattcaaattcaaagtcgaataaaattacacaagagagaaaaagagagattaattcagtagtctgtggttgggagctgctcgtgtgtggtgttgatgaaaaaaacttcgtagatgagtccagcgattccaccgccgacgagaggtccggcccagtaaacccagtggttggtccatgtccagctcaccaccgctggtccgaaagccacggcgggattcatggaggctccagagaaagctcctccagctaagatgttggctccaacaatgaaaccgattgcgatgggagcaattgttccaagactcccgtttttggggtcaatggctgtagcgtagacggtgtaaacaagcccgaatgtcatcacgatctcgaaaacgaaagcgttcaacactcctactccagcagagagaccaaaagccggcacagccaagccaccggtggcgaatttaaggatgaggcaagcgacgacggagccgagaagctgagcaatccagt

SEQ ID NO: 86761 - DNA, 551 bp, Zea mays
  Clone ID: MRT4577_179132C.1
gggtacctcgaggccggccgggaacaaaataccagcggcgcgtccgatggacgctgtttgtatgccgctctgcggctcccgtgaggtctcgcacacctcccccgagcgatgaacggatcccagcaccgccagcgatcctcggcgctggctccccggcggcgacatcggatcgggccctgggatcccgttgcacaggcgagcccccgacgctggcgcgagcggtcctcagatcgggccccgggatctcgccgatgtcctgtaatggagccacagcccatcggctcgaacaggcagaaggttcgttttcctcgcttttacccttgtcgattcattttgttctcccttgctgtttaactcgttgtccctgaccctaaacccttgacgacgacgaccaccgtgcgcaatggctgctgctggctctgaggacgacgacaatctgtcctctcctagaccacagatcctttgtatggaatttcaagtgcatgttggagtgaaatttgatggtagcatagatggttattctggtgagagggttggttacatgagattta

SEQ ID NO: 86762 - DNA, 370 bp, Zea mays
  Clone ID: MRT4577_179133C.1
ctggagcctcatcggcgacgtcgtcgtgcttcggttcgggtcggcgcacgtggacatggcgcctccatccacctcatgccgagccaaggacgccgacgagcatgccataaccgccgcttctcctcgtcacctcgctaggctccaaccgctgtcggggagccctaaccccggtggacatctccatctctctattttgttgaataaagggaccacgggggaaaagaaatagaagtatagggggttttctacaatatgtcatagactcgtatgaatagtgacagaggacctaaatatgaggatttctattcggtgataatctgagggctaacatgcaagagtggttttccctttttttttctttggctctttt

SEQ ID NO: 86763 - DNA, 445 bp, Zea mays
  Clone ID: MRT4577_179134C.1
gctgttgccggggtgtggtgtggccgccgaaccgacaagcggagcattcgtcgtgttccagatgcagcatagcgggggtagctatgcttccgtcaccggttccccagtaggcctttctcaccaaatctctagcgaggcgcggccgcaaccgtgttccgggggtgaagatctgcgcggggccgttcttgtgcgcgcgcgcgattcccggcgtccactatcgagaggttatgtgtgttacgcagtacctccccaaaacgacggtgactcctggaacaggaaccaggtttttgtgccccaccatctcacgtacagggtcccgaactcccgatggagggaggcgacacttcttcttcgtattcgtcttactgggattccagtggcacggaatctgcctaacttgtgttacgatgagagacactggttccccacggagtgcacgccttcc

SEQ ID NO: 86764 - DNA, 892 bp, Zea mays
  Clone ID: MRT4577_179135C.1
cattgggtacctcgaggccggccgggatcctgttgtccccatccccttgctccagcgcgcgctgtgcacaggcagctaggctcatggcggccgctacccctagtccccacagcgcaagggttgccgttgtcaccggcgggaacaaagggatcgggctggaggtgtgcaggcagctggccagcaacggcatcaccgtcgtcctgacagccagagacgagaagcggggcgccgccgccgtagaggagctcgcggacgcgggcctctccggcgtcgttttccatcagctggaggtcaccgacgcccagagcattgctagattggccggtttcctgaaggcgcggttcgggaagctagacatcctgatcaagggcatggacgcgttccagatggcggagctgatgcggaagagctgccgggagacaaacgacaccgcaaaggcaggcgtccagacgaactactacggagtgaagaacgtgaccgaggcgctgctgcctctgctcctgcaggcctcctcctccggcggaggaagggtcgtcaacgtctcctccgacttcgggctgctacgctatctcaggaacgaggaggtaaagcatgagctggacgacattgagggcctgacggaggagaggttggacgagctgctgagcacgttcctccgggacttcgaggccggcgcgctggaagcccgcgggtggccgacggagttcgccgcgtacaaggtggccaaggccgccctgaactcctactcgagggtcctggcgaggcggcaccccgagctgcgcgtcaactgcgcgcacccgggctacgtgaagaccgacatgaccaggcagacgggcctgctgtagcccgcgcagggcgcggccaacgtcgtcaaggtggcgctgctcccgga

SEQ ID NO: 86765 - DNA, 1430 bp, Zea mays
  Clone ID: MRT4577_179136C.1
ccagcgcgacattgcacgagaggaggttgccggccgcaggggctaggaagccgcgcgtggccacggcgcggagtcgcccgccagctgcctgctgccggtgcaaaggccgcgtgggcctgcttcgccgctgctcccgaacgcgctgtgcacaggcagctaggctcatggcggccgctacccctagtccccacagcgcaagggttgccgttgtcaccggcgggaacaaagggatcgggctggaggtgtgcaggcagctggccagcaacggcatcaccgtcgtcctgacagccagagacgagaagcggggcgccgccgccgtagaggagctcgcggacgcgggcctctccggcgtcgttttccatcagctggaggtcaccgacgcccagagcattgctagattggccggtttcctgaaggcgcggtttgggaagctagacatcctggtaaacaatgccgctatcggtggggttcagtcacttcccgttgaaaatgttggcgaaaagatcaagggcatggacgcgttccagatggcggagctgatgcggaagagctgccgggagacaaacgacaccgcgaaggcaggcgtccagacgaactactacggagtgaagaacgtgaccgaggcgctgctgcccctgctcctgcaggcctcctcctccggcggaggaagggtcgtcaacgtctcctccgacttcgggctgctacgctatctcaggaacgaggaggtgaagcatgagctggacgacattgagggcctgacggaggagaggttggacgagctgctgagcacgttcctccgggacttcgaggccggcgcgctggaagcccgcgggtggccgacggagttcgccgcgtacaaggtggccaaggccgccctgaactcctactcgagggtcctggcgaggcggcaccccgagctgcgcgtcaactgcgcgcacccgggctacgtgaagaccgacatgaccaggcagacgggcctgctgaagcccgcgcagggcgcggccaacgtcgtcaaggtggcgctgctcccggaaggcggccccaccggagctttcttcgcgctaggcaaggaggcgccgttcgtgtgacgctgccgtactgggctggcggtggtggggacttcacggtccggcgctagtgcgccgcctctccgacttgcctggcgcctgctatctactacctctctgctctctgtgctgcgcagcgtagtttgctggtttgggacggcgaataaagaaaggatcgctgctgcctcttagttagttgggttctgtcagtactaagcttcggtaataaaatacccctagatatgaccatattttaactaataaatgacccgcaccgtcgcttgcttatttgccgtgggctttaaaaaaaaaaaaaaaaaaaacctcttagttagttgggttctgttagtactaaacttcggt

SEQ ID NO: 86766 - DNA, 569 bp, Zea mays
  Clone ID: MRT4577_179137C.1
ctggccgggaaactcgagaggagttagggcggccttggccaccttgtacgcggcgaactccgtcggccagccgcgggacttcagcgcgccggcctcgaagtcccggagatccagcagcagcagctgctggcgttggtcgaaggaaaggaacggaatctgaaacggtatgatcagataccggaacagcttacttacgcgtagcagcccgaagtcggaggagacgttgacgacccttcctccgccggaggaggaggcctgcaggagcaggggcagcagcgcctcggtcacgttcttcaccccgtagtagttcgtctggacgcctgccttcgcggtgtcgtttgtctcccggcagctcttccgcatcagctccgccatctgaaacgcgtccatgcccttgatctgttccattattccacgcgcacggcgcaccaccatgtaaaccgtttcatcagagcgtggcttaggataggatctgaaaaaaaaatctgagcatgcatgcataatttcgatcgggggacatgtgacctcaccttttcgccaacattttcaacgggaagtgactgaaccct

SEQ ID NO: 86767 - DNA, 854 bp, Zea mays
  Clone ID: MRT4577_179138C.1
gggttggggccaacatgccttcgagagcagaactcactgcccgtaagagcgactgcgaaccgcggatgatcggagagcccaccggagagtgctacgacgtcatactgtattttgggatcatagacatacttcaggattacgatatcagcaagaggcttgagcacgcgtacaagtctttccagcacgacccaacctctatgtccgcggtggacccgaggcagtattccaggcggtttaaagaattcgtgtacagagtgtttcaagaagacgggtgcgcagctgcagacgcgttgagactttggagatgccgcagcctccatgtgtaggtgggtgaactctcaaaggaagcccatctgggtggactagagttgccagaagccagcctccatgttgagactttggagggtggcgtgggtgagcgtcagtcagtggaagcccatctgggtggactagagttgccagaagccagccgtcatctttgtcttccagaattatagttttagccatacacatacgtacatagctcatcactaatgttttgtagggtagggaggtgtttagcttacagatccagctcacagatagaaagattgtaagacaagagcgcaagccagtcgggagatgtagattcttcatcacccgtcccgaggtgtttagcttacagattcagctcacagatacaaagctactgtcttgatcgcaacctcttattttaacttatcgataggaaaccccttgtagacgacgagtgagatcgctgtaatgtacagggtttgtgggtggcctacaagtgatggctcagttttgttccttctttgttttctggaaatgaatgatcttgctaacttccaatg

SEQ ID NO: 86768 - DNA, 1769 bp, Zea mays
  Clone ID: MRT4577_179139C.1
gcacgagtcgcggccgggatgtaccccgtgaccttccgccccgccgcgtcctttccccaccattcccatggtggcccccctcgcctcctaaggcaccatctccgaggaccagggcggccaccacctacccggcttcgcattcggcagccccaatcggccgaccgcctttcggtccttgtgtgtcccctctccagcggcgccatacaacaaacagtacaatgccttcaaattctgccgtagtagtagttatcgccatctttcttgttgttatcctcggcgccagccacgcggtcaccggcgcccgtgtcggcaccatgatgatccggcagccttcttcgtcctcctccgtcctgatgttcagggaggcgcccgcgttccggaacggccccgactgcggcgcggacggccgggtggacatcgccatgacgctggacgctaactacctccgcggcaccatggccgcggtgctgtccatcctgcagcacacggcgtgccccgagagcgtagcgttccacttcctcaccgccgacgccgacgccgacggccacggcctctccgccgcgctgcgcgcctcgttcccgttcctcgacctgcgggtgtaccgcttcgacccgtcgcgcgtccgcgaccgtatctcgcggtcggtgcgccaggagctggaccagccgctcaactacgcgcgcgtctacctcgccgacacgctgccgcgcgacgtgcgccgcgtcacgtacctcgactccgacgtggtcgtggtggacgacgtccggacgctggcgtccgtggacctcgcgggccacgtggtggcggcgcccgagtactgccacgccaacttcagcaactacttcacggacgccttctggtcgcacccggcgctcaacggcaccttccacgggcgccgcccatgctacttcaacacgggcgtcatggtcatggacgtcgacaagtggcgcgccggcgggtacacgcgccgggtggaggagtggatggccgtgcagaagcggcggcggatctaccacctcggctcgctgccgccgttcctgctcgtcttcgccggccacatccgggcggtggaccaccggtggaaccagcacgggctcggcggcgacaacgtcgagggccgctgccggggtctccatccgggccctatcagcctccttcactggagcggcaagggcaagccgtggctccgcctcgacgcccgccggccgtgctctgtggactacctatgggcgccctacgacctctaccgttactcgtcgccggtgatcgacgagtggtgactggtgagccgtgacgtggtgtgagcatgcaccacctgaggagctactagcaaatggtaggacagttcgatcttgcagaggggaagaggcatcacaatgatgcatgcatgcatggctatctcttgatcttttaatttatataatactgtgcaattcaccctcttaattttgtatatatagatctatagatcctgttgtaaatttgtacagattattattagtatgcatggtggggaggctcatgctgacaaatgtatgtactattgtactgtatatctcgagttcatggtaatacaacacacagattctgcatgcaaaaaaaaaaaaaaaaagcggccggaaatcacataaaaacagattaaaatcacacaaaatgaagtccctcaaacatataatcttcaagtagtgacccgtccgtccatgctaagcaagcttcactggaatgcggaggtcttggcggccatgcatgggtcatcgatcgagatcgac

SEQ ID NO: 86769 - DNA, 186 bp, Zea mays
  Clone ID: MRT4577_17913C.1
tcgtggacgactacctttacgagctccgtggctgcatcgacctgggcttctgcttctagccggcgcgggacgacgggtgcgcctgttcctgctccggtaggaacccccttctggagacgctgtcctcacttgtcctttactacgcatttcaccgttgtgcaataaacaaaatatctctaataaaat

SEQ ID NO: 86770 - DNA, 299 bp, Zea mays
  unsure (1)..(299): unsure at all n locations
  Clone ID: MRT4577_179140C.1
cgagggccgctcccgttggacgcctccccagtccccaccggacccctccctgcggagactagtgaccatggctcacatgcagtcaagtccgaaggggcaagaggttcatgaggtcaccaggaaatccaagaccagattgntctgaaacaagacactgtgatgatgaagactctgggataccacctcctctgctgggaaagcaagtatcctggttggcctggaactactgggtcaggatgctgattcctgcacagaaggtcggtgcaataatcggccacaaaggtgagagggtcagaaga

SEQ ID NO: 86771 - DNA, 211 bp, Zea mays
  Clone ID: MRT4577_179141C.1
ggtcgacgatgcgtacttttcggcggccgccccacaaatttgtgggtttttttagaatcgatggcgaggtttccacccaacgatggagttgcctacagacacatacataagcggaagatggagatcgaacaaggatgtgcaataagctgtcgctgcttatagaaccagaacgggcatagatgtgagagacttatgctacacaggcagttac

SEQ ID NO: 86772 - DNA, 1048 bp, Zea mays
  Clone ID: MRT4577_179142C.1
aatcatatgacattcttaatatatctttattatatcatcataaatgaacatgaacaatattgaattacttttgtaccttcggcttaacagaagacaaaagaccaagcgtgacgcacgagcgaatacaagtcagcgtgaacagtacgggggtactgttcatctatttataggcacagagcgtagcctgtgtaaaattacattcatgtccttcatgtttacaattgacttaaggacaatctatcgaggactagatagcattttcctctttaagtcggttcctttttctgttactgagttgaagctcctttgcgcgtagcttcggagttgattcgaccttcgtcccgaccatgctttttatattgtgaacagctttgttccgagtctgaaggttcctccagcaaccgcacatgatgagcacttgcgtcatgctttgggaaggagaagcttccccaaccaacggaactcgatgaatggagtcccaggcataatccccaaccgcacgtgaatgctctgttcatactaaaatgacaatggagtcccaggcataattatgattatgatcaaccataataccagactactccatgatttttttttttttgtttcattaaattgaacaatgattataaatgtggacagcaaaagagagttaggaacaatcaccactcctcaagctttgcagcagatctaagtaacaacgagaatctgggtttatgtacccatgacggaagaggaagtcgatgatcacaaggttgcagttcggcttgaaaaaatctgtcctccttataatgtttgcagcatgtataacagggactagtctgaagctatcaacctcaccatcttcattattaggaacaaaatcagcaggaagttggaggtcatagcagaagagaacatcccttttgtatctaaagccttcaatatccatataagaaaccgctccaacagaagtagcatttgttgatagtggatcttgtgattccagcttcctcctcacattccttgatgatattctctttgcaggacattccgtacctcgtgccgaatt

SEQ ID NO: 86773 - DNA, 497 bp, Zea mays
  Clone ID: MRT4577_179143C.1
ttttttttttttttttttgatcatgaaccatgcatgacactggatttaaaagtccctgcttgcacttgtacaagtggacagtggaggccaacctccctacacccacaacttagcagaaacttctacaccttctgcacaagcacaaccttgttccttgtgtggttgtgcgaaactgtgactaataagctaatacatttgcagagaaaccaagagagagagagaaaaaaatggagcatcatcattcatcagcagggagcatcggacaattgtcatgacttgggctttctaacgacggcaccaataacgacggatcggaaggcctcggtcgtgcaggggatacggaggattccctgctgctcgtacccgaactcctgcgccgccagatcaagcagctcgaggaagtaggactgcttgaactgctccatgtgcacgaggatcctctccctctcctccccctgccctatcagaatcggtatgaatccctttggcaccttctc

SEQ ID NO: 86774 - DNA, 868 bp, Zea mays
  unsure (1)..(868): unsure at all n locations
  Clone ID: MRT4577_179144C.1
agggttcacaatgttgctggtgaaatggttggtgctagtttatatggcagtagaagatctaaatcaacagctatagttgaccagatgtacaatgataggaatatattcaatgatccagaagctaggggaaatttgttgggatatcaactagaagtggcaaatttagtcagaagtgatattcagtatattggtgaaaatcggttacaagcccaacatcctagtgtccctttaccatgttctgttgtacaattgcgatattattatatcctttgtggcatggggcgtagccaatggaaagattttgttgcagttcggttttcaaaaaccaccactataaattgggaatattttggactgtcaatagaacccaatggacattgcgacaacttttttattgctgggttctgccaaaaacattttgaagatgttcatccaaggatgtcaaagaaacatttcttttatcccaaagttgggaacgtgtcgtgggtatggtctccaggtatggtgcttggtcatgggagcttttttttgtacgtgtctccaggtctccagaacgtgtcgtgggtatggtctccaggtatggtgcttggtcatgggagcttttttgtacgtctatatcattagttgagataacatgcaccgaatccacttcaacatgtaggctaagtgtttgcagactgcagagaccttagtcattaagaagtcctgatccttgtctcgctggctattgtttatataaagtcgaaatatattgttttatgaacctctcattatgttctatgatgcatttgtttttggttactgcaaggnggacatgtatgttgactattttttctaaaactccatcccttgactgacctgaaataca

SEQ ID NO: 86775 - DNA, 724 bp, Zea mays
  unsure (1)..(724): unsure at all n locations
  Clone ID: MRT4577_179145C.1
gggtacctcgaggccggccgggtgacaaacctttcgtccgactcttttttccgactatagtgtaacccacgggcccattgaccaagcccgaaaatctcatccgaggtgctagtggtaccggggctaacctactagaatcgtatcgttgcgtcggacgaatattatggtccgaacaattaggaaaagccagggatgctgagcataatagttccatcgcatagtagaaggagggatttatcacccaagtctaacatccattaaggcccagtcgttatacctatgtctcaagtacctccgatttcttggtccggcgtatgcaagctgggatagcgataccattagcagactatagtggataacgtgcaaaaggttatcaaacttgaacattacgaagcaacaaaatcaacatcaagagagaaaagatgcgcacccaactcttcatcaacaatgagtatgtagatgctcaaaacaaggaaacgttggctgtctacagcccacacgatgagtcgcttgtaacagatcagctccaagttgctggtcaggaagatgtagacaaagctgttgcagcagcgcgagcagctttccacggagaatgctcccaatggataccggcgcanagatcgacagttatgctacagttcgcagatctggtcgatcagcatgctgatgagctagctctttgggaaagcacgtgcatgggccaggncatctctaccactaagat

SEQ ID NO: 86776 - DNA, 696 bp, Zea mays
  Clone ID: MRT4577_179146C.1
attttcccatcttctcatccgccggccagaggctctcttctacccggccgccggctagccgcttccgctccagattcttattgctattcaggtctccaagatccgattgagcccacctcaatcggcaggcgaacagcaaggccggcagccatggagctggtggtgggagcttcgggggcgacgatgaagtccgtcatgggcaagctgggcggcctcctcgcccaggagtacaccctgatccggggcgtcaacggcgacctccagtacatcaacgacgagctggccagcatgcagtccttcctccgcgacctcaccgccgtcggcaccggccgagcccagagccacggccaccggatgaaggactggatgaagcagatccgcgacatcacctacgatatcgaggattgcatcgacgactccgcccatcgcctccacggcctgcgctccgacatgtgctgctactacttcgccaacagcgtctacgagatcctcacatggtggcctcgccgcgacgtcgccaccaagatctccgttctcaagatgcgggcacagcagatcggggagcggcgggagaggtacggcgtcaacaacccggaggccgccggtggatctgagggttctcatgccggaaacggcactactgctggattcgatgccgccgataaccaggaggcgagtcttgagctcgtcgccatg

SEQ ID NO: 86777 - DNA, 741 bp, Zea mays
  Clone ID: MRT4577_179147C.1
ctcacttcccggaccccccatgtgggtctacggctccatctgggacgcctccgaatgggccaccgacgacggccgccaccgcgccgactaccgctaccagcccttcgtcgcgcgcctcgaccgcttagtcgtcgccggctgctccgccagcgccccgcccgcgtgcaggcccgtgccggcgtcccccgcgggggccgggctcacgccgcggcagtacgcggccatgcgctgggcgcagcagggccacatggtctactactactgcaacgacttccgcagggaccactcgctcacgcccgagtgctagcgagcgcgcctgtctgctgtgttgcgtcgtcgtcgtcgtccttgttgctttgtgctttgtttcgttgttgatgaaaaggtcgctaggcgtggctgccctactaccgcccgcgcccgccgccgctctctctgcttgcggtgactgaggcgcccgcgcgagccggtggttgaggcgttggtcgttggcttatcgccagcaaactcgtgtcgtcgctcgtctacgtacgcgcgcgtacccattgcatttcttccggttgttgctttccatttggtctcgcatgcatcacacgaggcgccccaaagggggcaagcttccatgattcatacggatacactatgtataccatatatacatattatatatatatttaatacatgtttcctgtcggtgaggataaaaaaaaataatgtaatgcaatttttaccttacaatcg

SEQ ID NO: 86778 - DNA, 247 bp, Zea mays
  Clone ID: MRT4577_179148C.1
gacacacacagagacgtgggtgaccatgttgcttgtggggtgcagagatgggaggggtggggcccagcctggaagagtggccagtgacacaaggtggacactctctacagatcactgaggataagctggaaccacaatgcatgaggcacacacacagcaaggacgacgctgtaacgatagcccacgcggttgtgggagccctgggaagcctagctcaggccgtgagcagatagtcggggaggatcct

SEQ ID NO: 86779 - DNA, 1391 bp, Zea mays
  unsure (1)..(1391): unsure at all n locations
  Clone ID: MRT4577_179149C.1
aattcgaaggattaatctcatcccaactttatacgaatgttcttatcaagagtgtggatccatatataaataaagtattcaacgcagatagcagatccaccaacgctgaaacgcatgctcagcctccattgaccaaagcctgcctcggacctccactttggaaaaatggagaaggaagaacatcgctatcaacatcatcttccatttcatcctgtatctaaactttgtcaaccatttgcgcaggccgcagacacactcatacatcagtcccttttgattagtccatatacacccactaccagaaaaagcagcccccccaccacaaagtgtatggctagctagtgcactacagacccggaaagaaacattatgagagcatgccagactcttttagcagctccctctctccatcactcacactcatagggggcattgaaagatggaggagcatgagcaggttattgcttaccatatccttgcaattaaagcacctttgaacaaaagatcggaaagggaaaggcgatatcatataccatttggtacaacttcaagtggagaggatcttttaggtcttttttccctgcctcctccttgttagtgaatcgaagccggcatttctatcttacgctttgattggtaggttaacgcctgctaacagccccgaaaggatgcaagttacgcttgctgccactatactaggaaggagtgttgggttctggttttactggttgtccgtcctgcgaatgttgcgtgtcatagattgccatggcgagcgagatgggcatcatgcagagtgctttggactggaggaattgcatcgctgccccaatgtcttcttccatcagctttgcgatctgtctttctgtgccgtccgttgaccacttctcccaaatctgctgtttgctcccactatcacttgcttcccccttaactgaaagtgggatatcagcgaccagctgtgccacagcaccagcaccacccagcctgctcatgcttagaaccttgacttgaagcctcagaaacttcacataatcgaggatctcatctagcataactgctctatctgtcttgtttctcgtgcccaccaattcctgtagggccctcatcctttntgctattctctctcttcttagcctctccgcgatgctgtgggggtcggtcgcctgcccacgccgcgcccgcacctttggcctcggtgccggcggttgtggcccgactgccgcaccgccttgcttcggctgctgcgcgtggaacacctgggtaggcggggtggcacggaggtggggtggctgcacaccgccgccgaacaccggcgggaagagcccagggagctgtatagcctcccggtccgccttgccaccgtcggcgtgcttcccacttccggaagcctc

SEQ ID NO: 86780 - DNA, 390 bp, Zea mays
  Clone ID: MRT4577_17914C.1
ataatacgattgtatgtgtactgagtctgtgtcatcaacttgatactacaaatgcatggaattatatgagaatgctgatgcatttaaggttatgatcttagtgaaagggctcgtcctgtttcatgcaaaagatgacaattcaaattactttaggcgggctataggttacactgtatttagcagtggcttgtggaccattgaagatcgcagcaacctaggtcttttgttattgttatgcccaagaacatgcccttacctgcaaaatcaatgtatgttgtgaacgatgggcccagttgcaagctttggacagtgtgcaaagaccaccaacgagaacgcaggactttgacagcatataagacgtcacaccctagctgtagtggagtactggag

SEQ ID NO: 86781 - DNA, 309 bp, Zea mays
  unsure (1)..(309): unsure at all n locations
  Clone ID: MRT4577_179150C.1
acagaagagccgccccagccaaacnccccaccngacaanggcnnccgcccgngacggcccggcaaggccgggccnnagagccaaaagaggggcganngccccgcnnnccgacccacggaanaagnaaaaaacggggggggggggggannncacnngcgcccgagggcncccacngaggcgggggccgggcaaggcannncacaaaggcggaccagaggcaagcncaacaggggcnncnnnccccgcggannccgccaagcccgnncccnnggcngnggnnncgcnnggaagnngacagggacagnggga

SEQ ID NO: 86782 - DNA, 295 bp, Zea mays
  Clone ID: MRT4577_179151C.1
gcagaaaaacttagcacagctcaatctgctgttttgatggctacagggtttatttggtcaagatactcacttgtaattattccaaaaaattggagtctgtttgctgttaatttctttgtgggggcagcaggagcctctcagctttttcgtatttggagatataaccaagaactaaaagctaaagcacacaaataaaagagttcctgatcacctgaacaatctagatgtggtcaaaaccattgggacctagtttattatttggttattgataaagcaaagctaactgtgtgtttag

SEQ ID NO: 86783 - DNA, 255 bp, Zea mays
  Clone ID: MRT4577_179152C.1
gagggccccaagaccgagagcgcggtctcgtctacataaaatacccaggcctggcgctcgcttgtgcctgagcgtgccaccggttgcgcgcgtacggcggtggacttccggtccacaagggccaggtccgagcggacggcgacgcccgtgacgtaacccctcacgggcggcgcgcactcatgcgtgtaccgccctccactgtgcgagggtgttggcctacgccaacagcctgctgttggcgcatcgcacgtacgg

SEQ ID NO: 86784 - DNA, 1222 bp, Zea mays
  Clone ID: MRT4577_179153C.1
caggccggccgggtttcgactcccacccacaccaaaccctcctctcctccctgtactggtcgtctccgtctccggccgccttccccgaaccttccctatctcggccttcataaaaatcaaaatcaccccacccgacaccatcatcgccggcccatcccacatcaagccaagtccgactccgattctcccacgccaagcaaaaaacctccgattcctatctgtctcgcccaccgccgccggtgggacgagccaacatgtccgccacgccggaggacttcctgggggcgccgtacctggccgcgccggagcccttctcgccctccgtcttcctcgacctgcccccgacgccggagcgcccggataactccgacgacctcgtcctcccctacatcgcccagatgctcatggaggaggacatcgacgacaagttcttctaccagttccccgaccacccggcgctcctcaccgcccagcagccctacgcgcagatcctatccgactccgccaccgccaccgccacctcctcttcgtccgactccgccaacgccaccagcagcagtagcgcctcggggaccggcggcaactccaccctctcgccctcttccgacgcccccgccggctggccctacgacgacgcactcgatatctcccacctgctccgctccccgacataccctgctactcacatgatgggggtcggcctcgacgacttcgccgaactcttgacgccgccacagggccaaggcgaagcccagcggcagcaatcttccctcgccgcgctctcggatggcgcggaagaagaggacgggagcaccaaggcagaggccaccacaacgtttccggttggcgacgccgaccacgccgccctggcctcggccttcttcggcgcccagaacgggggggacacggacatgcttaacatggccttcctcaaaggcatggaggaggccaagaagttcttgcccaccaacaacagcctactcatcggccttgatgaaacctcctgcaaatccttgcctaaagacagatacatcaagccctacactgcctttgccgctacccaagtgaaggaggaggaggagcatgtggtgggtgcatggaaatggatgccaatgtttggggggaagcagaagcaccaatggcagggtccgcaagaaccaccggctgaggggggatgatctggaggctgagacaggcagagcagcagctgatgatgcgacag

SEQ ID NO: 86785 - DNA, 594 bp, Zea mays
  unsure (1)..(594): unsure at all n locations
  Clone ID: MRT4577_179154C.1
ggtacctcgaggcggncgggagagtccgtaaacaactcccggncatggcgaccgnagaccgggtcgccgccaccttcctctcctctttcccactcancatccccgncncttttcctccgnttccctcgtgaaaaacnctggcctacccgnntcccttcgggccgntgnnncaggtggnncacggntcgcctcccgtctccgggnncaccgcgtcggcgccgccgtcgccaagcttcccaccacgaatcnggaggtagnttctggggagaagaagatnngatggnnatnaagggntgtggggtnttttgngatggnngagntggaggnncggaagatgagggaccctacnanaggnaccgaggnggtcctcatgggnnttnttgtnggngganntagggggngagnnnaacttttgcgtgtcaatggaaccacaattctcagagtgcggcgaggaggcagcgaatgtatttgggaaattagaaaagttttacctttacgtcacatgtttgtacaatagacggaaaccgaagaangaggtctttgaaagatgttgggcaacgcaaaaataaaaataaagggagggtnggaagaaga

SEQ ID NO: 86786 - DNA, 354 bp, Zea mays
  unsure (1)..(354): unsure at all n locations
  Clone ID: MRT4577_179155C.1
gcgctttcactatttttttcttacattacaggacatagctaagcaggtatgacaggatgtcgtggcaaacatacctaaatgagcacctaatgtgcaagatcaagggcgactacctgacctccgctgccatattccgtcacgacagcccggtatgaaggacaagcaccgnattccgacagactaggacaggatacatgaccaatatcatgaaggactcttacgagcccgggttactggccccgaccggcctgttcctcggacccaccaagtacatggtcatccaaggcgagcccggagctgttatccgcgggaagaaaggatctggaggcataactgtgaagaatacagggcaag

SEQ ID NO: 86787 - DNA, 189 bp, Zea mays
  Clone ID: MRT4577_179156C.1
acatcctgggcctattccaagtgctccaccgcctcgtcgtcttcgacctcaactataccctctggcccttctactgccagtgccggtccaagacggatactccgagccttttcaggcacaccacgggcatcatgtacgccctcaacgagataccgatcgacatcgcgattgcttctcgcttccccaccc

SEQ ID NO: 86788 - DNA, 367 bp, Zea mays
  Clone ID: MRT4577_179157C.1
atattgccgggtcgacgattttctcttgtcggcggccggcctatggtggtagtgttatttaaacacaacatgcactgctggtactaactaattatctgcttaaaggctgggatgcacatatagaacacttttattaaaaacgggtttctggcttggactatatttattcccatatagaaactagctggtgtaatagtgctgtacagtattatggagggacactcgaccgcaattaatggcctattgatatgagtctggccaaccatcaagtacgaaacagccgagccattgatacattattacaaactctcatacggaaaactgacccgatatctacatgccagtggaacaagctaaattggatata

SEQ ID NO: 86789 - DNA, 333 bp, Zea mays
  Clone ID: MRT4577_179158C.1
aaaaaaaaaaaaattttaaatttccccccccttttttttgaacaggcacaattttaaacttagttgggggcaccccaagggaatttttagttttaacaaaaaaataaatttttttgaaccaaaccccccttaaggaaaacattaaacttttggcccttgaaaaaccccactggggtgtggggaacccaaaggcccgccgggacaaaaaatttaaatgggtaaaaaaatttttgggggccccttaaaataaaaaatttttggaagggcccactctgtctttaaatgcgaaaaagaaaaaagccctggaattttttggacaattttttttgggga

SEQ ID NO: 86790 - DNA, 748 bp, Zea mays
  Clone ID: MRT4577_179159C.1
tacctcggaggccggccgggagcctttcctcgctgaggtcatggtgcgcgcacctatctcccatggtcgtgagctgaggtgctccgacgtcatttcctcagcccccagagtcggacgcctgccctacgatggctcgcttcccggccggggcccacatgcggctgtggacatactcagccagaccgcagagcggccttctctcgctcaggtaggaaggacagcgactgtgtcgctatccagtggccgatcatcgaagctctcgagggcgcccgggcttccctgaagctcccctgcaccgcgcctctgctctatctctggtctccatccaaggtcgcccccggctccttgggtctcctcgccggcgccatgccttttccccaacctcgccggcgctactccctctgctagcacggacgactgccccaagttccatggcgcgaggttcgcgcccaagatcctctctgccgagcaggtcgccagggctctggccttcttcgttgcccaaggccgcgcgcacgtctcactgctcagctcgccccgacgaagtgcccagtgcctgatgggagcacccgagagacgggcggctggctcgtccgtcggccatccacctcatccatgggcgcgcgcccatcttactcctctggaatgcgcccctgtggatcggccagactcgacgtgacctaacaatatcgctgaacaccgcgtcgagaacgccggcgctctctgcccagctgacagcaccggggat

SEQ ID NO: 86791 - DNA, 212 bp, Zea mays
  Clone ID: MRT4577_17915C.1
agggtatattccaaatcttgtgccttgttataccaatccttcctgattcccgtttaaaccaactactctatacctgtgctgcctacattttcaatcctcccaagcattagcaaattcctgaaatgtcctcattgggaggccttccataggagtcagctatggacttacataggagttgcagctaacacagactgtgacttatgctccgtctg

SEQ ID NO: 86792 - DNA, 658 bp, Zea mays
  Clone ID: MRT4577_179160C.1
gcccttcctcgagtttttttttttttttttttttttttttttttttttttttttttttttttttttttttttttttgagaccccccacattttttctttttcaggggagagagaaaaaacgcaaagtaggaaaatgtccttgcagagacccccaccccacacatggatcaccaaacacgcgtacgaagtaccatgcccacccattattagtaactacccatgatatacatagaggggcaataaaacccccgggattttgttcgccctccatggatgctcctttggggccgggggggcagcctacgtccccaagtaaatcgatcgagcagcagcccgatcagccaaaaaaggggggtttttttttcccctcgccgggggggggggacttcttcttctccccggggttctccggcgggtttttggccttttttttgggggggggctcggggaacgcaaaacccccgttgcccaggggagccaccggcgccacgccttttttgattttgggccgttgggcgtgctccgggtcctttttcgcctggggccttttgtactggatggggggggccgggcgatcttgcttgcttgcacatgggcgccacgaaaggtgtgccagggacacaaaaaaatgggcgaaagtcaccttgggccgaattcc

SEQ ID NO: 86793 - DNA, 448 bp, Zea mays
  unsure (1)..(448): unsure at all n locations
  Clone ID: MRT4577_179161C.1
aggaaaagggggtaaaggaaagggggaaaaggataaaaggaggaaaatgcaaggggggaaataaagggaggaaaaaaaaggggggaacaaaaacgactgaaaaaaggggggggttttaaccgttgcatggaaaacgactaaaaggaaataaaaaaaataaaagcaaaaaccgaaaaaaggatggaaaaaaaatgaggaaagaagagttaaaaaaagtttggaaaaaaaaagcaggaaaaaaagagcggcacctaacaaaagcagaatattaaatgttggcttttgggttgggggatgaggaaagaaaaaaaaggaaagggaaaaggggcnagggtaaaagcgctccctttggaggattaattaaaaatgaatgagggggcaggtctggagaacttgttagagaggatttggtgaaaggctatcggtaaagggctagggatgggggggt

SEQ ID NO: 86794 - DNA, 218 bp, Zea mays
  Clone ID: MRT4577_179162C.1
catatcataattatatatatatgcatgctatctactatgatcgatcgctactagaccttcttgcatctatctgcatgcatattataaaataatgtcatattgatgcaacgctccatgcaagtctttccaaggcgtacgtactatatcaaatcattgtaatttccttacatgtatatgtatgtgcttgtgaaagatacgtacctatatatatatgtgct

SEQ ID NO: 86795 - DNA, 148 bp, Zea mays
  Clone ID: MRT4577_179163C.1
cagcgccgcccgcggccactgtttatttaccgcaccacccctgggcatgcgtgttttcgctacactgatgcataagtttggaatactcataccacattttattaatagtggaatgcggaaacaccacatattcattgggttgacaaaa

SEQ ID NO: 86796 - DNA, 369 bp, Zea mays
  Clone ID: MRT4577_179164C.1
aaagaaaaaaaacacttacccccccaatcacaccacatgacagaaaaaaacgggcatctgggcaattggaaaaaaccggccctaattgcaggttaacgcccatgtggtgggggggcagtccaaaaggaaacgatggatgaaattcctgctccctacacaaaagtacagggcggtttttttattaaccaggggcagggggtggaccagacacctaatccacccagaggccgccttttttgaccttgcaggctatctgaatgaactggaacctgtggttcactggcctgcttgggtcctttccggcaaacgacccaacagggggggtgaggcacataccgagatcgctcaagaagttggtggacggaacat

SEQ ID NO: 86797 - DNA, 159 bp, Zea mays
  Clone ID: MRT4577_179165C.1
acgccattgcaggtgcccgcgtttgacacggagaggtggccgcgtgttggactcgtagagaagacgacgaggaccgggagtcggatgcgtgcctgtacgacgacgcgtgcgtgactaggtgaatcgcgagagggacccgatgaggatgacgaggaaggt

SEQ ID NO: 86798 - DNA, 389 bp, Zea mays
  Clone ID: MRT4577_179166C.1
cccacgcgtccgcccacgcgtccgcaaatccctgtgtgctcatacttccctttgaccagtattttgctaccgtggcgatgcgacgcggcctcggcagctctatctccgccacacatagcggtgtgcggcccgctgcgcgcctccttagttctcctgcagcaacggtttatcacacacaccaagcgctccgcacacaagcgcgggtcgcgttgcaggttcgaacgacagttcgtgacgcagcgtggtgactgggttcgtgagcagatgcggacagtgaaaaaaaaaaaaaaaaaaaaaaaaaaaaaaaaaaaaaaaaaaaaaaaaaaaaaaaaaaaaaaaaaaaaaaaataaagggggggtatgtgtagggtataaaaatgaaaaaaata

SEQ ID NO: 86799 - DNA, 284 bp, Zea mays
  Clone ID: MRT4577_179167C.1
ggttatggtgtgacacatcaccaaattaattacatgcggaggcaaccaagcccacaaggctagtggcagagtaggcgacatacatgaaacacccacggtaaccggcaactaaatcggccactgttataacgtaatgattcgcaaacgagggttaaacggctccaaagataagagcgttataaaaactaagtgccgccagtgccctacgggctacataggaggcgctcggggcaattgggccaactgccaacgcccgagcacggtaacacgcaaagtaacccacc

SEQ ID NO: 86800 - DNA, 332 bp, Zea mays
  Clone ID: MRT4577_179168C.1
cggggagaggcagggaacagcaccgacaccgccgagaaccttaacctttacggaaccaaaggggcccgcgcggggaacgggggcaaccaaaaggaccaggacgacgcacccccacgggcgcggaggccctgcgaaacggacaacggggccagcaccaagcccgtccaccaaaggcaaggcaagaaggagacctcccagaccgggagggagaaaacaaaggccaaccgccacaacggccagcgaaagacccccagcggtccaaaaagcacgagagacacgggccgaaccggccccaccgacagcacaacaagaagcggacagaccgaaaaaca

SEQ ID NO: 86801 - DNA, 339 bp, Zea mays
  Clone ID: MRT4577_179169C.1
ctgacgcgtagagcggaacgcgtgggcggacagcgtgagcggacgcgtgggagatgtggtaacgcgagaactgctattatgcatgcagcagccgtaagcattgctactagggtttcatgcggggcgaagcaattggtctatgccgcctgaacgcacggcggaatctgttaggcctacccgagctgcgtacgacggcagataaggcagacgtcgtcacggcaatgccggatatgcttgctgcggacccagcttttccagcgccattcacgccaaccaattgggtccacagacagctcgtctgttcagggtgctggaactttctcatgttgccagattgtg

SEQ ID NO: 86802 - DNA, 394 bp, Zea mays
  Clone ID: MRT4577_17916C.1
gacaaggcatcgatctatatgtgagagccatgtcatccgctgttccatcacgggtggagccgggtgtggctttggtgttcttggcgagccgcacatggctcggttctgctaaagtgaaccacatcaagaacatcacggccacctatgggaaggactggctggactctaaagcgacatgttatggaaagccgacgggtgccgctcccgaccataaccgtggccgatgagggtacaaggacgtgaacaagccccccttcaatagcatgggcgcatgcggcaacattcccatattgaaggatagtctgggttgtgggtactgcttcgagatcaagtgcgataagcctgtggagggctccagcaagcccgtgtgggtgcacatcacggacatgaacta

SEQ ID NO: 86803 - DNA, 260 bp, Zea mays
  Clone ID: MRT4577_179170C.1
cacgtgaggtagatcttgtggtcaatgcgggagaggacctccacaccatctggtggagtatggatgatcatacacacggcacgctgcaccttggccagatcaccgcctgtgacgacgctgagaggctgctagatgattccgtacttgatagccacttgggcagcctgttcacgaacatggttaggagcgctggttcttgattgtggcctcagcagcgttcacgtacttgtgaaccacatcaacacggtacctacagtcga

SEQ ID NO: 86804 - DNA, 282 bp, Zea mays
  Clone ID: MRT4577_179171C.1
ctaagacctgcccgtacttccaccagctggaggccaactgcatcagcaggaagcacctccgcagcggcggcgccgcgctgacgctcctcctgctcttgcgtaccaactatcagtgaactcgagccggcacgagatagaagggaagaacatcaacgacgacaagaggaacaacgggggatcaggtggaggcacacaggtgctgccgaccagcaatggcgagacagcaccgacgacgacgcccgccgctttcgacaccgacaccggcatgaagaagccagaaga

SEQ ID NO: 86805 - DNA, 289 bp, Zea mays
  Clone ID: MRT4577_179172C.1
gctttctttcaagctggagcttaggtttggttgttgtattcgaacatgctatgatgggtatgatgtagtagtactttcctgggtagcatgttgtatgctaccacttgccctctttcacctagctgcttgatttgctacttgtccgacctcttgtgatcctacttgacattagttctcaatccatattgattgggattgtgtggctttaaatcctaagcaagtcaaactttttatttttttttttcaatcccatctaatttatgtgtaatggaaatgagaataaccgaac

SEQ ID NO: 86806 - DNA, 881 bp, Zea mays
  Clone ID: MRT4577_179173C.1
acgatacaacaaagagtgtcttgccctcgcatttcccctcaccggcggcggctcctctcccccctccaccgtctcgtcgccccccgcgtccccgggatctcggctcgcaggcgaccatgtatcgcgccgctgggagccattttcgctctctcaagaatcatggtgctagtagatttgctagcacaagtgtagtgaagcagtcttcaggtggtctgtttagctggcttcttggcggaggctcaagccaactaccccctcttgatgttccgctcccaggcattaccattcctccacccctaccagattttgttgagcaatccaagacaaaaatcactactcttccaaatggcatcaagattgcatcagagacatcaccgggcgcggctgcatcagtgggtttgtacattgactgtggttctatttatgaaacacctgcttcatctggagcatcgcatctattggagagaatggccttcaggagcacaacaaatcggagtcacttgcggctagttcgtgaggtagaagccatcggcggaaatgtctctgcatctgcttctcgtgaacaaatgagctatacctatgacgcactgaagagttatgcaccagagatggttgaagttctcgttgacagtgtgaggaatccagcattcttagagtgggaggtcaaagagcagctccagaagataaagtctgaaatatctgaagtgtctagtaatccacaaggtctacttttggaggcacttcattcggctgggtattctggggcactggcgaaacctttgatggctacagaatctgctataaacagattggatattagtaccctggaggaattcatccatgaaaattacttgctcctcccagatggttcttgcagtatc

SEQ ID NO: 86807 - DNA, 2056 bp, Zea mays
  Clone ID: MRT4577_179174C.1
cccacgcctccatttatacgttcccataggcttgctttcataaacgggaggtttactaagatctcctgcgcgtattgctgattgactaagtgctcatatgacaagttcagctctaattactagacagacttttacagctttacacagacattatttgtaaatgagtctatgagacttacacgccagtgtatgtctattcatctcgatactaatgattgcaagcctcgaggggccgggaagaagcgcaaacaagcgggataaaagtcgcggtcccggtcgcgagccgactgcaccgcacacgtgcccggccccgccacccgcacgccatgtaacccccgtccccctcctcgagcctcccgtcgcgtgtcctgcgttgcgcttgctatttatcacccccgtcctcctccgtcccaaggcagtcgcagttcacaactgcgactaaaaaccatctttggggcccttcgccgcgatttgcttcgcttctcggactaggttaagttgccttttcgattctcagaaaaagactggctctgcactcggataattttaaaatggatagtgcacagcagcccactggggaattgaacaattcgttcgatactcttatggtttctggaggtgaccagagtcgacagcctcaggatgctggcaatgaaacgagcttcacgaattggaaagacctccccatggagctgctcctgcgtatcatttcactagttggagatgacaggatagtcattgtggcctccggtgtatgcacaggatggcgtgacaccttggggtggggggttgcaaatctttcactatcatggtgccaggaccgcatgaatgacttggtgatatcactggctcacaagttcacgaagctgcaagttctatctctacgccagatcaggcctcagctagaggacagcggcgtggaggccgtggcaaaccactgccacgacctgcgcgagctggatctcagcagaagcttcaggctgagcgaccggtccttgtacgccctggcgcacgggtgccctcagcttaccaggctcaacatcagcgggtgctccagtttcagcgacgtggcgctcgtgttcctctccagccagtgcgggaacctgagatgcctgaacctgtgcgggtgtgtgagggcggcctctgacagagcgctacaggccatcgcctgttactgtggccagctgcagtcgttgaacctgggctggtgtgatggcatcactgacaagggggtgaccagcctggcttcgggatgccctgaactcagggccgtcgacctgtgcggctgtgttcttataacagatgagagcgtggttgcgctggcgaacggctgccttcacctgcgctccctgggtctctactactgccagaacatcacggaccgcgccatgtactccctggccgccaacagccgcgtgaggagtcggggccggggctgggacgcgacagcgaagagcggcggcggtggcaaggaccgggagcgggacggactggcgagcctgaacatcagccagtgcacggcgctgaccccgcccgcggtgcaggcggtgtgcgactcgttcccggcgctgcacacgtgcccggagcggcactcgctcaacatcagcgggtgcctcagcctaacctccgtgcactgcgcctgtgcgctgcaccctcaccgggccgggcgagtcatcctctccaaccacgcctactgaacgcaatgcgtgaataggcggcgatgctcagatgtgtggataggccgttcaaccgtgagcgacggtgtccgctgtttatgtgaggtgcttgttttgtgtttaggcgtcaaggcgtgtacttggggtctctactctctagggaaccgtgtagaagcaaccgagttgagttcatcgtctgtaaaaacatggactgtatctgactatctgttgtcatgtcttttgagatctttaaaaaaaaaaaaaaaaaaaaaaaaaaaaagggaaaaggggggctctggacccccaaaaaaaaaaaaaaaaaaaaaaaaaaaaaaaaagggggggggaccatgcccgggcgaaccgctaaaaagggcgag

SEQ ID NO: 86808 - DNA, 275 bp, Zea mays
  Clone ID: MRT4577_179175C.1
gtgttgtgctagttatgcccgtcgaagccgattcgctcagcagaaatagtgcgtaaacaaataatcgaagtagaaatgcccacatccacacttagcttgttgggctatgctttcacagtctctcttccttctgactagaagtatgtataatagaacaatactacctagctaaacatttactttctcttttgcctctaaaatgtgcagactttgctgtctaaagtgtgagtcacatgagtactggggctatgtttgatattcggaatttctctaag

SEQ ID NO: 86809 - DNA, 1490 bp, Zea mays
  Clone ID: MRT4577_179176C.1
gcaaccgaaatactgtgcaataatccgtgtggatcatacatacttacatagcaaactccaagcactaacagtatattttgtttacttcagttcctatactagatgaccacatggtctttttgaatgaccttttggaaagggaagtgttttttgaccaagaaagtgttaaattcagatctttcggtgccaggaccgcatgaatgacttggtgatatcactggctcacaagttcacgaagctgcaagttctatctctacgccagatcaggcctcagctagaggacagcggcgtggaggccgtggcaaaccactgccacgacctgcgcgagctggatctcagcagaagcttcaggctgagcgaccggtccttgtacgccctggcgcacgggtgccctcagcttaccaggctcaacatcagcgggtgctccagtttcagcgacgtggcgctcgtgttcctctccagccagtgcgggaacctgagatgcctgaacctgtgcgggtgtgtgagggcggcctctgacagagcgctacaggtactttcgtttgctgcagccttggtcgcttgagctcgcgttgatccctgctgttttggtggtgtgtcctgtcctgtgtaggccatcgcctgttactgtggccagctgcagtcgttgaacctgggctggtgtgatcggacgactgacaagggggtgaccagcctggcttcgggatgccctgaactcagggccgtcgacctgtgcggctgtgttcttataacaggtgagttgctttcacgtgtgttgggggtcaaattctactagtacagaactacgctggaacttacctgacctgaccgctattttggctggcccaacgcctgttcgatcttcctgctgcagacgagagcgtggttgcgctggcgaacggctgccttcacctccgctccctgggtctctactactgccagaacatcacggaccgcgccatgtactccctggccgccaacagccgcgtgaggagtcggggccggggctgggacgcgacagcgaagagcggcggcggtggcaaggaccgggagcgggacggactggcgagcctgaacatcagccagtgcacggcgctgaccccgcccgcggtgcaggcggtgtgcgactcgttcccggcgctgcacacgtgcccggagcggcactcgctcaacatcagcgggtgcctcagcctaacctccgtgcactgcgcctgtgcgctgcaccctcaccgggccgggcgagtcatcctctccaaccacgcctactgaacgcaatgcgtgaataggcggcgatgctcagatgtgtggataggccgttcaaccgtgagcgacggtgtccgctgtttatgtgaggtgcttgttttgtgtttatcgtctgtaaaaacatggactgtatctgactatctgttgtcatgtcttttgagatctttagcctggacaatagagcagcgcagcgacggcgatagccactcctttggtgggggctctcg

SEQ ID NO: 86810 - DNA, 536 bp, Zea mays
  Clone ID: MRT4577_179177C.1
ggggggggggggttttttttttttttttttttttttttttttttttttttttttttttttttttttttttttttttttttttttttttttttttttttttttttttccccgggggaaatcccccaagattttttaataaaatcctttttgggggggggggcccggggaaaccattttttaaccagggggccccaaaacaaaacccaggggaccaagggtttccctttaaaaaaaccaagggggccgaaaaccccataggggcagggatctgaaaaaaaacccggtaacaacggggggttttaaattcagaaaaccgataaagcaaaccccccgggggtttaaaatttttaaaaaaaattttttttggggggctttttcggcttgggaaaaaaaatttggaataacataaggacccaaatctttgaaatcctcaaggcgcacgggcccccccgtttttatccgggcttggggacaacctaactttgataaaaaaggggccctgggcctgacttttgggcccccccccaatttttaaa

SEQ ID NO: 86811 - DNA, 318 bp, Zea mays
  Clone ID: MRT4577_179178C.1
aaaaaggggccgacacacgcgtccggcgcgagcatttaatgttctctcggattagtggaactacgcgtggctcagctgataccagtgggggaaaccaacgagctaccgccgccacccttggactcgccgaccaacatgatgccgattcagaccatgatggaatgcgcaggctccattcacccgaccaactagcagttcctccataacaactactgcgaacacttaaatgcatcctgctttcatgcggcagcacttgcattcattgactatcttgttatggtcggatataccttcatgcttacaacacctattgatcct

SEQ ID NO: 86812 - DNA, 380 bp, Zea mays
  Clone ID: MRT4577_179179C.1
aaaataaatataactttattattggtgaagcatttacgattttaaacatttctagatgagtttggtgtacgagtggagaaaaacaaatcttgtacacaaggttttaggattaaaacaaaatattaaaaatgaaaatcaatcaaaataacgattttaatcaaataattattaataataattatgtccaagttcaattaaaatgcaataaaaaattgtccaaaataaaatacaaaaaatgtacaatttcatgcaaaaaaatatagtttgttttcaaacaaagaaacaaaaaacaattaattataatataaaaacgcaaagaaaaagaggaaaataccatttaaaatagttttcatacaaattgataaatatatatttataat

SEQ ID NO: 86813 - DNA, 580 bp, Zea mays
  Clone ID: MRT4577_17917C.1
actggcctcgctccgccgcctagtccctcacacggcgccgcttctgacaccccgatctatatacgcacactcgcagtaggagagcttctgcatcccctgagcgcgagagatcggcggttaaggtcgacgggccggcgatcgaatatctacctcggaacgatctactcgtgcgactgtgtgtggcaggacgaccggatcgagatcatcgccaatgacgagggcaaccgcaccacggcgtcgaacgtcaccttcaccgactcggagcgtctcgtcgtcgacaccgccgataaccaggtggccatgaaccccatcatcgccggctacggtgccaagcgactcattggccgtatgctcactgatgctactgtccagagagatattaagctgtggcccttcaaggttgttgctggacctgatgacgatcccatgatccatgtgcagtacaagggtgaggagaagcagtttgcagctgaggagatatcttctatggtcctcatcgagatgcgtgagattgcagaagctttccttggcaccactgtgaaaaatgctgctgtccctgtacctgcatacttcaatgact

SEQ ID NO: 86814 - DNA, 369 bp, Zea mays
  Clone ID: MRT4577_179180C.1
gcgcatgaacaccagagctttattgactcggaggaccagtgcgcaacgcaacgacccgtcgtcggatgccccaccggcccaggccgcaaacattagcccgagaccaggaccccgacccgggtacgtaacttggttgccagccaattaagggaccaggagggaccaacaccacaccacaccagcgacgtgcactaatagactgtgacccgtccatgaatggactggaactggactggactggaccatcttcaagtggcgctccatctaattcttgaagagggagtcctccagggcctggaacctcttggtggcgggcttcttgatgacatccgggtcaagcacctggtcgttgggcttgtcgaactccat

SEQ ID NO: 86815 - DNA, 177 bp, Zea mays
  Clone ID: MRT4577_179181C.1
ggtcattgtaatgttgcgcgtatattcagttcttgcccgcgatgaaaggacaagcgatagggggccacgcattctgtatgacgcacagacgatcctgacatatgcagatcttaactctgaagttcctacgaaagaaagcgctgaaatcatagactacctgaaggcaacatatacggt

SEQ ID NO: 86816 - DNA, 186 bp, Zea mays
  Clone ID: MRT4577_179183C.1
aatatataacacctgttttaagctcggaccgcgtgggttcgtctccgggtaattctcggaaacggtaacctgcaggcgaaacacagggtcccccgatggggagccggaaaaaagcggggggaaaccaggggcaaaccagtttcccgggggaaaagggtaaccgcagacaaggccaaacaagagaaa

SEQ ID NO: 86817 - DNA, 307 bp, Zea mays
  Clone ID: MRT4577_179184C.1
gcaacaacagatcataccagcactgaaagaactagatgaagtgaaccctgtatactacttgcaacagcaagtgcttgcatacaacaacactagtacaggcaaacgtagctgcaaaccaacaacaacaacaaatgcaacagtttcagatagtaacaagctaactaaacaaggtgaaccctagacgctaactacaacaacaacaaatgcttataactagccctaacatagtgggaaatgcacctaaatacaagcaacaacaaacgatgaaacagatagaacaactatgaataagatagatgtggaaaac

SEQ ID NO: 86818 - DNA, 265 bp, Zea mays
  unsure (1)..(265): unsure at all n locations
  Clone ID: MRT4577_179185C.1
ggggaacctccccgacccccgaggccgntcgntcggtgcctgcgcagcagcgccggctgcgggagctggtcggcgcgcgcaacaatggccaaggccgtgccctcgccgctcgcgctcgcgctcgcggccgtggccgtggcggcgctgctccacctgtgccgtgccgacgagagccgcagcctccccacgctcgaagactgcggcgccgccgccggaggagggggcaacgactcccanaccctaccggacgcgcggcccgtcgcgt

SEQ ID NO: 86819 - DNA, 413 bp, Zea mays
  Clone ID: MRT4577_179186C.1
actaggactagaccgagctctccgactggtacgtagtgatcaagctcatctactacgcattccgacgatagcagaggcataggaccaacacagggccttccacaacaatgatgccggtgccaccatagacggtagatgtcacgccggcggcaggacggacctataatgtactgcaggcgaactatttgtgaagatgctactcctgaactggttagagattgatgctgcgatgaagatggctgattaaagggggatcccatgcttgagaactggcaattttggggagaattcccctcaaatgggagctacaagggtccactggataaaaaagtgccagatgcttagcagtgaccgggaatacatcggtgctggacgcatatgggaatctgggaagacttactattggggtacta

SEQ ID NO: 86820 - DNA, 354 bp, Zea mays
  Clone ID: MRT4577_179187C.1
cccacgcgtccgatcaaaccctagccttctcctgcaagtaacagagctcaggagatggctccattgagagttagacggggaccttcttatttcaagctgacatcaaccatctgatcttactcatcatcaacaccttctactccaacatcgagatcttcctacacgagcttatctccaactcttacgatgctctgtacaatatcacgttcgagagtctcactgactagagcaagctcgatgctcagtctgagcttttcatccaccttgtcccatacaatgccacgaacactctctccatcatcgacaacggcttcagcatgaccaagtactaccttgtcaacaacctcggtacca

SEQ ID NO: 86821 - DNA, 427 bp, Zea mays
  Clone ID: MRT4577_179188C.1
gaacataatgagcaccggcgattattgcaagaaatcgatttattcccgggacaaactccggcgggggccggcgcccacacacgaacaaaagatctttgtccacccctccctgctttccctcacgacttgaacacaaaacactctcacaacccccggagggggagggggctgcactctactcaactacacaaaaaacttatacctccctttacactctgcccccctcctctacacccaaaagagagcccagcactatcccttgctccgttccaagtcccaacccctggatcaacactcaatcgttggcttgcgaacagtacacgcccgtgccggcgcggggaggtccctacttggactggaggtctcgcgctccaacgatcgatcgaaccgacctatagaaaagcttctgtggggtcggatcattggg

SEQ ID NO: 86822 - DNA, 262 bp, Zea mays
  Clone ID: MRT4577_179189C.1
cggacgcgtggggagtcatttttggcatgctcatcgccctgccgatcacgctcgtctactgcatcctactcggcctgtgaccgtctcatccccaattccccatggaggacgccacccactgcattgctgcaactgtaaagaccactgctgccgtcacttcccgttcatgggagacatggccagcaaggacgggagatagaactgctaccacattggccgtcgcttgcagactagtggcgtgtactatctctctctatctatc

SEQ ID NO: 86823 - DNA, 429 bp, Zea mays
  Clone ID: MRT4577_17918C.1
tcaacgcctaccaaattgcttcaacaaatggtcccacctctgcctcacctgccttcgccaaacgggggggcctattaacatcaggtgcttcattctaaccaactgcctggaccaaactttgtttcgaacttacaccaccaccaccagtgcctaatcccattgcaaactgttaacccatggttcgatacctttctgcaacagcaacaacaattgcttgcatacaacccgttttttttgatgaacccttcctttcaacaacccattgttgaagggcccaacttttaaattacctttgacatttacttcacaatggggccctttttccgaccttgtgttcctaaaaaaaatcaattatttgattggaattaattctcattaaaaaaaaaaataatttcaattccattccattcatttgtattggttattaac

SEQ ID NO: 86824 - DNA, 167 bp, Zea mays
  Clone ID: MRT4577_179190C.1
gagggatactccagatgattccgagtttatcgctatcgacgaggcctgtatcgctctgcattgttaatctccttatttatactagtctactccggattacgaagatgtattcaataatcccgattgtggttgtcatatcgccgtcaatgagaccgttgactcacgtt

SEQ ID NO: 86825 - DNA, 755 bp, Zea mays
  Clone ID: MRT4577_179191C.1
acctcgaggccggccgggaccgctttccgatccgggcgttcttatgctggaatgacgcctctcgcgctcccgtagcgtcgtcctcccgccctgtattcctcttcgcctcccttgcctcctcatcatcccgagctcgacctgactccttccttcgctatggcacctattatccaccatgattttccccatgacaggcatgagtagcaactgtaccacgaataacgaaggtcttggtgcgactagcaccaggagtccagatgctcttaagacagcctacatatgatctgcgataaagaccatactgctaacggtgaagatcctgtgaaaattagcgagatgactcaagcttgtgatggtcttatggatccgatagaacagcggagatgtatgtgctgattgcagaagatggctctatcctccgaatgtactggatcgagatcagacgctttccagtataccgttttcacattcttgatcaactttttccggaatctaacagccttgaaatgggatgctccactggacacagacaaaactgtggctgaaatgtaaatgatactatggctgcttactgacacgctctgtaccatgcgacgaccgagaatgtatacttatcgcacttttgttggagctccatttgcaaggaaaccagcatactatagagcggtcattcgacatgctgtgctgtgtctcgccgctgctcatgtgactctcacagaactgaagtgcactgtcatgcttgacataatttctgt

SEQ ID NO: 86826 - DNA, 511 bp, Zea mays
  Clone ID: MRT4577_179192C.1
gaccgactgacacagtactcttagagactgccttatttgtacaggacagaggatatcgctctcctatgtgatatcactaggccaatcgcaacctagatgacaggattcattgtgcgacacgaaatggatccaagagatctgcatgactaagagtcaactcggtacgtagcactcatgtctgcagctgaaaaacactataggatgaaaacatcgcatgttcagtgaaacacgaggcaattagaccacttatgagggcctgtactatcagcaagcataacatctagtcaacagtaggatatctgaatcgctgcagccgatgataagagccgcttgttgagaaacctgactagcaacaagatatgatgtcgcaatcaaaaatcgctaagatatggaaataaactgcaatgctatggtctaatctagaaaaacagaaagaagaactacatgagcgtcctacagcacttcaaaaataagttgatgatttgagggacctactgaacagggtgatgaa

SEQ ID NO: 86827 - DNA, 1241 bp, Zea mays
  unsure (1)..(1241): unsure at all n locations
  Clone ID: MRT4577_179193C.1
gcgccccgttccctcccgactnctgtgcttgacccggctcgttaatggcgtaagcagtagggtaggagcaccggttccgtcgccgccaaggtggcgcgcaccgatccctcacgaactccccgcacgaagctttttttcttttgagctttttccttttttttcccccccttttttagcaaacaaaaaccattccacggaatctgatatctaagattcagttttgacagatcagcaaataaaaccgttcaaggcatatacataagacacaactctggatcaggctctctggaacctagtgtgactgtgtgaggcacaagggccatcacatggtacattacacagggcaaaaaaaagtttcaccaacgtacagtttacagggtactccatctaaatattggccacgctaactagttatcagtcgaaatgttgtcgaagagccatctcggtttcgctcttccaggacgcatgcgacgattggcccctcatcctcttgatcttctccttgtctttgacagtggaacccttcttcttttcgggctcttttgtcagcgccggtctatcaccacattgagggcaaaccatacccttgccatgtgagtaggtctttggtacaccacattggagacacatcctcagaagatcagctgcatcttctggaccaggatttgcggcacctattattctttttccatcaacagaaccagatgtcactgaacctggagggttggctccaattgtggtaaccaactgcggttttgccaccacaacagctcctggaggcggcagcttgctcccctctttcccacggcgatcgagtacaccgagggcctccgtcccttcctcaggctccgcaaccctgtgcctcaagaactccggtggtcccgagatatcggagaaggcctccagagcggagggcagacaggagtccccgtcgccgccgccggcatctcccttcttacggtttggtcggcggcggggcttgaaggccgacttcggaggagcggacccctcgtcgccgtccgatccggcttcctcggctgacgaatcagcggactcgcttagctcggcgccggcgccggcggcggggccgtcctcctcctcggcggaggagtagccctcgagaagtgctaagctcattgacgccgcgtgggctcgagtcttttctaacagtagatttgctggattaataaaggtgtcaacgggcttagtgtttgatcattatcgggccttaaaaagaacgc

SEQ ID NO: 86828 - DNA, 278 bp, Zea mays
  unsure (1)..(278): unsure at all n locations
  Clone ID: MRT4577_179194C.1
ggtgaacctcaagaatgctatgaatgctaaatttgatacgcgatgagaaataacacttgacatctagttgttgctgatgagaccaagaatgttattaactgcaagtagagatgacaatggggccctgatttacgactccccgttgggaattcttccattaggggatgaggatggggatggggaagtttctccccccacggggatgtaaacgggaaaatttttccactcgacgggtncttttagatggggacggggaagtaaccccatccccgttcccc

SEQ ID NO: 86829 - DNA, 327 bp, Zea mays
  Clone ID: MRT4577_179195C.1
gggttcctctggggttttccgcctttttttttttccggggggggggccccccccgttttttttcccttcccctggccctgggctcaatcgtttttaaaaaaccggggccctatttgggcagaaaacctgggttaacccttttgccttggggccccctacccaaaaagggggcccctttttggccccccttttggggcgaggcaatccctgggaatggttttagctcccggggttttgcccttttttccttggggcttttttttggggaaccccagcttttttccccccaggggggccccctctggttggcccccctggccagggggg

SEQ ID NO: 86830 - DNA, 222 bp, Zea mays
  Clone ID: MRT4577_179196C.1
gctaaataccaacatcctggacatacggaggtgcagagcccatatgaccttgctactttctgtggtttgttataaccgaaattgtgatttactgagtggtgatctcctcatcaatgcactttttgtactgacgaattcgtaataaaaaggggaagagcatacgatcatatatctgtacatgtggtgagagctcacattaagtgtatgattttcctgaatata

SEQ ID NO: 86831 - DNA, 694 bp, Zea mays
  Clone ID: MRT4577_179197C.1
cctcgaggccggccgggatgaagtcgggcccacctcggccttccctttcctccagccgcacgggcacgcgcccagcgcgccgccgccacaggcagccgaaccggccgcgcccctcacctcctcgtcctttccccttccctcagaagtggagcactagcatcgttctctctcccttcctcttccccacttcctctccccattcactccgagggaaacggccggcgccactaatggcagccgccaacctctcccttcccggatttctctctccctctcctttctctctataaatatcgagcgccgagcccccatgggccatggatccgttccccggccacccaagctcgccccacgtcatctcctctctcgctgctcccgccgacgccctgctcaccaacgaccggagccgctggagcaccatcgccatcgaggaccactaaagcgccgccgttgaggaccgcccggagcacgccaactacctccctttcttctagccgtgcccctgctccctggctggccccctgctcttcgatttcgtccctctgcaagaactagtggagcaaggttgaagatgacacaaattttgttctattttataaactatgtttaatttagtttagatctcctgcagcgatttggtgtttaaatttgtatatatatcttgaaattgaaatcatgagaatattgaatgctt

SEQ ID NO: 86832 - DNA, 2647 bp, Zea mays
  Clone ID: MRT4577_179198C.1
ccggccggattagaatggaagtcaacccattgataccaaatttcgagctaagtcgctggaagacgaagaaactgaggccttaatgcgtcaatttgggctaaatgagaagtccttccaatcttctcctcctgaaagtagaagtgggtttggtagccccattaacctcccacctgagcaacccctggagctaccaccattggctgaaggtttaggtccatttattcagaccaaagatggaggatttctgcgatcaatgaacccagccctgttcaaaaatgcacaaaacagctgcagcttggttatgcaggcttcttctccgattgtactgccagcggagatgggatctgggattatggatgtattgcatggtctggcatcagttggaattgagaagttatcaatgcaggcaaacaagcttatgcccttggaagatgttaatggtaaaatgatgcagcagattgcctgggaggctgctccagctctggagtctgctgaaagatatgatgcattggactatcatggcatcgatgctttggtaggagggggtggaaatgctccttctggtaagaagacaggtagatgtgctgatctttcatccttgggtggggagaatgcttcggaatatgtttcacttgaggaccttgcaccattagctatggaaaagattgaagccctgtccattgagggtttgaggatacagtctggcatgtcagaagaagaggcaccctccaatatcagtgcgaagcctattggggaattttcatctctgcaaggaaagtgtgcagagaatacctggtcccttggtttagagggaactgcaggtttgcagcttatggatgttaagcaaagcggagaagttgatggattaatgggcttatccatcactctagatgagtggatgaggcttgattctggggtagtggacgaagaagaacagtacagtgaccggacatcgaagatacttgctgctcaccatgcaaaatccatggagttagttgctgaaaaccggaatggagatagaaagagcaggagatctggtagatggggcttgttagggaataacttcacggtcgctctcatggttcaactgcgtgacccactacgtaactacgagccagtgggcacaccaatgttcgcgttaattcaagttgaaagggtttttgtacccccgaagcccaaaatctacagtaccgtctcagacaaaggcaacagcgagcaggatgacgaggaacccaaggccgaagaggttccagacaaggcattggtcacggaagagaaggctgaggaattagaggatcccgttccccaattcaaggttacagaagtgcatgtcgccggtttcaagagcgagcctgagaagacgaaaccatggggcaatcaaacgcagcagcagtccggctctagatggttgctcgcagctggcatgggcaagggaaacaagcatcctctgatgaaatccaaagctgtcgtgaagccaaccaaagaggcagctggccaggcaggagacaccctctggagcatctcttcacgtgttcatggagccgggaccaggtggtccgagctagcaggaaacaagagccattcacggaacccaaatatcatgcttcaaaaggacaagaggtttcggtgatggcttggtgtttcggtagttagcacggggaaggttggtctatctcgttagaagggtacttatctgcaattggacctcactgggaatgttcagcggatttgtgaaatcatgtacattgagttctcttgcctaggatcagtagttttttatacgctgcatagtttgtgttcggtgttccttccgaattctagtgagaaactggtgtccctccctcttgtcaccattattggcttagagcggcttctgcctctgaaggtgcagcactgtcttcttttgcaggctgccatagctatcatacatatcttgttatcttgctaatcattcgtccatagtttttagtgccatcttattatatatcagtttctgatctcagtgctcaaagttaccatgaaaatgtttttcatcgctcacagttcgtgatcggtgttccttccgaactctcgtgagaaccgtgcatagaaactgttgtttcttttgccacatttaagagcagcttctgcctctgaagatttgcagcgttggatcttggagctttctgggcagaggtcagtgcggcagcgttaacgccccgtggctgtgatgattctatctacgagggtccccatgatccataaaaagcttcgttggttggacgcaagctttgtttaaggaatttgcgggtcgtgtctcgatcgacagctcatcaaaccatcattgggcacagggacaaaaaaaaaaatggatggaatctgttctcgtgatagcctcccccgtctcgttttacacttctactcatgcatgccatttcgtccggctttgtcgcaagcccagctgccgagatcaaactagggctggaaacgagtcgagctcggctcggtgtggctcggtgtggctcggtgcctgaacgagctcggctcggctcgtccattccacgagccggtgaaaaaggctcggctcgcgagccatattttggtgcttttcgttgcattatttggtgaattaacattatataaatttgaaatatagaatcccccttct

SEQ ID NO: 86833 - DNA, 480 bp, Zea mays
  Clone ID: MRT4577_179199C.1
tcgacccaagcctctacactaatccatcacaccttcctgcccactcactcctgcacgctcacacgcttaagaacactgttccccgtcaccttcgtttccttgaaccacagccgcctgcctgcctccctctctgtccctcaaggctcacacattaattccctctttgcgttcacttctcccacactcgcctcgatcgatcacacggctcgtgcaacagcttcttcaaaccttgtcactttaacctcggctcaccccaaattttccggctactgcacaccagcgatggcgtcctcaaccgctctctcctcatcgtcaccccccgttctggcggctctggcccgtgttctcgcccagatcttgacccgctccaatatctcaaagtcgctgggggtttacatcctctacctattgatcaaatatcgcaataccgccttttgggttcgtccccgttctgaaatcactgggccatggagcgtgccc

SEQ ID NO: 86834 - DNA, 533 bp, Zea mays
  unsure (1)..(533): unsure at all n locations
  Clone ID: MRT4577_17919C.1
ccgctccagctccagctcgtctctctcctcgcctcgcgtagggnttcgcttcccggctcgccgccgtcagcatgggggacanctncgatgacgaaggggtgccggtcgtggccttgttgttcgttttccctcccctgtgcattagtcgtgcgagggagctgggtgacgaccttgtcggcggtggtgattgtaccttgtgtccgtttttcgttctctcttcattttttcttctgttgggttggtttcttctttttgccctgtttgcgtttttttgtgtatggtctgtttttgtttgttgtttgttttttgttttttttgttttttttgttttgttggtttttgtttttttcttttttgttttttttttttttttttttgtttttttttgtnttttttttttttttgtttttttttggttggtgtttgttttttttttttgttttttgtttttttttgttgttttgttttttttttttttttttttttgttttttttttgtttttttgtgttttttttttttggttttttttttt

SEQ ID NO: 86835 - DNA, 549 bp, Zea mays
  Clone ID: MRT4577_1791C.1
tccctcccactctgctataccatcatctcaactcccaaccatcgccagccggttctttcaaccagggctagcatggcgacaaacagaccgtgggcaccctcgagcaggcctttctgatagggaataaggtgatcgagcgcgccgaccttaacatactctcgagacccccagaatacaccgacaacgcccgcattcggccctgctttcccacctgacagatgtgctaaacaagggcgccatacgtgatactcgccacccacctggggctgtgcaaaaggggtcaccctatagttcagctggaaacctgtagggccacgcttgtctgagctccttcgagctgaactagtgatggcacactgattgcattggtgaggaagctgagaaactgtctgcctctttgacaaaaggtggcactctgctactagagaatgttagattctacagagaggaagagcagaacgaacctgagtttgctaagaagctagcatctgctgctgacctttatgtcaatgatgcttttggcacggcacacagagctcatgcttcaac

SEQ ID NO: 86836 - DNA, 608 bp, Zea mays
  Clone ID: MRT4577_179200C.1
actcccatctgacacttacgctgtcgcacgttccaatcacacagctctaccctctccttccaccgtcaatgtcatattacgcgtcggcctccatccaccatactgcacctaactagagccgaggcatagtgcttggctaaagatcttgaaccgaggtcatgggttgctatcttccgcgcgaagcaaaatcgccgaaggatggcaggccatctacagacattacatagtacttttgtcccgatctgcagggaggtttgctgcgccgacgaaagcacctgctgtttggcgacgctacggctgcgcatcctcgccgactgcagaggctaatcgcatgaacactggtactgctaccaccgcgacgatgacatatccgccggctgacggatactactgaagcatgatatagccttatactattggggcttcctgtagcggctctctgtgggcatgatgggctaccgcctctcaagcggaaacgtggaatactcgcactgcgtggttcgccgagacatgctcctgatatatggactatgctctaagatctcaaacgtgggtggctcccagtagacctcgctctaccgacctgaatctgacagtgatatttgatc

SEQ ID NO: 86837 - DNA, 343 bp, Zea mays
  Clone ID: MRT4577_179201C.1
cctcgaggccggccgggacaaccatcgatattttatcactgtatcgcactcactccaccgctgcccacttcttgtttgtattgtatccatagtcaagaggaagactacagggtcaatcgaggaaaggcaagacatacccttgcgtcgtcgcccaagtctcgctgctagtggccatggtcaccggatactggatcgagactctgacctcgacgccacctggggccataccaagatccatgagtactccgccacagaactccatatccagcgactccttcgacacacggctctacagcttcaacaccccgaatccaagggaggggaccctgaagacaattctcgc

SEQ ID NO: 86838 - DNA, 181 bp, Zea mays
  Clone ID: MRT4577_179202C.1
acatacatgcgccacaagagatagttatggtgcaccagagggattatgacaggggattacacttactttcccgactggacatgccgcgagaaaaaacaaccggaagtttaaccatgagattaacacgttcgtttacttatgaatcacaacacaggcgccatgggcgaagcctaaaaagcca

SEQ ID NO: 86839 - DNA, 505 bp, Zea mays
  Clone ID: MRT4577_179203C.1
atcccaaaaaaacatgcttattgtgaaacaaagggggtgaccacatattgctgccaacctaccttagccatacggggccaacccgggggaccccctaaagctgacatcttacctaacgacaaagttccataacgggggctcggcgggggtgcacctcctaacaaccaaacaatttccacaaaaatgggagggtttgggtgcttcacataaaaaccaaaccaaccccacaagccggggataattataaagaactcccgcataatcctacatgccccaaaatcccttcttacaaaataaaaaatccccccttttgccccagggcttccggtgacgccgcccactataaaaaattcccccgtttgagcaccttcttacagaggggggggacgctttcccagttttttccgcaaaacagagggaaaacaacttggggagagggactacaagcggcttctgctgcacaaagtttttgcacccatagaaccccgccccaagggcctttccg

SEQ ID NO: 86840 - DNA, 515 bp, Zea mays
  Clone ID: MRT4577_179204C.1
cggacgggaggggcgggccgaccaaggaagaccggaccgggcccgggagccagcccaccttaccggaaggggagtcaaaccaaggcgtgaccaaggcaagagcggaggggggggggaaatggaaatgcgatcccatcacaacacaacaaaagaaacgagagggaaacgtaaaaagccagggcggccaaacgaaagaagtaacccaaattaaatgaattgcgctgaccgaacggtccgcattcgagaaaccaaacctgccagcccaattaaagaaaagaacaacccaacgcgagaggagaggggggtatcggactccacgccagggaggtttttcaccagacaaacgggaaagacaagattggattgcacctcacggcccggacaaaagagagttaagccaaccaggccagtttgccctaccacgggaaaaaaaaatccgatgggagggaacggaacgaaagaacataacaagacctgggtatggaattgtcccaccaccacaaaagagagaacca

SEQ ID NO: 86841 - DNA, 811 bp, Zea mays
  unsure (1)..(811): unsure at all n locations
  Clone ID: MRT4577_179205C.1
caccacataaccaccaccagctagcagcagcagtttcctagtgagcttaccgccgctgctagtgcctgacaactgtcgtgtgctgtgctagctccgagaagcttagcgcgagccaaagccaagaggaagcttcggccggccgggtgatcgagatcgccggaatgggagccagcctgtcttgcttcggctcgggagctggcgggtactactacgccgacgagccggggtacgagcagccgcggcggtcgtccaggaaggtgcggccgagcgacgaggacgggctgtggtacgttggcgagcgcgacgtcgacatgaaggcgtcggcgttcatcgccaggttccatgcgtccgcgtcctcgtccgcgtccgcgagctagtttcgtggagggtggaggcctgtggttccatgcatgcccatcaccatgtgaacctttggtctattagctatcgtctgggcctctgtcaggctctcatgcatgtctctctattctagctaatcgatctctagtctctagctagcgctagcttctctgcttccccagttgatgactagttggctagtactactctacttgggctcatttcccattaattagcacgtgcttgacgatataattataagccccgtgcatgtcagtagacctgttcctcctaaataaaggcaatgctggaccagcttgtggttttcaaattaagtaaaaaaaaaagctagctatagtgtgttaaaaaaaaaattgtgaattggagagagctttgttgcaaatctaaaaaaaaaaaaaaaaaaaagaaaaaaaaaanaananaagcggcc

SEQ ID NO: 86842 - DNA, 462 bp, Zea mays
  Clone ID: MRT4577_179206C.1
aaaaaaaaaaagccccggccggaatggctacttttccttttgggcccagtttattttcccctttttacaaaagcctcccaatttacccaaggttttaccacctacccataacccaagtcccgacaacctaaagggggcccccccccatacccagacaaacccacccctttgttttgaagaaaaaaaagttccctacaggtttttttataccgtttttaaaaacgcctaataaaagggaaccttttaagccccctactcatggttaatcctacaggccagggggataaaaaagaaacaccggccccccctaggggggggggctggcattgcccccgtaaaaatgggagcccgagtcgaaatcgttggataaaaacaagccatttcctgacccctttgagctgttggcaccccccgggaaatccctttggatctccactggcgggaaattaactgggggaattt

SEQ ID NO: 86843 - DNA, 436 bp, Zea mays
  Clone ID: MRT4577_179207C.1
aaactttggccagctgcctgcgcccgcccaactaccccgcgcgcggcagccgtcaacaggtcgagcgatggaccacgacaccacggtcggatcgcggcagcgccagcagcagactgcctcgccagcggcggctgattccagggccatgatggcggaccttgacgcgccactgcacgccctcggattcgagatggacgaactatccccgtcgaggcttaccggacggctgcccatcactcccatctgctgccagccgttcaaggtgctgcacggcagcgtgtcggcactggcggcggatgcgctggcgagcatgtgcgcgcacatggtgtacgggtaccgacgcgtcgccggcatgcaactcagcatcaaccacttccgcagcgccgccctcagcgacaccgtcctagcgcaagccgtccacgttcacgtcggacgc

SEQ ID NO: 86844 - DNA, 559 bp, Zea mays
  Clone ID: MRT4577_179208C.1
tcgagcggccgcccgggcaggtacaagctttttttttttttttttttttttttttttattttttttttttttttttttttttttttttttttttttttttttttatttataaatttttatttttttttttttttaaaaataaaaaaaaaaatgacctttccccaaggggggctttgtaaacagacgtaaaaggagggaaaagaaactaagggaaaacaatggaaaaaaacaaactgggggcccacccaaagaaaaaaaagcaggacacaagctaaggggaaattcgaacccaatggcgggccaaactaggggaaacaaaccccggaccaaaattggggtaaaaaagggcaaaccggttacctgggcaaaagagttacccccccaaaattcaaaagagcaaaacaggggggcccaaaaagagaaaaaactggggggccaaaggaaggaattaattcacaaaaactgggggggcaacacggcgagagatccagtcgaaaaaactggccaaccaactggcataaggaattggccaacccgcggggagaggcggactgggtaa

SEQ ID NO: 86845 - DNA, 295 bp, Zea mays
  Clone ID: MRT4577_179209C.1
gccacgcgtttgcggacgggaggatggatacaacaagcaagttggaggggaagtggtgatataagaggtggaagggggaataaaagcgtaaaaacctgtcatatgggatggtaaaatccaacagaaaaaggattgcataataccctctatttttgttgatcaaaaagagaaaatcccccaaggagggggtctggtttgagtaacttaatagggagagctatatcttaccaaggctataataaatagctggtcttagaggatgataaggattactgggaatgagatactgcctata

SEQ ID NO: 86846 - DNA, 429 bp, Zea mays
  unsure (1)..(429): unsure at all n locations
  Clone ID: MRT4577_17920C.1
agacaaggcctgtctcttgtttgattatagccggntcgactagttctcgaacaagagcagctacggtggacctacgcacatcggtccctgttgacctaatacgcttatcctagatgacggtgaaattacctgttcgaggtatcattgatcttaacaatcgccgggctagactccagtgctacttcgacccgcgtactacgtactgacgtcctctactgttgcttcactgttgttggggcctagatcggatcagatcaactcttaattgcgccataactttttagacagatcatgcagcttgtaaatcatacacagatggactacctgatggaaaaggtgagcgcctgacaagagcgcctgaatatcaccgagacggaagatattaataatatgacggaaccaatgagatacctgatctttaagatgaat

SEQ ID NO: 86847 - DNA, 150 bp, Zea mays
  Clone ID: MRT4577_179210C.1
gcgtgcggctagtaccaaggaagcgtcagagatggctcgtaccaagcacactgctcagaagtgcatgggaggcaaggctccgaggaagcagcttgccagcatggctagcccgtaagctctgcccccaccattgggggctgtgaagaagcc

SEQ ID NO: 86848 - DNA, 324 bp, Zea mays
  Clone ID: MRT4577_179211C.1
cgattaactatttcccccggctaagaaagggcggatcaaatccggccatcaatagggcaaagacgtcccgagctaccaactgaataaatatggggcccccagcacgccctcaggtaaaccacaggaaagcccccacgagcttgcagaaacaatatacatgaggggaaaagccgccaataacggagaacccccacccgcttggcagagtattgcctaacaaagtccaggtctggccgaatcacccacatacctacgcgggcttcaaacgagcaagctgattcataggggaaacctaaactgaacttcctggccccagtttcagaa

SEQ ID NO: 86849 - DNA, 285 bp, Zea mays
  Clone ID: MRT4577_179212C.1
ccttaaatactcaccttcataaccaagaacactgtgccagacgtatattaagaacacgagatggttcatccaatactacatttcactgaggacgcgcccactctatactggatacttgttggacacttgatactagtattggatatatagagaaactacaacgtgagtaacacacctaacgataaattcgggaagcgatgagctgtagcgccacacgaatctctaagcatgtacaccagttttaggaagcaagggggatgccttctgatgcgagctgagagatgc

SEQ ID NO: 86850 - DNA, 358 bp, Zea mays
  Clone ID: MRT4577_179213C.1
ttttggatttcatattggaccttgcgacggctagaagcacgatcttgcccctaagattcacttatgatatagcccgtgggggggaacaaggttcatggttccatattccatgcctgccgatgcatgggtctgccgaaaccgcggatgaacacggcacttgctactgacacacagcgaccttgcctggaaaaacactgttgggctacttccaacacggctcgtacgtatatacaccctctggcctatgggctacatgacgggtgcgaacaggatagctcggtcgcgcgggccccaccggtcttgttctccccatcccatcagtattgacgtttgcggcgcccctgttgccaacgacgca

SEQ ID NO: 86851 - DNA, 318 bp, Zea mays
  Clone ID: MRT4577_179214C.1
gtatagttatgttttttgagcaaaccatatgattttgccatcatgatgatcttaacacgtactttacaaaaagactttttaacaacagttagtctcgcagacatcacaaaacaccaattagggccatttatatttattttacgaatgaaaggttttaaattataagagaatacacagtatgcagtctattttagtgttgtttcatgattgtaccccgatttgtagacaccttgctaaaatttggcggacccacgaaagttaatcttgccgtaggaatttttgatccaatttttacaattggagaatttaattctgtgc

SEQ ID NO: 86852 - DNA, 156 bp, Zea mays
  Clone ID: MRT4577_179215C.1
ttattcttaccatccccccggtgctccttttttggggttctccttactaagccgggggggaaccccttcacagtcgtaaaatggttaaacaggaggcccaatcgttggttaaggaaccacccccagttttgggggagcctatggacttgaggactg

SEQ ID NO: 86853 - DNA, 294 bp, Zea mays
  Clone ID: MRT4577_179216C.1
ccgccgccggcttcccatttgctcccccgcgcagctcgcaggcaaggagggggttcgatccaatctttctttccacttcctcctgagtcctgaactaccaacgcggctgtaaatctctgccatcgccgtccgcgttcttcctcatcgcaacatcgtgcccctccgcaatatttgcccagtgggttctaaggtcaaagaccagagtaaaaaataaaggtgggttaccattaatatttcatacaatggagtccttgtggaagctgtcctatttgcttgagtcggcgtcacttgccc

SEQ ID NO: 86854 - DNA, 318 bp, Zea mays
  Clone ID: MRT4577_179217C.1
gacagaaattgcgattgcacataacacaaaaatcagctaataatcaagaaagcaaacaggaaaagccaaaagaaaaacgtacgtctagacaacaggatggaagaatcaaagcccacttcaccgcacaccggagctagctagagcctggtacaccagagtggtaagcggccggggccggccggccacggagaggatctcctcgccacacgacgacacctatgatatatctaggctaggggctgcagggcttggggaactggtagccaacgtacttggccctggcgttctcgcacttggccgatgtggcaccctggccct

SEQ ID NO: 86855 - DNA, 587 bp, Zea mays
  Clone ID: MRT4577_179218C.1
gaaaagagtaatttacaaactcaaaactaaagcagcagccgacaaatagccattgagaagaatgattcatggtttccctgtacactacatgtacatatagcaagtttaccaaaagagctcaacttgaaaatttcattgacagtcagtcccttggtattaattggccaaccactgacagcacatagtttgcttaattattagccataacttaccatgctagtctacaatttgattctacaacaaattgtgtagccaagaattatcagcgttgatatctttgtgcagcaaagaagccagcaggaaaccttgggtgtgcggtgctcctggtgctgctgcttctgcttctgaaaggagtaagaccagcatccacagtgctggtagaagaagggtagcgaacgctgcggctgcggcggagccagtccatgaggcgaggccggcaatggtggacatgcgcatgtccaacagaatcaccggggagtgatatctcagaagagtccataccattcccagctgaagacacggagtggctgccgttgaggcggacaccttgcgactgggacgaagaggatcttgcaatggcggcgccc

SEQ ID NO: 86856 - DNA, 331 bp, Zea mays
  Clone ID: MRT4577_179219C.1
tgcgcgcgtctactgatcttaatcaccagcgtcgatcaagtaacctgggtggagcatgtcttgaagctatgttctggaagtcttcagcagactatgtgttctggttttcatacagccacactgggcaggacaatttatgccctagcttgacgcttgcatttgatatgataccctagctttgagtcaaatgcacagcaacggattgcatggaggtctgattatgcaaaaaagatgatctaatgcaatgatgatcaaattttgtgcagaggaatatggtcataaaaagcaactcccaggcacatatgtaagtgagctatacaatactttaata

SEQ ID NO: 86857 - DNA, 501 bp, Zea mays
  unsure (1)..(501): unsure at all n locations
  Clone ID: MRT4577_17921C.1
gtgtagtgtagcacacaacgcaggacacacaagatactcctattacatcgtagaagagtagnaaaattcacaccacagaactattcgncacgaatnatgtcacgtaacatacatgtaatgcgtaggcaacagcatcagactcgtcacagggtgacaatgcgccgtctctatcccttagaaccgcgctatagggccgccacagaagccacgcattggcaattcgcatacaccaatactaggcgatctagcgtcacgcctaagagaagcatccactatcactgtaaccctgccaagccaactcatagggcaacgtgtactgcacgacggcctagggcgagtccgggtcagccctgcacgcgtcgttgacggcatcggcccaccgggtgccctggaggctggcctatagccgcgccatctgctccccgatcgtcagcgtccagcacgaagcccccagaagcgcgcacggccgcagacctggccccagaccagcggtccacgcgc

SEQ ID NO: 86858 - DNA, 603 bp, Zea mays
  Clone ID: MRT4577_179220C.1
agcatccgaagaagtactcagctcgctacgtgtgctcactggtggctgatttccaccggacgctcatatatggcggggtcgctatgaacccaagggaccatctgcggctggtttatgaggcgaaccctctcagtttccttgctgaacaggctgggggtagagggtcagatggcaagaacagaatcctcaccattcagcctgtgaagttgcaccagaggctgcctttgttcttaggaagcatggatgacatgcttgagttggaaagctacggagatgtgcagcagaaggtcaatcctggatatgaagtttaacgatatgtaaaaaaaggttcagattttttcaagcgcccaagcagaaaataaggtaacactcgtgtggcaaccctgtatctgccgatactataccttgtcttttcctctcggtttttagcccaccgcaacttgattgggactaaatccagttgttgttattgttgttcactcttttctgccaaaaattgctgtacttctcagtgaatgtaagttttatgattggcagcttcctcaaccctgcacgcttatatgtgaataatagaaagcttctaaagtaaaaggaaaaggtggc

SEQ ID NO: 86859 - DNA, 332 bp, Zea mays
  Clone ID: MRT4577_179221C.1
gggagccacacatgacaccgatcttactgaggattgaacacattttttgacgcatgcaaagaaaatgaatcgagtcctggattacaggaacacccctatatataggtactgccacacgcaccaactttaatccgtcaaggtgacactcttcactcaccacatgcaagcagataccagaggtcctagatagggactaattattgggaaccatcaaattatcacaccgcctgcaacacaacatttaaacatgggccgaggcctgagtgcgctcggaactagctaggtacagcgcgcgccggactgtactatctggaggcgaaaacgtggtggtg

SEQ ID NO: 86860 - DNA, 186 bp, Zea mays
  Clone ID: MRT4577_179222C.1
cccccaaaaactggggggtttgcaacatctcccttttgatccaaacaaatcacagggactttgcgggcccaaggaaaatttggaattaagggccacgacaggcttgctatggccatagaggaaaggggggcaaacagaccttatgcattttttaaagcacccagtcttttctctagttcctccaac

SEQ ID NO: 86861 - DNA, 1555 bp, Zea mays
  Clone ID: MRT4577_179223C.1
gtcgaaattcggcacgaggggcccaggccaatcccaggaaaccggaagctcgaaagctgccaagccctcgccgtcctgccgcccacggcttaccgctgccgcctgccggccaccccacccaacgaaaatccgcatatactgtagtactccgtttcgcccgcgccgcccatccgttcggctgcctcgcacgccccaaaatcccctgctgcgcctccaaagccagcagccggcaggtcccgctacaaaagcaggcggcatgcgcgtgcgcgacaggtagcagctgcctgagccagtgcgcctcggtgagcagacaggacgacataggatagagatggcggccgcggtggagggggtgcggcaccgaacgctggaggcgaatggagtgcgcctgcacgtggcggaggctgggcccgaggagggcagcgccccagtggtgctgctccttcacggcttcccggacctctggtacggctggcgccaccagatgtccgccctggcggcgcgcggctaccgcgccgtggccccggacctccgcggctacggcgactccgactccccgcctgatgcgtccagctacaccaccttccatgtcgtcggggacctcgtcgcgctcatctccgacctcggccagcggcaggtgttcgtggtggggcacgactggggagccaccgtggcgtggcagctttgtctgcttcggccggacctggtgcgggcgctcgtgaacctaagcgtcgtgtaccacccgcggcggccggagatgagcccgctccaggccatcagagctgcctgcggcgaagaccactacatgtgccgcttccaggaatttggtgttgctgaagctgaatttgctctatatgacatcaagtgggtgtttaagaagacatttggcatgcgcaagccagctcctcttattctgcccaaggacaagagcttctttgactctcttgattcagatggaacttgtcctccatggctatcagaggaagatatttcttactatgcagaaaaatttgcgaaaacaggctttactggaggacttaactactacaggtgcatagacaggagttgggagctttctgcggcatggactggagctccgataaaagttccgtcgaaattcattgttggggaccttgacattacatacaacgctccgggggtaccggactacattcacaagggtggcttcaaggcaagcgtgccaaatctagaggacgtggttgtaatggagggagtgagccacttcatcaaccaggagaaacccaacgaggtctctgatcacatctgcgagttctttagcaagttctgatacgtattggaaaaatctcaaggagccgttatatgattctgagctactcgtgtttttatgtcaaaaaaatgcggttgcgagtgtcaccatacaaatatacgatctaaataaaattcgtctgtctcacctttttaaatctagaggacctggctcacctttctacacagctctaccaagaaacttgctttgcctttgtggtagacaccatatggggtgatccaagaagcaaaaaaaaaaaaaaaaaaa

SEQ ID NO: 86862 - DNA, 417 bp, Zea mays
  Clone ID: MRT4577_179224C.1
caataatgttcatagcaactttattcataataataaccaaaaaatcagaaacaacccaatgtccattggggataaacacatggataaacaacgtatccataaatgaagtacaggtggtaaaaagaagcaaagtattgatatatgcaacaaatgaataagctcaaaaacattatgctaagcaaaagaagccatacatatcatttaatttttaaaaattgtatataacagacaaatctcatctacagtgacagaaaacagatcaatgtcaccggccgctggaactcctagggagtactcactgcaaaggagcccttctggagtgatgaagatgttctctctcgattgtggtggtcgtggcatgggtacagaacacttgtcaaaaggcatggaattactcaagatgggagcatttttact

SEQ ID NO: 86863 - DNA, 387 bp, Zea mays
  unsure (1)..(387): unsure at all n locations
  Clone ID: MRT4577_179225C.1
gacgcgtggagaaacaaaatctaggcacgggggagcaggaacaatacaaacatatagacgatctgcacggaaggactagaggaggcagcgaatgtcgcagaacagaattgggngatgtnccaatttaacactccctttgtaattacctaaaactgtngagcgagtgtgtgcgtttttcnnttgcactccccccnttcgccctgcgnggagcgggggggattaacacttcagagaggaggactgctctcagaggnccaacgtgctgtcgttggctgctggttctggctgcatgcttgcgcatgcgggtgttcgttctttctgcacagggttttggccgcttgcatggctagaggcctgcgacgtgcactactgctatgtcttgggtct

SEQ ID NO: 86864 - DNA, 2391 bp, Zea mays
  Clone ID: MRT4577_179226C.1
taagaccgctttttttttttttttttggtcaacaaacatatattttggttctccgacaaattatgatgagattatcatatatagtccaccaagaaaaggaaacaaaacaagattcatctattagtatgatgttacaccccaacattagaagcaatcaaccgaccctagcaatcatgctgagaagttagcagcacggagccagtgactgcttgatatgctgaaggaggttgagcttcataggcgcagcacagagctagtgaccgcttgatatgctgaaggaggtgaccatcataggcgtagccaccaccagtggagcctccggggagtcgctgaccgaatacctgtcgtgcataaagcggctggccacaatcgactcgtccttggggatcaccttgtagcaatagcaggtcttaagcccctcctggtactggtagcactcgtggtggctgttcttcacctgcaagaagttccacaccacgctgtacttccccaccgtggccactagatgccgctcctgcttcccgttctccgtcacccaagagaatctgccctccctgaacctgctgtttgctcctgctagatgagagtccagtgggttgagcttcagcagccttggagcagcaattcggttccccattctaccactaaacccagtcttctcctttccatctttgtcgatgaagatggtgcatataagaatcaggtacgcatctgttgtcccaagaatccacttcccatcatatgtcacgtcgacatgggtaatgggcgaacccaacccaggaaaggctgtctttgccatcctcatagagctcttagaatacaggcgaattttcccatctaatgatccaacaacaattgaaccatcaccagttgaagcaaagcactgaaagtttgtcccccgggagaactgatgcccctgagtccactgcaacactggcgattcagttgcacttgccaacttctgcacaatgcccctgcgatctctcatatcccaccggcacaactggttgtcatccagtcccaagaaggtggactcagacgaatccagctgagcacctttgctatcattggtgatatccctcatgttaatatctgctccatccttctcaaacttccattctgaaaccaccttccccgtctcaatgtccaactgatgcacccccttggcgtgtggctttccatcagtggctgggctcatcagaagcatgttagtctcggcccgcataagaagagcctttttcggtgtcgagaagtttgtgctccctccagaaaacttcacggacatgcccttgccgtgtatcccatgctcgaaattcctcacgacctcaatgcctttgtctccaacgaggaaactgttatccagtgcgccaagcgcaagactgttaattccgctgccttcctcaacaggctcctcaaactcgcgcagatcctctaacaaaggcttcagtactggtgtccgcgggggcatcgggctgctcttgggacccggagagaagaagccgtcggtggcgtcctcccatatcgactcgtcgccgtcctccgggcgcgcccacgccgcgaagtccttcccgaacaccttggcgcggccctcgtccgtggcggcgacgccgtagctgttctcaaacatacagctgtggtacttcgcgcagaagtcaccgaagccgtcagcgtggcggaacttaagcgcccatacgccgtcggcgacgaaatccacccggcgctgcgcggggaaggtcttgagctgcagctcgggcccgaccctggcctggatcttcgagcccacgacgaggcaccacggcccgccggcgggcgcgtcgtcgtcctcgtcgtcgccggtgcgtacgaaggaggcggcggcgaggctgtcggagacgatccacttggcggagggggaggagccgccgatgtggaggtatagcttgacggcgttgagcgcggcggggttggcgctgagggtgggcccggggctagggttcggggagatgggctcgttgtacttgaggtggagctggcggaggtggcggtcgatggcgtcgatggaggcgggcgtggccgccgcccctgcgccgctggccaacttggaggaggcggatgccggggtaggcgtgccgtagtcggaggaattgtcggaggcccgggactcggcgtcgtcggagtcggagtcggataggtcgaggtcctcgcggctgtgcgagccccccatggcggcggaggctgatagggtttcggcgaggaggtgagattgggggagcggaggaggagcgtgcgggaatttgaatttgggagaggtgatggaagagatggggccccttggccgttttgcgctgctgactgcaagtttgcaggttgcaagtgggagggagccccccggccggcctcgagggtcccaat

SEQ ID NO: 86865 - DNA, 1066 bp, Zea mays
  Clone ID: MRT4577_179227C.1
ggccggccgggaaaaaaaaaaaaaaaaaaaaaaaaaaaaaaaaaaagcggagctctcccatcaaaccaccgttctaaacgctcccctagtcccctgctcagcttctccagagatcgccaaagaagcagcatcggcagtaagctctgcggcgatggggtacacgtacactccgacatactactcgggcctgcaggacaccatcgcgtcgctctgcaagtccatcctgccctccttccgcgtgggccggcggctcaccgccgaccaggccgccgcgcggcgccacgccgagcagctcaagtggcagcaggagtccttccaccgtatcctccacctcgccgcgctccaccgcgagggcatcgctccggcctccgacgttgccgccttccgcggcaccatgctctcggcgctcgtcgcgccgccgcagcaccccgagcagcccgctgtgctccgggacaagctcctcttcctccaggagctcctctacgccaagtgcgtctccgcggcggagtacaacgcgtccaaggcgcccctcgtgcagcggctcgccgcgttcggcgtcatcgtcgactgccccgacgcggaggtctcggccgaggagtggtcggagatcgacctccgtgacccgcctcctcccgccactgcggcggcctccgacaagccgaagcacaaggccttcgtcacgccatggaagagcagatccaagaaggaccaggacgtgaacagcagcgcatcaaggccgccgctggcccctgtggaccataacaacgccaccaacgcgccagtcttcatgaccgagagctcgccgtcggaaacggttccctccgggaaggccgagaaagggaagaggaggcatctggcagggatgttccacagcggcggcagtggcaccgagaacagggagcctgcggggggaggaagggggtcttgagaaagagacggtgagaggtaagaagaagagctcgtgggggttcgatggcatcaagaagtggacgaaagccggtgcctgtaacagtggcgaggcggcagccaccggtgagcagccgcagcatggtccttcgcgctcatc

SEQ ID NO: 86866 - DNA, 234 bp, Zea mays
  unsure (1)..(234): unsure at all n locations
  Clone ID: MRT4577_179228C.1
cgcgatgacgttgacctcctgttgttgccgccgtaagaagagtggatgatggtgagggtaagagatctgaaggttgaactgaagtangtgttagatgaagaacaaagggataaaaaggattcagtgatgaagcctcgtggcaaagggatcattaagttactgacagtaatggatgcgtcatggatagattggtgagtttgaagatgtggatgaagatggagctgtgaatattgt

SEQ ID NO: 86867 - DNA, 327 bp, Zea mays
  Clone ID: MRT4577_179229C.1
agggaacaggattgtatatatattcaatcactgaaccaatcgttacagggacatagtcacacacactggcgcacagagatgcatggcgtgtaacgatgccatacaccaacacaagcacaacagaaccgacaccaagcatgcatggcggagagccagaccagacgatggctccatcctttattcttgacacgccacaagcacaaagcagacagtacgtaaaaaaaaaggtgacaggcatgcatgcatgccgcaaacgaaacaacgcagcaggatcagcagttgcaggggctgcacttgcagctgtcaccgcagctgcagccgtgggcg

SEQ ID NO: 86868 - DNA, 401 bp, Zea mays
  Clone ID: MRT4577_17922C.1
atggggggggcccaagccaaaaaaaaaggtgggcgcctttactttacaaccaggagggagccggtcaaatggccctttacaaggggtcagcttggggggggcctacaaattactttttaccggtcaatcagaggggtttttaccgggggcagggtacatcacatcccttggccaagggggatccctttaaaaaccccccccccctttgtttagaaaaatcccgagttgccccgggtaaatttgggggaaaagggcaccggtcttcccgggttcttttaaagcggctaccgccttaacttgctctgggcttccaggaattgcttccccaagtttcccccctgaaggcgaaagggaatttgggtttaacagcaattcgatttcccgggtggtcccaaccctag

SEQ ID NO: 86869 - DNA, 442 bp, Zea mays
  Clone ID: MRT4577_179230C.1
ggacctttgggctgctttatgtgcttggaaactcctcaaagtcccacgcggacaccgaacctatcggtctttacatataaccccccgagaagcccaatacctgatacaacaccgtcgagtcctcggagcacccacgggacgccttcagctattgaaatgtacggagataaacagtcaaagaggaggagaagggcgcacatccaaacccctccaatccctctacaaacgacagtactcactcctccgatgagagcccgaataaaacctccgaatcgaaagaaacagaggtcgaaacggtcaatacagccgagcgggagtgtagattcgtctaagaaagagaggagtggtcgtgcgcaccctactagcgggaaaacaccgcctgccccgatacgaggtcagttaacgaggacgccgggacgtccgtacctattctcgaataaac

SEQ ID NO: 86870 - DNA, 253 bp, Zea mays
  unsure (1)..(253): unsure at all n locations
  Clone ID: MRT4577_179231C.1
tagcaatttcaggtgcggttgaggtttcataagctgctcggacaggtagtatacgacggactgtactgaagacttggacgcgctcaagtactggtgagctacaacttcgctcaacgtcgaggtaaatagaactcaaacgcgatctaggatggtaacacataattgctgcgagagatgtacgaccatacctgaatgatccatgcatgcatggngaaggtgaccaacttcgagaaggagctgtaggagttgaagt

SEQ ID NO: 86871 - DNA, 456 bp, Zea mays
  Clone ID: MRT4577_179232C.1
atggagatgggcagagccgagcgccatgagagaggtggagaagacatcctggcgaccggcgccatggcaaagggcaaggccgagctgggaccgagccaggggcacgacacgcgcagggagatgaacgccgggggagaagaggatcccaagccggccatgagagatgggcttggcgagcatggacgccacggcggagctgaagctggagctaaaaccgacggtggggtgctggagcgtggtgggcgcgacctgcagagaagcttcgcgcgtgcggaagctcgactgggcgccatgggaaggaggaaacgtgagagggagagagaagcaggaaggagctcggccggcggctacctaaagaacgagcaggagcggctgggcgtagggaggaagaagagcgcgcatcagggagaagcatctgggcggctgaaaaatctgagtacgacggggaagagataa

SEQ ID NO: 86872 - DNA, 398 bp, Zea mays
  Clone ID: MRT4577_179233C.1
cttgtttaagctctacacgacttggtacgtacaggaggactgtagagcactctaacaagataacaaggttcatgggaggcgggcgaggttactttttgttgtcgacaacatgcgcctgcctgtggactacggccagatggctggtgttggacggatcacctacacgttcctgagcccgccgcctaatgcgcattacgctaagttcgactggaagccgacttgcccagtgcgcggtatcctgacccacgggcaggaggcactaggaggcaagccgaaccataggcgcctgacgcaggaactgtcctattgcatagtggctgagcagctactactacggactctgtacgtgcaggtgatggacgccgaacacggacgatcagttcgacttcgaccggttg

SEQ ID NO: 86873 - DNA, 655 bp, Zea mays
  Clone ID: MRT4577_179234C.1
atcactttattgtgacgaccaagtagcatcataggaggcaccctggagcaccaacagtggaacacaggcgatcaagatatcttacgttcttaggcttcttggtatgtgtggatgcggtgatcatgcgacagtattgcttacatgctcacatgcttctattgcttcccttatacctctatacattggatcaatgatagtgtgaaaacgcgaaaacccaactctacaggactatacgctccaacaagcaatggatgctagcttcatacctttatgaccttcgacagccgaacaatctataacagtatcttcgttgcaggcattggtacaaaccataaaggaacagacaatagctacactagcgcgagctgggatcaaccgatgactactgtcaaaactagctgcctactctattcaaccacaaggttgtacattacaccagctggttatccgtgacacctgctgctaatcagccaaatcaacgatgaccatccagacagatagctactgtctactctaataaccaccaagtactttgatgtaaacaaacggccgcactggactccactgtttattagctaggtgaagactactatgatgtattcaggtagctgcagtagacggtgctgttctacctgcacactgacagtagctgtct

SEQ ID NO: 86874 - DNA, 1404 bp, Zea mays
  Clone ID: MRT4577_179235C.1
tttttgcctcccaccgtatgccttgagttctgtactgtgcggcacattattgttattgctggcagcgcctagctgaagacagactactgttcaaaacggattgctggatagacggatacagccagcaactatctagtccatccagattagatccttcgtacgggcgaacaccactcatatacttacatgaacagctaaccaaaaaaagggaataaaaaaacacccgctagtcaggtagaccacagctacagaagaaaaccagctgaatgttacagtgtcctatctcggcctccaagccataccactcgcactgctatagtcgtagccctggacgccgctactgccaggcactacaccatactgtggttgatgatgtacaatgttcgtcatctgtgcggcagcggcagcaactccctgcgccggccaccaaggattgctaggctgctgccatgcctgcccaggctgctggatctggaggtaggcatggggcagcgatgcgacgggaacctgaggctgcactgcacttgtgatgtggtactgctgctggtaggcgtccatctgctggacgggaggtggaggcaacggctgttgctgtggggcgtgaggcagtggcggtggctgtttaatcgtctggctggggttccactctggtatgtcgtcgtcatcgtcatcccaggtacgtggggcttgaacagatgatcttttaccatacttctgaaccagttccctcatttgctctgctgggcgagcggagggtggtggtacatgtggccgacccatgtaggcacgcgcagttacattagcagcatggtgtgtcggattaacgaaattaaattcaggaagatcctcatccctagcaacaccgagaagcgaagggtgatccagccacagcaaggcttctcttggtgctcctttggcaagtgccgtgagaggatttccacggttttcccatgaggagggcacaggtacagctctattccttctgcaggctcagctaatcctactctctcatctgaaatatatgcatcgatagtctgcaagatattttggcggccactttccgatgaaccctccttccaacacagctccgttatctatcaaaatagttagcgggtagttaaattgacgaaatagataaccaacagctaatctgaaacaacagttcatatcttctaggaccctatgaatactctggctaacaaagccaaatgacattatataacatgatgtcaatttagagtccaggtattaagaaactggtgattgcttagaattccatttgcatataggtgtgccgacacaaacctgacaagcaatatgtggttttctttttagcactgattatcccaactagctaagttcaaccattgttcaatctcaaatatcaaataagtgcccggccgg

SEQ ID NO: 86875 - DNA, 1031 bp, Zea mays
  unsure (1)..(1031): unsure at all n locations
  Clone ID: MRT4577_179236C.1
gccactgaaatgtataaatatagttcagaaactttgcggtacattattgttattgctggcagcgcctagctgttcaaaacggattgctggatagacggatacagctagcaactatctagtccatccagattagatccttcggacgggcgaacaccactcatatacttacatgaacagctaaccaaaaaagggaataaaaaacacccgctagtcaggtagaccacagctacagaagaaaaccagctgaattttacagtgtcctatctcggcctccatgccataccactcgcactgctatagtcgtagccctggacgccgctactgccaggcactacaccatactggggttggggtacaatgttcgtcatctgtgcggcagcggcagcaactggtggcgccggctaccaaggggtatgtcatcgtcgtcgtcatcccaggcacggggggctccttgaacagatgatcttttaccataccactgaaccagttccctcatttgctctgctgggcgagcagagggtggtggtacatgtggccacgggcccttgtatgcatgcgcagttacatttgcggcatggtgtgacgatttaacaaaattaaattcaggaagatcatcctcatccctagcaacaccgggtccaaagcctggaggggcgtcatcagttacatcttcctcttcgcgctggctggtaaagcctggtggtgcgccgtatgagttgggaggtagggagggccttgcggccggatttgtaacctgtggtttccctaggatcgactgcctcttggaaccatcatgcctgttgttgtggtgggaggtgggtgccctggaaatgctgggcctccgccataccacaactccgatgaaggatgatcccgccacagcaaggctctcttggtgctcctttggcaagtgccgtgagaggatttccacgttttccctgaggagggcacaggtacagctctattccttctgcaggctcagctaatctactttnctctnctgaaatatagaaaacgataggctgcccggg

SEQ ID NO: 86876 - DNA, 1061 bp, Zea mays
  unsure (1)..(1061): unsure at all n locations
  Clone ID: MRT4577_179237C.1
ttgggtacctcgttgggggcctcgactgtaaacctgcaccaattccttcgttagatgaattcatgcagggcttagattctgagccaccttttgttgatatctcagttgggactcctcaagaagatgtcaatgactctgacgaacttgacaccaccatggagccttcggatcttccagagacagaagataatgcatctgcaccagaaaaaactgaatctaaatctgataagtcatctacacaggttaacagcgagcgcaggttagagtcaccaggacatatagcggttcaaaattcggatcttactgaaccacgtgatggagagctcagcaaatcctccccatcccctgacaaagatgaagcaaagaaaacaactgttgataatgcctctaattccgattctgttcatcacaatcaggcagccagtctccctatgatacgtgagagcatatgggagggtgcaattcagctgaccgtatcttcgctctgtaatgttgttgctattttcaaaagtggtgaaaagccatcattaaaagattggcgtagctttattgagataaagggaagagttaaacttagtgcttttcaagagtttgtcgatcagcttcccaaatctaaaagccgtgctataatgataacggagctgtgttggaaggagggttcatcggaaagtggccgccaaaatatcttgcagactatcgatgcatatatttcagatgagagagtaggattagctgagcctgcagaaggaatagagctgtacctgtgccctcctcatgggaaaaccgtggaaatcctctcacggcacttgccaaaggagcaccaagagagccttgctgtggcgggatcatccttcatcggagttgtggtatggcggaggcccagcatttccagggcacccacctcccaccacaacaacaggcatgatggttccaagaggcagtcgatcctagggaaaacacaggttacaaatccggncgcaaggncctccccctactctcactcatacggcgcaccacccagctttaccagccagcgcgaaagagaaagatgtactgatgac

SEQ ID NO: 86877 - DNA, 550 bp, Zea mays
  Clone ID: MRT4577_179238C.1
tgggtacctcgacccgccgggggccggagatccaagaactcgctcgcgcgcacggacagggccggaacccagggatcgagactgaacagcagtccgagacgccatgaacgtggaggaggaggtcgggaggctcaaggaggagatccataggctcggccagcagcagcccgatggctcttacaaggtcaagtttggcgtcctcttcaacgacgaccggtgtgcaaatatctttgaagcactagttggcaccttgagggccgccaagaagaggaagatcttgacctacgaaggcgagctgcttctgcaaggtgtccatgacaacgtggagataaccctgttgcccccacctgcagttgcttccgcttgaagcgaagagcaccaccaagttctcgattccatacaactcgtatgcttgtattctgccgtgcctatattagattctctcgaaccatttggtgttccttgaaaactgctatcgtgtgatatatgaaattgtggtgctcaagaaattgccttgcttacaaaaaaaaaaaaaaaaaacgcgcctagg

SEQ ID NO: 86878 - DNA, 298 bp, Zea mays
  Clone ID: MRT4577_179239C.1
ggggggggggcggcgggtattgatgtgccgctcagcgcccaagcagcacaaggaggcagagggcaggtggacaacgcccataactacgcatgagctaacgactcggacgacaggagcaagtagcgggcggtgaggagaacacccagcggcccccagaaaagcagggggggggcaagaatgctccgatgggtgacacacggtgttccgagaaaccacaccgcagggccgccccacaggccctctcccccgcagagggccagaggaacagcccggggaccgcccagaccccaggcccccc

SEQ ID NO: 86879 - DNA, 351 bp, Zea mays
  unsure (1)..(351): unsure at all n locations
  Clone ID: MRT4577_17923C.1
accacgcgtccggagtggaatatggcaaccaatgagtcggtgtcgtgtctcagcaactatacaaggcacttagcgagccttagatgggcaatgtggatgactgtatgggttggaccatgcaactcaatcagtatcggatcacagatatngccttgacaaatcccggattattacagctactgcgtgccatagtttttttttatggcagatccatcttgagcattatagactgtcccggtactacttgtagactaagacaaaagtgatcttactgatcttttgattaaaatctataactattaaataaaatgttgtttgcaccttaattaagtaaattttttacatttaata

SEQ ID NO: 86880 - DNA, 153 bp, Zea mays
  Clone ID: MRT4577_179240C.1
aataaagcatgagttgcgggatgaccgagacatcaaataggtagaagaatacatctatactactacttgaaccctcgatcaataagaaactaatttgaacacagccatgttataggtttacaatatacaggaaggacaaagtgaaataatatt

SEQ ID NO: 86881 - DNA, 347 bp, Zea mays
  Clone ID: MRT4577_179241C.1
gggggattcaagagaacaaaagacgtgttccaatacaaactatcaaaattgcactctcggccactgattcacacgacaaacagaaattcgatggcttggaagctaacatttcaaaaatccttggttccaaagtttttgcctctaaaaagcactaacattggtcagtgttcgggagtagcaggaccatgttttctcaataagaacaacttaaacttttgaggggagcacatccatgacgcctttccttcttgaaacgagattgatccggatcgaatccaccttcctttggaccatagacagcccatgtgggcgtgagggccatgatatcttggctcttgaaaggcttt

SEQ ID NO: 86882 - DNA, 247 bp, Zea mays
  Clone ID: MRT4577_179242C.1
ggtcctgaatattacatggtcggcccgcgcgtccgcggacgcgttggcggactcgtgggggcaaggttcgtggtttcacatttgacatcagctggggtgcgttggagtctctggagcttgactctgttgggctttctattgttccttctagcttggtatgcacgtactgtttatgtgtcgaagacgtgctggatatagtcttctatacagtcgtggtgcatgaagacgccgtctcacgggttcaacg

SEQ ID NO: 86883 - DNA, 612 bp, Zea mays
  Clone ID: MRT4577_179243C.1
ggagggtcatcttgttgaaatgggaacacatgatgaacttttaaacttggatggcctttatgctgaacttttaaggtgtgaggaagcaacaaaacttcccaaaaggatgcctaccaagaatagcagggagcgtaagtcgcttcaagcggaggacacatcggtgagccaatactttcaagaatcgtcctctcctaagatggcaaaatcaccatcactacaaaggacacatggtatgcttcaattttggcgatcagatgccaacagaaactctcatgattcaccaaaggatctaagtccaccttctgaacaaactatggacaatggaatacctatggttgcaattgaaactgaaaggacaccgtccattaagagacagaatagttttgaaatgaaattacctgatcttcctaaagttgatgtacatcctatacagcggcagtcatctaagaattcagaacctgactcacccatatctcctcttttgacttctgatcctaagaacgagcggtcacattcacaaacttttagcagaccccagagtgaacaagatgatacgagttctgaacacagtgaactcgatgaggttcagcaccagaaaccgccatctttttg

SEQ ID NO: 86884 - DNA, 380 bp, Zea mays
  Clone ID: MRT4577_179245C.1
cccacgcgtgcgctaaagtggacgctgcgtgtcactacatgcgccgtgtgatactacgaggacgtactctgcggctacgaggaccgaatgctctactactagagctccatgaatgcctgctacatcatcataaactaatcgggcgagttcagctcccagtagaactagggctgaggatccatgttcggtcttgccgggggtgtcatcaaaaagatactccgaatggcatctgcatgattgctcactattgagccgcctactatatgcacctatctgatcatgagtgtcgagtctgtcaaaatgtatgtcgcctgggggaaaagaaatttaagttatatgaaatgaatatgctgttgatgtgtcaaaaaaaaatttacttt

SEQ ID NO: 86885 - DNA, 321 bp, Zea mays
  Clone ID: MRT4577_179246C.1
aaaacgaggtccatattaccacatttttatgggtggcatattggcaaaacttgaaacacaagacaatggtatttaggcggggtgggacccacccaagtaatagcctaattaaagatttacaggctttgatctcctcaacaaagggggcccaaattggcccttagcttaaccaggtgggggcatacagcattcgatgcaaattgttccaagccccgtgcttccaaaaataccacccaagggcgggttggttcaaaaaagcaacaaaagattttatgggcccaggcattacattaatgacttccttgacgttcaggggggata

SEQ ID NO: 86886 - DNA, 498 bp, Zea mays
  Clone ID: MRT4577_179247C.1
gtaggagctactgcctatcatgttactaaaaattacttgcttgaaacgtacatgtggcaggggacagtggttagctcaattatttaaacatcattttggaataaaggagaattgtctgaatcctgtgttttttgaactaatccttatgaaatttctataccattcctgtaaaattcctgtgtttcaaaggagcccttagtttgcactggaatggcccagtatgtggaatttgcatcgcgctttttaacagcttgttaaaaatgaggctagaggcgcttgaaattatgttaccctgaagggttgttcattagctttatgatcttgaaattcttgatgccttctttcgatccacaactgcatttagggtgagttctgagataagtttagtgtttattccactcttcacttcatcctgattacgtgtgccttcttgttatggccacggacacattaccttgcatggcctgtaaatgctactaacaggtataataactgggc

SEQ ID NO: 86887 - DNA, 692 bp, Zea mays
  unsure (1)..(692): unsure at all n locations
  Clone ID: MRT4577_179248C.1
atgaaattaattaaaggaatcttctggaccacctattggctagagcagcttttctcttttcagagatccctataccggtaaggacgttaacttgtgatacaaggaagggtatggatcccctggcttgcgacgtgtagtgtagtaggacaaattgtaggattctttctatggaccggtagcttcgctttacagccttttccttccaaaaagaagaaatgatctgcgtggtccatcacaactagacattctttctggcaaaaagaaaaaacaaaaaataatggataaaaagcaaaagacagactaaagagaatatccttgcatcatctttagcttgccctccgatccgtatggttagtaggttctatcaaattatacttttccatgttgagggtgctcaaatatccccacgaacgctagtctcttccgagttgtttagtcactatcatttttccatgtaattaaaagagtaaagtatactaggagttcacgaacttgacacattgtgtcacttagcgtccggacttagaaaaacgtaaaaatgggtactcaaactttatcgactcataggaagtgagtactcccctctgctctgaaatgttaggtacctaattaattttagaaattactacatggtacaacaaatgacttatataatcccttncgattactatatttagggctgggatagacac

SEQ ID NO: 86888 - DNA, 369 bp, Zea mays
  Clone ID: MRT4577_179249C.1
gaccaatcatgcggcccgccgaccagctactcctcccgttcctcctcctggccgatgcctccgtcggtgccgccgccggctcgtgggagaatggatatgggagcatgctccgcctcccctcctcgtctccgcgccggttcccccgctccgcgggcgtcgacctgatccacgcgctcaacctgcaccccggcgacgcgtcccctccgctctccaccgccggcgtagagggcgccctcgcccatgcggggaccatacgcgcgaggaccatacgtatcgagttattctggagcggagggggcggcacgcgaggggaggcccgggcgcactactcgttgaattattgaatgcgtaacaggagcaagagctgga

SEQ ID NO: 86889 - DNA, 577 bp, Zea mays
  unsure (1)..(577): unsure at all n locations
  Clone ID: MRT4577_17924C.1
ggaccctcgaggccggccggggttttcgtttttgctcctatacgatcggcataatgtaccaagtcgaacgtggttcgcgggacgagcgcatgttgacgatgaacgtcttgaaaaagaaccgccgcgagatgtggatccatgtgttgcattcacttccgtctatatgtcgacaaccactaccagcagaagaagctcatctagcatgaccagcccgagctgataggtgcatcaagcccatcgacattttcgaagacgacgagcatggctagcagtaccctccccctcgaccactactactggaaaaacacgcaccttgggattgaagacctgcgcatcttcctcaaactgcccggagaagtatgtggccctcaacctccacaaggagagcgagacccgaaccctcactttgtgtactgcccggcgggtgaccgccccaagagcccccatcgcctttagtgaaacagaccgaagcttggcgacatctttccggacagatcccccccccccaggggcatgaaggttttttgggaggacaacgtcagngctcccgccgatttgctcgcaccctttaacggga

SEQ ID NO: 86890 - DNA, 476 bp, Zea mays
  Clone ID: MRT4577_179250C.1
gggggggggggggggttaaaaatatttttttttttttttttttttttttttttttttttttttttttaaagggaaaaacaacaagggggaggcccacaagcccccaaaaaaaagcccccaccgggaccaaaataaatgggtataaaagccgggggggggggggcccaacaattttacgtgcccggggccaaaaaaattccaaaattatgccacggggaaagatgttaaaaacaaaaccaaggggggaaaaatcccgaattgtggcacttacaaaacaactacaaggacctaggatggggaaaaaaaaaaaaaaaatccacttgtgggccgacccagcgataaccacaaacaaatagtttcgcccccggccaaaatataggttgcgcccagggactttccggggcacggggctgggcccataaggagcaagacccaccccgggaagttaagcgacgggagggagtttccacaaaccc

SEQ ID NO: 86891 - DNA, 393 bp, Zea mays
  Clone ID: MRT4577_179251C.1
aaacggaaccaccccaggcttaaaacatttttttaaaaaacatgggaaacccggggggggggggtttttataggcgggtataggacaaaacatgggtttccccaggagaagaggggaaaagaaaccctcaaatcccccatttttaaaacccaaagggctatagcccgccccaatggggatacagggggggggtttttttttctccccgggcctatgccagggggggccacccctaaaggatctggttccacgggtccggccccccggggaggccccagggggtgaaatcgttgcccggggggccccccctttaggccggggggggggcgtcccccctgagctgcgacaccagcgggacctcaagcaggtcccccggcttggacatgggggccc

SEQ ID NO: 86892 - DNA, 329 bp, Zea mays
  Clone ID: MRT4577_179252C.1
cgaccaggtaccttatcggcctattcgcctgtattcagccttgaaccgagtacaccgcccaacgtgcgctgcgttctcaatcaccccaacctccctaacggctcatggcgccgcgacaggcgacaggccgcacgacgctctaacctttcaacgtgccagttgtcagataacatagaacctgtcccccgctcatgactcctgaccacactacagactacacttcgagcgcggacgacgctcaattctcactctgggctgctcgctcgtcgctcgtcgttactaggggaaaactcgcaagttccttctcctccgattagccatatgcccgc

SEQ ID NO: 86893 - DNA, 346 bp, Zea mays
  Clone ID: MRT4577_179253C.1
acccgtccgccgacttctagctaatgccttacacacttataggctctttgttttgttcagcccacatatcgccctatggggagggggcgcatttcagctccggagagagctctacttcttgtggtctgtaacaactcaactactacagctggcggtttataatggcctgcgaagtgcgattcagtgccattgtacaggggcgtgcagaagcatgtgtggggacggttcgcggagaatattcggtacctgaccaagcgcgcactcgtttgactcggcaccttcgactcgaacgatgtcgctgagctcgcctatgacgtggaccaacgtgacctgttcggtccgtttg

SEQ ID NO: 86894 - DNA, 204 bp, Zea mays
  Clone ID: MRT4577_179254C.1
ttatggaggcggacacgccttcatgaggagggttgacgttagcttaattcgcgcattaaccatacacgaacaatagattccgcatgtggacagatcaacgacgaaacttcaacgtgggcgttctaaatactgtgacagacactgctgcatcattaaatgcagcgacttctcaacgtgggaccagaaagaatgtggccaccggag

SEQ ID NO: 86895 - DNA, 301 bp, Zea mays
  unsure (1)..(301): unsure at all n locations
  Clone ID: MRT4577_179255C.1
ccggccgggccgggttccaagcagccggcgcgccacccnacttccccncgagncgacnngggcgccgccanncnccgncgcggcgggcncgcgggcccgccgccggccaagccgcccgggccccgcccncnccgncncgcgccccgggggggccggggccaccncccccgccgccggcccgggcggaccgacgccagccaccgggaccgccacgcgagaaagggggcggcgcccgagagagcagcaccgagggaggacaaggcggcgcggagcgacccagagcggcgcaggcccccccggc

SEQ ID NO: 86896 - DNA, 394 bp, Zea mays
  Clone ID: MRT4577_179256C.1
aaaggaaaaaaaggggaattttttttaaatgagaaaaaacccccttttgtgcttttgtgggagacctttaatttttcaaagcccaggggaattgggaataggggttacaaccaatttaacttggaagtccttttgaaggggctggaatcccaaattttttccaaaacccctttttttataccccccaaaagggacgcccctcccttcgggtaaatagcggggggtccaaacaatgcccgcccaaaggggccttgacataggggttggagaatccaaatttttgggcacaattcctggtggtgggccctacttgggggggggagcacttttaaatggcccccccctgggcttaaatttcaacagcggttgtcccgggccaaaaatttcatttggg

SEQ ID NO: 86897 - DNA, 422 bp, Zea mays
  Clone ID: MRT4577_179257C.1
tcgaacccaggacttagaggtgctactcggaagtccttaaccgctaggctagaggccctttcgcacctaaggttggaacacatgcacatgctctaaactatatccattagaagaaaacttatttatcttttttttttctcgaaagctaaaacttatttatctttctctattttttttcagacgaatgaggctccattaatttcctaatggtttgttgggcttaaaatatatctggatccttaacttgagtcatgataaccactctaccgtacctgaggaaactattagggtttcttgccaaaggagttaagacttttgtacttttagttgatttcctaatactgtatttgaagctcgaaattttcatttgaaaatattgtaagcagctgacagtaatccctttttaacttttgcatatgcca

SEQ ID NO: 86898 - DNA, 342 bp, Zea mays
  unsure (1)..(342): unsure at all n locations
  Clone ID: MRT4577_179258C.1
atagggtttttgatttagcccgccgcgccggtcaacccaaaaccccccaaaaaaacccttgccctccgccattcaatccaatggccttcttccccaacttcaaaaccgccaacggcctcaattccctcgaggtccacttcgccggaaaaacctaagtttctggtaactccattactaaggatgacattaacgtcatccccgcggtgccgtcaaaacctggcgctgagtttcctaatgccgcccgctggtacgagaccgtctctgcngctgtagcctcaagattccctggtaaagctgttggtgtaaaccagcctgcgggatcagctcctgccgtagctgctc

SEQ ID NO: 86899 - DNA, 286 bp, Zea mays
  Clone ID: MRT4577_179259C.1
gttctttgagaaaaattctgtacttggaaacaatgtgtttgaacattaaacaaagatattttagaatgtatctatgatatataagagaaaatttttttttactaaagatagttgatggatacttgatgcttattatctaaaagctgaagtagagatttatcaacatcctctggggatgctttttaatgcatatcattaccatatttaaatatgagtgtttgggaatccatagtaatgaaaggcctgtgatcatgatgaaaactatgaaaatgaaggctcacgccca

SEQ ID NO: 86900 - DNA, 430 bp, Zea mays
  Clone ID: MRT4577_17925C.1
gtgatgtactgtctgttgctgctctacaccggtgctggaggacggcattgcccgtcgtgtaggggcgatgcctcttgtccgtgctggcggctgcgccgtcgtggacttggtcctcgcgcgctgtggaagagatttatgatcggcgcatgggtgcctttgatagcgagcaggcaggaatcactctttgtgtagtgaccggcccgacgaggaccaggactcggtcgatgcgacagatgatgattgcgaacgggcgcctgtgcataccaaggacttaacgggcctcatgcagatggtggaacactcggagacggcatgcttctgtgaggtgaccttactgggaggacatggctaatgcatggcaaacacttgacctggagctggcaactttggccgtcttgcgtgaggagaaaatggggccactatcatgcat

SEQ ID NO: 86901 - DNA, 389 bp, Zea mays
  Clone ID: MRT4577_179260C.1
ttttttttttttttttttttttttttttttttggttttttttttttttttttttttttttttttttttcacaggggaaaaattgcattatcatgtttattagtagtagcaggggaatgaaaagaacattaaagggaaattaagcgccgcagccatgaccatggacactgaaatcgggcttaattttgattattacaacatgctttggcgggcagggtacttttttttttgcgagtttttacagccagggggcaccccccccattcggaaagtccattggggggcgggttgggcgtgcttttcccccacccaaaggcccgtcaagaaagggtagtgccccaaacccccggcccccgtcccaaaacctctgaaaccaaaccccttgcgtct

SEQ ID NO: 86902 - DNA, 360 bp, Zea mays
  Clone ID: MRT4577_179261C.1
ggggatctttcgccagcagaccctccgcggcgcggcgctggagctcgccgcgcgtgggggggccgctctcgctcgccgacctcgtaagccttcttatcgggtgggcatggcccccgaggtgggccggggtcgtctaaatccacaacgcccaacacatggcacaacttcccgccgctgccgtgacctgcctaccgcgccaacgccatcaccaacgtggtggaatttgaccacgaggtgactgccaccaactgagatgaggtatccggtaatacaaccctgaacatgacctggcaggccaagaccaattactatggcgagaagatctacatctctgtgatcggaggggctacccagaacacc

SEQ ID NO: 86903 - DNA, 450 bp, Zea mays
  Clone ID: MRT4577_179262C.1
acgcgagaaacacttggagtggcgtactgaagcgcctttttatacattgggtcctttgacaactgatatggcacctggttatgatcacatcacttaaaccatcggtgctgccaacattacagctcttggcactgaactttactgctatgtaacaccaaaggaccaccttggttagcccaatcgtgatgatgtcaagactggtgtaatatgctacaaaatttctactcatgctgactattatgcaaacgtgtatccatatgcacatgctctacatgatgctctttgcatggcaagggatgagtgaagaatgctcgaccaacttgcttcatctatggatccatgaactgctatagactttcatgatgaagcattgccctctcatggtgccaaagttgcacatttctgctcaatgtgtggacccaagttctgttcaatgaaaattactgagga

SEQ ID NO: 86904 - DNA, 264 bp, Zea mays
  Clone ID: MRT4577_179263C.1
ctcgacgcccatccgctccaccgtcctcagcctggtctggcagcccaacaatgtgctgctggctgccggctcctgtgacttcaagtgtcggatcttttcagcctacatcaaggaggtggaggaacggccggcacccacccgtgagactctacataacgctttggggaactgatgttcgaatccagcagtagctgcggctgggtacatggcgtctgtttctcagccagcgggagccgcgtggctgtaggtaagccacgacagcac

SEQ ID NO: 86905 - DNA, 837 bp, Zea mays
  unsure (1)..(837): unsure at all n locations
  Clone ID: MRT4577_179264C.1
cattgggtacctcgaggccggccgggtagctccccacaccacgtctggtacctctctgcagccaatacatcctgcgtagccaaattcaacaaccaccaccatggccaacatcaactggcggacaatcaacattgacgccttggatcccgacagccccgccaacttcgacctaagctccctcacgcccgccgtgcagcctgtgtcgacggccgatgtccaaaacaatgcccagcaattacggcaactgctccgtggtggtgacaatgagggagccctcctaggagcgctggagaacccaccatatggcgcagacgacaagggaaaggaagcccaccttgcgaccgtcatcgagatcctacaatccatacgcgcgtcggacatgtcaccaatgctgagccggatatacggtgcaccaggcggaaccgaggcattggacgtcctgatgaagtacatctacaaaggcatggcccatgctacacctgcaaccaccaaacgcgacatcaccccccaaccgaccggtttctctcaagttcatacccgtggcggcggcgaaggtggtggccaagcaatgagcgtgctcctcagctggcacgagaagcttgtggagatagcgggcccaggctccatctctagggtcatgagcgatcgccgtacggtttgaatggttaaacagtcatcgcattccgcaacaatcatcaccaaggggcgtttttttggaatcataacttangactgggctggctgaacgctagcttccattgccttcgatagcgttcagtccataaccgaggcgcagtagtagagcccaagggccnacgggcaaagcagaacccgaac

SEQ ID NO: 86906 - DNA, 310 bp, Zea mays
  Clone ID: MRT4577_179265C.1
cctgcctgcacactgatgttgccggcaaagacggtcttagggctgccagacgccccgcgagtagcggcgttctcttcgcgaggtccgagctcagtgacacctgagattctgaagccagatgttgctgctcctgggctgaacatcttggcggcgtggtctcctgccaagaacggtatgcgcttcaacgttctatctggaacttccatggcatgtccgcacgttacaggagtagcagctctcgtgaagagcgtgtatccgtcatggtctccttcaggcatcaaatcggcaatcatgacaacagcaaccgtac

SEQ ID NO: 86907 - DNA, 312 bp, Zea mays
  Clone ID: MRT4577_179266C.1
tcgagccggccgggatcacttcagtgatcgcaaaagagacagaacaactctggttctatcttatagccaagccgaacggaatcctctcagcttcagcttcctccggtccttctctggtgaagaagcgtggagagacactggaactggcccatggaggacgcgctcctccgggagcgagaggggtcgataaggacggcgtggttcttctctcctcccccgtatcatgcaacagatttctgagtgagcccttcggaccccacaacggccgtggtggctgaggggatcgactttgagagggtgcttgcttccgct

SEQ ID NO: 86908 - DNA, 439 bp, Zea mays
  Clone ID: MRT4577_179267C.1
aaaaggacccggcctttgtagcctcctcaacagagagtaggtttaaaagaaccaaacttaggtaaaacaaaagaaaaaaaaaaaaaaaaaaaaaaaaaaaaaaaaaaaaaaaaaaaaaaaaaaaaaaaaaaaaaaaaaaaaaaaaaaaaaaaaaaaaaaaaaaaaaaaaaaaaaaaaaaaaagggggggccgttttaaagaatcaaagttaacaaacccgtaaatacaacgtaaaaatttttctttagaacaactaaaaaaaaatgaattgccaatggtataaaaactttagaagtggaaaaacctcggcgtaaccaaaataaatccccttgaaaaaaatctcctttttgcaaggtggtaaaaaaacaaaaaaacccgaactaatcgccttttcaaaaaattgtcaaacctaaatggcaaaaagaacccccctttaaac

SEQ ID NO: 86909 - DNA, 1913 bp, Zea mays
  Clone ID: MRT4577_179268C.1
accgaaccagagcgcgaaactccacggctccgagtctccgaccattctcgcccccggctctttccttcttcccgtgtcatcgtcaaaccgccgctttccaattccaggccatcaagacgtagcagctccccttgcgtctccgcacgccaccgaaggatcctcgccgcgcgtgcagtgcgatccgaggggaggggtccaaggccatgatgaggagcgtcagcggcaccggctcggccgggagccggagcgatccgggcggcaccggcgagctgtcccgcttctccgtcgccaccacggcgtcgtccgcctcgcaaccttccgcaaacggtggcgcgcgcgggatctccttccttgacgccttccggtcctgcttcgtgcccccggaggcgcgctcgctggagaactccatgtccgacgaatcccacccctcccaccaactctcgcagtctttgagctcacaaggttctaacagtgggagcgtgtttgggagcaagcgatcgattaaaggaatgtatagtcccatgcacaagagttctttagatagggagatccctggcagcacaaaattctccttgccgcagatccagaaagcaacaaagaacttctcgccgaacttcaagattgggcagggtggttctgggactgtatacaagggtcagcttgctgatggtactcttgtcgctgtcaaacgtgccaagaagaatgtttatgacaagcatatgggtcgtgagttctggaacgagattgagacattgcaacgcattgagcacctgaatttggttaggtttcatgggtacctggagtttggtggcgagcagttgattattgtggagtatgttcccaatgggaatcttcgagagcacctcgactgtataaatggtaaaatattggaattctcactgagattggaaattgcaattgatgtggctcatgctattacatatcttcatacctattcagggtttgaccttcagatgtatattaaagatcatccagtcatccacagagacatcaaatcctcaaacattcttctaatgaacaattgtcgagccaaggttgctgactttggattcgccaaactggctccaactgattctagtcatatatctactcaagtcaaaggaacagcaggctatctcgatccagaatatctcagaacataccagctcaatgagaagagtgatgtctactcctttggagtccttctggtggagttggttactgggaggcgccctatagagccaaaaaaggcaatcattgagcgtgttaccacaaaatgggcaatggaaaaatttgtggagggcaatgctatccaaacactagatccgaatctggaagcgaccgatgcgatcaatctagcggtcgagaagctgtatgagctggctctgcaatgcttagccccaactaagaggaaccgaccgagcatgaagcggtgcgcagagattctgtggagcatccgtaaagattacagggagttggttgtacccacctctgccatgaactgaagcaggtcgtctggagcagtcaagtgaacaaaaagatgtatcattccagtttgcctctcttgattcgcttcaaagattggtggttgaaatcatccgattgctgggattctttcagttaccgcaagtggtcgtgaacaggactgatggccttcctagatgctgtgtttgtgctagaaaccagaaaagtccctgtgtgaaagtgttgctgagtaaacatgtacgagtatatatcagatatctaatggtgtgtatatcttgtaggttctcttatacaggtaagtgcatcacgcatgaagaaatctagttgtttccattgcatctattttaaaaaaaaaaaaagcggcctgaacaatattcagcgtatgattagcaagcaacactcaggagctgtacttgtgctcttccttt

SEQ ID NO: 86910 - DNA, 231 bp, Zea mays
  Clone ID: MRT4577_179269C.1
gtcgcccagcgtcgggagaggtcgccggatcttcgcggtacctgcggccatcgcgctggacgacttccctgtcggcagttcgttgacctgcaatgcttgccggactcgccgcgtgccacgacgccttactccctgcgctcttctcaggcgacccgggctggcggggggggggagcgttgtccggtgttgctgcggagctgcgccgctgcggccggcttgcctcgccggtgc

SEQ ID NO: 86911 - DNA, 153 bp, Zea mays
  Clone ID: MRT4577_17926C.1
caggtctattcaaacaaattcggcgcatcgtcatgcctccttccttaaacccaccccggcatcgggcacgccgtacgccacacctcaccgtgtcaccttccaagccagctatccttcgacgtaccagctacacacgacttacgagcacgcgaa

SEQ ID NO: 86912 - DNA, 475 bp, Zea mays
  unsure (1)..(475): unsure at all n locations
  Clone ID: MRT4577_179270C.1
ctcctatagggcgattggngatacaaagaggggccgggaaacgaatacttgcccgggaattcattattcgatggctgaagcctgggcaatggacaactgaatcaccgatggagaacatggtccggctcggcctccaccgtgtccggacgtcgccggagccctccctggtgagccgcacctgcgttatccatcagcttcacgcagctgtacacgagtgccggggagaaaccccctgatgagcacgaacctggaaaggaatggaaggatctccagaatgacgtttccccgggactgaactgcgtaaggacctgaccgacgtccgcttcggagtcatccgatacgatgcggcacgccagaggcgcggacatcaatgaaaatatgctcgacctactacttgttctccagcatacaacatgagctggtgcacttcccccatccccttcccgtaacctgccagcattggctgcggctagag

SEQ ID NO: 86913 - DNA, 170 bp, Zea mays
  Clone ID: MRT4577_179271C.1
caggacaagcacccactagcaacataaaaacacactagcgaaccaacaagggcagtcaacaaacccagcctagttatactaacagaccatgacagcaaggagcagctagagcaaacagcttacggaaaagcaggcagcaacaaaaggttacgtaagaaacctcgtgcctc

SEQ ID NO: 86914 - DNA, 574 bp, Zea mays
  Clone ID: MRT4577_179272C.1
gtgcgttctggtaactatcagaaccagactagttggtcacactatccatattatagtagtgagatgttctctgacaagcagcaaaagtttaccagcaatcacaattcgactgctcccaatgataaaaccaaggggcagtcgaggaaccaaaacacgagacagtatcctcatctcatggtaagtttttctgttcttaatgttcactaaattgttctagtttagtccatccaggatagagctcatgtcgaaccatatgctggcttttagtttggttcaaatgtttgttggcatatttcttgttagatcttactcattagcttcactgttgttcagtaaaggacctgtttattttttggggtggcaaattctctgtcttcatcccaaattatgtgcattgagggtgtagttatcactgtgggtgtggggcatccattgcatggagtcacatttaggttctgctgttgtgttccccaccccaagcaaccatgaggatttttctgtattggactttacgcctttctaacaattttttttcttggagggtctgcaaacaccaacttccccatcagtttac

SEQ ID NO: 86915 - DNA, 343 bp, Zea mays
  Clone ID: MRT4577_179273C.1
gacgaatctctactggtctgtctgtggcgattgacatgcagtagcaacagatacgtagtttttcattctggaatataatgagggtgtagactgatctcattgagacatacagggtgtagcatgctaggaacgtgtggcagatgccttgtaactgtatcatgacaacaatgaacgtgtccgtactgagctctggaataccgatcgctctatctaccacagtgttcggtgcttgttgaacatactgcctatgatgttacgttacaacctgactctacttgggtcgcccagggtctttacttggatatttcgcagaccaaaaccgtgttcatcttattgataacac

SEQ ID NO: 86916 - DNA, 398 bp, Zea mays
  Clone ID: MRT4577_179274C.1
ggatttcagatgggattcagacaagcaggcatttgaaacgacatatctatggaatttggaggcagatgagtgactctatacatatcagcatgcatgccgcggaacgtaactaataagcaacaataataataataatatgcacttatatgccatgtgctgaataattaataataacctactctatgtgtagagtattacatactgtactgaaccttgtttgtgtagttatgtattgtctacaagaactttgctatatgtagagggagataccacaaatagccattcctatggaatttgggatatatctcaaataactgtgtactgtcgaatagtatatagtatgtaattatgcatttaatagctccctacattaaataattgatatatgtatgattatt

SEQ ID NO: 86917 - DNA, 268 bp, Zea mays
  Clone ID: MRT4577_179275C.1
aagaagactactagtataggtgctaatgtgcctcgccctcgcgttgtcttcacaggtgtgagctagttaattctacggccggctttaggagtatgctgctgaggttatgctaacgttggtagagtcggttctgcggtctgtcattggatcagtattttcgttaactgttgcattcatgccctgtatctgtttctgacgaaacatcttaccatggacttgattgcctttgagcctgaattatccaggatcgatctttcgttgcctgctt

SEQ ID NO: 86918 - DNA, 2321 bp, Zea mays
  Clone ID: MRT4577_179276C.1
gatgggtcccacctcccttgtcgtccaacagaagccctgaacgtgaaaaggaatctacatttgctgctggtagaagcaggcgtgttgaagtggagcgtacattgactgactcacagcgtgatgaatttgaggacatgctgcgagctttgacattagagaggagccaaataaaagacgccatgggatttgccttggataatgctgatgcagctggcgagattgttgaggttcttacagaatccttgacactcaaggagacgtctattccaacaaaggttgctcggcttatgctagtgtctgacatccttcataacagtagcgctcctgtgaagaacgcatctgcattccgaacgaagtttgaagcttctttgccagatgttatggagagctttaatgacttgtatcgcagtatcactggaaggattactgctgaagctctgaaggagagggttatgaaagttctacaagtttgggcagactggttcctgttttctgatgcatttcttaatgggctgagggctacttttcttagatcaggcaactctggtgttgttccgtttcactcgttatgtggtgatgcacccgaaattgaaaagaaaggtagctctgaggacggaaatgatggatttaagcttaatgaagacggtgccttggctactggaaaggcagcagcgacaaaggagctattagggctcccactagctgaacttgaacgccgctgtagacataatggcctctctctgtgtggtggtaaagaaatgatggtcgccaggctgcttaacttggaagaggctgagaaggaacgaatatacgagaaagatgttgacatgaaatatgtgcagggtgaacagcatgtggttggaagagaggacagtggtgtgaatgctcatagtacttcaaggtttggtgaaggttctaatggtgatgaattagatgtctctcggaacagtatgagagctggtaaaggacgttctggtggatctgcttctgccgaacttgaatcatttccaagcaagaagccgaaatacgatcctgttttgccagcttctaaatggagtcgagaggatgacatcagtgacgatgaagataggaaaggtggccgaggcttgggattaagctattcatccggaagcgatattgctgatggtctcggaaaggtcgatacaacagaagctagtactgaccacacaagtcatcatcatgatacgattgttgatgaagagcacaggcagaagttgaggcagattgaaatttctgtcatgcagtaccgtgaatctcttgaggagcagggtctgcgtgacttggatgagattgagaggaaggttgccagccatcgaagacgtctccagtcagaatatggtttatccactccagctgatggtgctaacagcaggcgatcttctgaaagaacatcatcgtcgtcggagcggaaagagaggcatggcgatgcacatgatcatcctaggaaacggcgccggagccagagtagaagcttgagccctccaaggaagtcacaggagagggatcgagagcacaatcgcggtagggaccggtctcatggcaacgacgtggggagggatagggtacgcgggaaaagtgcaagccaagggcgagacgaccaccacgacagaagccgagatagagagaggacaggagaaaagggaggtgaccgacccgaaaaccctcgtcaccatgcaccatttgccctaagcgaagggcccaggagcattatttgagctgggctacacgcccaccagcatctccaacggtaaacatatcttcgcaccaggcaggttaccctggtctgctccatgcttcgtctgtaataggagtttttgaggattaagttgaggttttttagagaagacttgttcgtaactttttttttctttttttgcggattattcagatgtacccgatgtgtagtttatgctcaaaaccaatgtcgaatacagccagacccagaattgtcagtatcagacaaccgaggtatggactgcgattctgttcttccctggtggtgggctggtacgtgtagatctttgcacataccgtcggttgtgcgtgggcgcatgcgtcgacgacaatgcatgctgcttaacgtgctccgctccatgcttcgtatgcaataggagtttttgaggattaagttaaggttttgtaaagaagacttgttcgttactttttttgtggattattaagatatatcctatgtgtagtttatgcttaaaatttaaaaccaatgttgaatacagccagacccagaattgtcagtaacagacacccgaggtatggactgcgattctgttcttggaggaaaa

SEQ ID NO: 86919 - DNA, 204 bp, Zea mays
  Clone ID: MRT4577_179277C.1
tcgccgacgcatgggctggaaaatatgatcacattgatgatatgatacatacgacactttgcttggacgggggaactggtactcagattatgactggtggatttctaactgacaaacaggcatcttatggctggatgttcaatctcaactgatgggcacatttctacacgtatgatgtagggttgcactctggctctacagctt

SEQ ID NO: 86920 - DNA, 767 bp, Zea mays
  Clone ID: MRT4577_179278C.1
gagaacacaggcagaagttgaggcagattgaaatttctgtcatgcagtaccgtgaatctcttgaggagcagggtctgcgtgacttggatgagattgagaggaaggttgccagccatcgaagacgtctccagtcagaatatggtttatccactccaactgatggtgctaacagcaggcgatcttctgaaagaacatcatcgtcgtcggagcggaaagagaggcatggcgatgcacatgatcatcctaggaaacgtcgccggagccagagtagaagctgcagtcctccaaggaagtctcaggagagggatcgagagcacaatcgcagtagggaccgagatagggtacgcgagaaaagtgcaagccgagggcgagacgaccaccacgacagaagccgagatagagaggacaggagaaaggggaggtgaccgacccgaaaaacctcgtcactatgcaccatttgccctaaccgaagggcccaggagcatcatttgagctgggctacacgcccaccagcatctccatcggtaaacatatattccgcaccaggcaggttaccctggtctgctccatgcttcgtctgcaataggagtttttgaggattaagttgaggttttgtaaagaagacttgttcgttactttttttgtggattattaagatatatcctatgtgtagtttatgcttaaaatttaaaaccaatgttgaatacagccagacccagaattgtcagtatcagacaaccgaggtatggactgcgattctgttcttc

SEQ ID NO: 86921 - DNA, 565 bp, Zea mays
  unsure (1)..(565): unsure at all n locations
  Clone ID: MRT4577_179279C.1
atctgagcgacgatatgaacgcagaggtgcagagttatcacaccatagctactgggactgcccttaaacttcacaaggatgcagtagatgcacaacgactgggtacagtctttgctggaccacagacacctgatggagtgccccttgtgaactgcaacatgcagactgacactcccatcaccctggtttggcgtgctgacccgaaccctgtagtatattcgtgaatacctttactgaataaacacataatcgtacagggtgctagctcagactgcatactgaatgggaatgctaactaacaggatatggaggtacttcaataaaaccatcaggctcgtgatttgctctgccaacaaaataaaagatgggcggaccttataaaagttccacattcacatagacagcacatctgaacctttagctcttntttcgtggcgcctaaatagatatgactggccgaagctgtacatctgcctgagtggtaaaacgccctcttatatagctgaatccaaatgatctactgtcccctttatgagtctggtcaatgatcgaataatactggacc

SEQ ID NO: 86922 - DNA, 804 bp, Zea mays
  unsure (1)..(804): unsure at all n locations
  Clone ID: MRT4577_17927C.1
ggcgattgggaccctcgaggccggccgggtgcctcgcactccaaccccactcgcagaggttatatcgccatgttggctgttgcctctgacttccgtggccatggcattgccacaacccttgttaaaaaggccattgacgccatgacaaaacgcaacgccgatgagattgtcctcgagacggaagagacaaacgttgccgccatgcgattatatgagcagcttggttttctgcgtaccaagaaactgcaccgctactacctaaatggcaacagcgcatatcggcttgttctgcctctcaaatacatcgacctcgacgctggaccaaacgaccttgagatcatcaacgtctaaatctcacatgggcgtgagatttcttgttttaatggagtcaaatcatggatggccggtagtggaaatggttgaataccgagggcaacaggcagcgatggcatcgagtgtcatgtggaattgtcatgtttgttattgaatagctggagtttggtctatcgggtacgatgtttatgatgatatgatttgtcttttgcttccctcacacctcattgcccgattttcgaggtacctgttgggctgttacctcttgctctcctctctgcgcttggatgagtcatttgccgtgtgttgtcaggttttggaagatgtcagatgagttatagatcgacgctttcagaccccatggatttccgaagatatcccaatgtacgtatatgcatctaccgatttgtgtcagacttgcctttacagcaacataagcacaccanaaacatgactcaactggcttatagg

SEQ ID NO: 86923 - DNA, 365 bp, Zea mays
  Clone ID: MRT4577_179280C.1
ctgtgcggcgctcaggcggcggttccaatttcctctttctggaggtggtgttccttcagtgatctcatgggcaagatacaatttctttttgatcttgtatcctttaggcgtcttttctgaaatgatgatggtctatcaagctttgccttatgccaaggctattcatcctttgtattactatggactgattgctgtagcccttgtctacattccaggcttccccgtgttattttcacacatgctcgttcaacgtaaaaagtacgcgagaggtgatttaaataaaaagaagcagtaataaagtcaaaaggagacatcgacgatgcctccgttattgatcggaaaaaaaaaaaaaaaaaaggccccta

SEQ ID NO: 86924 - DNA, 526 bp, Zea mays
  Clone ID: MRT4577_179281C.1
ccactagaccgtcccacatcagctaaacacactccgctttcccgagtacggacacatggcggcggcggcggcgacgtccaacggcggcgcaacggccgcaaatgggccggcgcccggccggctggcctccctgtacagcgaggggcacacgaaccggctcctgcacgcccttcccctaccatcacgactccgctccaacttatcggtcgtcgacgggcccgccagctccgtcgcagacaaccccgatgagatcaacaagctctttcacaacctgctcggacaaccatcagggaggttggagccattctgcaaggaccttgatagcatcccgcagatgaggaacaacaggatcgtccttacggcagaggaccttggcacagctagcatattgggagtcaagctctaatcatggatacgcgcaagcgagattgtctggagaggattcaccttgagcgcctataaggtctagatgatttccactggccaagacctgttatattattgatactcttagctaatgcttggc

SEQ ID NO: 86925 - DNA, 220 bp, Zea mays
  Clone ID: MRT4577_179282C.1
ccgcgtgcgttctttctctctctctcttccggcgactgggcagtgagctaccgccgccgccctacgccgagtgctgaggtcttcgtcgatctcgagctcgcacaatggaagctgtccagtatgggatacaaccggcacaggcgtggccggagatcatcctcatcgtcttcgcgccgcaccaagcaagaagcctcgtgtgatgatgaccttgtgacatcac

SEQ ID NO: 86926 - DNA, 447 bp, Zea mays
  Clone ID: MRT4577_179283C.1
cgtcgtacccggccgccgccgccgacggcaaaggttggggtactgttacgtggcgtacgggaacccggcgcgggtcatggagttgagcagggcggtggcgccctcgcgcagaagagagcccgtgccgtgcggccgcgtgttgtccaccgggtgctggtatgctcattatctttaatccagaccacgctgtcactcgacgaggcaaaaaacaggtccatccacaactacgagcgtccaggaaccggctcggcgcatacgctggagcacgatctgcatcagctgcgacctaagagcatagccgtgccgtaatatctggggtccatggggacaaatgtcgtacaagacgaggggacgacgccgacgtgcaaggggataatctgcggactgagtcgtcgacaaagctctccatactgcaccacgaccactatgagcaactgaggggaaccc

SEQ ID NO: 86927 - DNA, 401 bp, Zea mays
  Clone ID: MRT4577_179284C.1
gcggtttctattttaaatactttatttccttcataaatttaggatcgctgcaacagacatgcaactaaaactcgtaatgaccattttatgctatatactgatactaaatatgctacactgtgtagataattatgcaattcggtatactgcgtaaaaatctgctacaggctgcatgcacacgaatttatgatggaaagaatatgcaatgaaaggaaatgaattgcatgcatagaaacaaaaaatcacatttaatgttttatttgcttcataaatataggatccctgcaacagccatgcaactaaacgcattagaactagtttatgatgtatactgaaacaaattatactacacggtgtaggtaattatgcaattacttacactgcgtaaaaaaatctggcat

SEQ ID NO: 86928 - DNA, 506 bp, Zea mays
  Clone ID: MRT4577_179285C.1
cttttgcctccgccgccgcttgagatctcaagtggcgttcccgttgttggcgccgttgccgcgatgcgcttccgagaacttccttaacatggggaagacacgtggtatggaagccgggcgcaagatcaagacccaccgcaagaaccaacagggggatcacaaggagacatgaagagccaacaggacaatgaatgtaagaaaccattggatgaaacattccattgcaagatcataggcatggggaatattgctatagaagacaggcatccaagccaagctatctaactgtgctatccggaagagcgcccgaatacagctagggaaaaacgtgactaagatcgccagctttgtgcctaacgacagttgctggaactacatagaggaaaacgatgaggtgctgatcgcgaggttcggcctgaagggccacgctgtgggagatattcccggtggccgaggcaagggggactacgatctcctgccaatgattaagtcgactagtcaaggag

SEQ ID NO: 86929 - DNA, 2151 bp, Zea mays
  Clone ID: MRT4577_179286C.1
ccggccgggataccttcggccgccgccatcttgtccctgttccccacccatatcgtgaacccgccgccgacgcagcagcaggagacgcgccaaggagagcccgcaaggaggcgactatgagggccaagtggaagaagaagcgcatgaggaggctgaagaggaagcgccgaaagatgaggcagagatccaagtaggctgatggggattgtggatggtggtgtcggcatagttgtgttacgtttcttcgatgcgtgagttcatggagagatgtcacatcctagttcgtcgtcaccgtttgccatgggtccaatggctcgtcttggaaacctgcacttcagtaggccatctatcgtggtttctagctatatccagagttttgtgctaagacaaatcagtcagtcgttttgtgaacctattatgatggagctttatttgctgctaatatcgacctacctgttaagcaaaaaaaaaaaaaaaaaaaaaaaaaaaaaaaaaaaaaaaaaaaaaaaaaaaaaaaaaaaatccctcgagctgcctctagtcgttcgtcgactcgtcgcttgcggcagctccgacgctaggggggcgcgggagaggagggatggatctctccccgtggtaggcctcatgcagccacacaagctacaggcaaatctgctacagctggagaaactagaaatgcatggactaattttaatcgacctgttagtccaaatgtgcatccataccctactggccttaaaaagtcatggcatcagttatttagtcgttcagcatcagtgtctccttgtcctgacgttacaacttcagctcatgatatgattcggaaggcagaaccaaatggagctcaaatatacaatgctcatacatttctctctcagtatccgcctctggactacaagccaagttcaagccagtctatgcaatttccaggttttccaccgcttaatggagcacctcccagtaacccactacctcattttcctgctggacatatgcctttctatgatgatgcagaatcaacactacttgaagaaccagagcaatttgaggacccatgctatgatccagatgcaattgcattacttgggccagtttcagaatctctagataacttcccgtcggacttagattgtggatttttctcgagtgatgttgctaaagagtcacatgggaggccttcaccaattgagtctcctctctcaagatctcgtacggttgaagaaaagcctatcgagcccccacactcctcagttgcaagaggccctggtggttccattctacccgagtctagcagtgaacaaggcacatggcaaatgtggagcacaccattggttcaggaaagtttaggtctgcaaggtcctcagagccagtggcttcgacaaaacacaaatcaattcaaccatagtgccaaccttttcagcagcggaggcggagcaataagtccccttggtactggtttgaatgacagtgatccatggctgcagaaagcacctttccagcaattgccacctgatacaccaagcctgttcctttcacatgaaatgccaggaaaattacacaatgacttggtttttgggtctccaaacaaatcagcccgtgagcacccctttggaccgcctggttatttgtggcccaaggaggaactggcgctgaatggagctcaggacggtggaggcgggcatatcctgtcgccgtctggtggcgcacgagttggcggcggcgttggcttattttcttcagcaagtcctgatgtacagtcactgtggtcattccatgaaacattcaatgaaaaagagagcatagaatgaacaaacttttataatagaaggaagggaaaaagtgtggagccaaggcttccttgcctcctctcttgtagggttttaccgtctttaccgaggtgataagctggactgtgttccttaatgatgcaaaaaaaagaagatatggggtcattttgtttcctagcactcacccaaaaaaaaaaacatgcgtcgatgcactgcattaggccttgtttcacctgatgtctttttttaccccggttccgcattgtttttgtcgcgcacaggtgatccatccgtccacggctgtagttatcaactgtgtttctggcacgattttggttttatacatcacccgctaacgttc

SEQ ID NO: 86930 - DNA, 1626 bp, Zea mays
  Clone ID: MRT4577_179287C.1
cattgggtacctcgaggccggccgggactgttccccacccatatcgtgaacccgccgccgacgcagcagcaggagacgcgccaaggagtgcccgcaaggaggcgactatgagggccaagtggaagaagaagcgcatgaggaggctgaagaggaagcgccgaaagatgaggcagagatccaagtaggctgatggggattgtggatggtggtgtcggcatagttgtgttacgtttcttcgatgcgtgagttcatggagagatgtcacatcctagttcgtcgtcaccgtttgccatgggtccaatggctcgtcttggaaacctgcacttcagtaggccatctatcgtggtttctagctatatccagagttttgtgctaagacaaatcagtcagtcgttttgtgaacctattatgatggagctttatttgctgctaatatcgacctacctgttaagtaattgcaaaaaaaaaaaaaaaaagcggccgcttttttttttttttttttcttttttttttagacatatccatttatattggtcttcaagtatctggctagtttacagcatctggtcgcgcaagcagtgcggaacctgggatggagtctcctggcgtgctacttttatttacaaggaggccgcttttttttttttttttttgacatatccatttatattggtcttcaagtatctggctagtttacagcatctggtcgcgcaagcagtacggaacctgggatggagtctcctggcgtgctactattatttacaaggagaaactcctatacatggtagatctctttgctgctactcagaaacaccatgcccgggcacatctacatatttacaagaggctgtggcttccgagcatgggtatctgcgctcctaaatcttcaacatgccttccaacacgcgaagaacatcagcgcgggtaactatacctattactttttcgtcctggtttacaactggtaatctgtggatcttcttcttgagcatgagaacagcagcatccatcacggttttgtcagacgatagtgtgatagctggagatgtcatcacttccgatatcttcgtcttggacccatgagaggctcttgcccggtcgttcttgacgatcaccccgacgcatctgaggccgctgtcgacgaccggaagccccgacacggcctcgaagtggcactcgacgtcctccagggtctggtctgctgtggccaccagcacgggtgtggacatggtctcgctcaggagcgccacgccgcgctgctgatcgtctgcctgggccgccggctcctgcgactcgaggtaggcgcggaggtcgtcgtagctgaggagggagcagttcccgggccacgcccccgagatgatcgcctcggggttctcgtccagctcgagccggaggctggtgtccgccgcgaaagtcgacgccctgcactggaactggaaggctctgctgcagcccctggacctggtgttgatctttgctcttctggcaatggggcagctctggaaggtgctgacgcatgccatggatggatggaaggaagggggactagcactagctgttggtgatcacactctccttagcttgcagttgcagggttctgccccgcccggccccgagaggcccaat

SEQ ID NO: 86931 - DNA, 269 bp, Zea mays
  Clone ID: MRT4577_179288C.1
actcaagatgaagggtgattactacagatacctttctagctgctccagtcttgaactcagcaaggtatctgtagtaatcacccttcatcttgagaatagaagactggagctgagagaaaggacgccgctgagaacacgatggtacgctacaaggctgcccaggacattaatctggctgagcttgctccaactcaccctattaggcttggactggcacttacattctcagtgttctactatgagattctgaactcacctgatcgcgcctg

SEQ ID NO: 86932 - DNA, 565 bp, Zea mays
  Clone ID: MRT4577_179289C.1
gggtaccggccaccctcctcggttttttttttttttttttttttttttttttttttttttttttttttttttttttttttttttttttttttttttttttgggaaaaaaaggcgggactttggatctttgttccaaaaaaaaacaggggtttttttaaaccccttcgggccccccaaagaggggaaaaaacaaaaaaaaaattgggggagaaaaaaaaagaggggccccccctaaaaacgaggggaaacaaggggttggaggacagggccccccgccaaaaacattttttaatggggttggggtttagcaccccctggaaccaaacaaaggccctggaaaaaaaggggaacgatccccaccaatttttggaccaaagaaacccccccattcttttttacggggtcccgccaaaaacccaaaaaattggccagggtgaactaagcctttagccccggaccaagctaaattggatttttttacctcagccccggggggggggccccccccgggggggtttttggggggccccccccccgccctaggtagctccccaacccgctgggg

SEQ ID NO: 86933 - DNA, 653 bp, Zea mays
  Clone ID: MRT4577_17928C.1
caagaagctcctccccgctgtcgccccctctcctccccgtcctcctgccacgatggcaggctctgctaccgccgccgccattaaggactcataccggtcctactactttgcggtggcgaggcggcggagcaggcgcctgaggagggcgagagtctggggtgccctggcgcgcgcgttgtggcagagggcggcggcggccggggccctggtgcgcgcgtcgggcgccagggtggcgtgctggctgaggaacgctcggccctacgtcggtgacctcttcgtcgggaactacatgttcctgcaggtggcgccgtcgccgatgacgatcacgggcggcggcaccgtggtgcccttcgcgcagtacaactacggctgtaaggccagggccgtgcatctgcaccgctaccctactggggcggtgctctacgagacatagcgacgtgccactacagctccgttgttcagccaacgatggatgacttcgtcgctggcctgtgttgtgttgaaatatgggtaaataaatgttgttattcagtttggatttggaattttgtctttttggcgaaattttccttcgcaattgcttgtttcccgtcctgtctcactttgttgacccatcaaaacagccatgccatgtcctgagatatgttcggaaa

SEQ ID NO: 86934 - DNA, 292 bp, Zea mays
  Clone ID: MRT4577_179290C.1
ggtcatcactatgtaaaaaaaaaaaaataaaaaaaaaaaaaaaacaaataaatacaaagagataaaaaaaacggggggccgccgtactagaggaaacatgatttacgaccgcttcctacaaagtaaaagttctattatagggccaaaaaaaaataaactagccgccgttttataacaacgtgacgagtaaaaaacccccggtcccaaccaaattaatcgggttgaaaataatccttttctcagctggtggatttataaaaaagaggccaccacttgtcgcttctaacaatat

SEQ ID NO: 86935 - DNA, 340 bp, Zea mays
  Clone ID: MRT4577_179291C.1
ccgggctcgagtttttttttttttttttttttaaggaaaaataaacttatttctcattgataaatagaaatttcttgagaaaatgaagtccgagattagccctaaaagaattgtgccataaaaattctaaaactagtgctataaaaaccagaacactcatatcaaatcaagtactcagatgagcaagtctcacaaggaaccaaatgagggacacttcgttcctagttgttcttggcatccccaattcttctttaagaattttaaattgcatttttagaaccctggccatacgctgtgtactctctgatcaaggctttccacaaaatcacagctcgtgccg

SEQ ID NO: 86936 - DNA, 285 bp, Zea mays
  Clone ID: MRT4577_179292C.1
ttctagatcgtgagcggctgcccttttttctgtggtttggttgtgttttttttttccttgggcttgaaacaaattcatcaacaaataggaactgctcatggtcgggacagggtgggtgatcggcttaggggtcgtcaagaaggtcatgtgcaggagctgctaggccgggctccaggtcacaagggggcggagcgaccacagccacatggccgtccagcacgccacaaggcacgtggccgtggcccatgtctacctcgcggccgcgctctagtaccttgctcgtgc

SEQ ID NO: 86937 - DNA, 2937 bp, Zea mays
  Clone ID: MRT4577_179293C.1
acggctgcgccgctgctgggcctgcctggggggacgcgcctcgcctttccgccgcctcggcgtggcgtgattccgaagcgttgccgcggttgtccgcgttgctggtacatagaaaaacaccgcgtcttttttggagggctcgtctcggctggcacgaaggttcctcgcggacaatgccgagcatccgagctccggcatccaagcagacggccacgctacaggtggctgtcaagtgcaggccattgaccgacaccgagcagcggcgttcgcggcatattatacaggtcattgatgacaagactgtggtcgtgctggaccctgatctgtcaaaggattatctggacctcatccagaaccggaccaaggaaaggagctataccttcgatcatgtgtacgcgcctgggtgctccaattcggacgtgtataagaatatatcctctacaattgctggtgtagtccaaggccttaacgcgacagtctttgcttatggttctactggaagtggcaaaacttacactatggttggaacccatagcgatcctggtctgatggttcttagcttccgtacaatttttgagctgataaaaaaggacgacagtaaggatacgtttgaagtttcatgttcatatctggaagtgtacaatgaggttatctatgatttgcttgagagatcctctggacacctggagcttcgagaagatcctgagcatggcataatagttgctggattgagaagcattaaggttcattccgcagataggattcttgagctgttgaacataggcaacagtaggcgcaagacagagagtacagaagcttcggcacgaggttcacggtcacatgctgtacttgagattaccgtaaagcgaaagcagaaaggccaatatggtaaccaagttcttcgtggaaagcttgccttggttgatcttgcgggcagtgagagggcctctgaaacaaacaacttcggtcaaaagcttagagatggagccaacatcaaccgatcactcctagcattagcaaactgcatcaatgccctaggcaagcaaaataagaaaggtcttgcctatgttccctatcgcaacagtaaattaactcgtattcttaaggatgggctctctggcaattctcgaaccgttatggttgctacaatatcaccagctgatgatcagtatcatcacacaacgaatacactcaagtacgcagaccgtgctaaagagataaaaacacatgtccataaaaatattggaacacttgacactcatgttgaagactatcagaggatgatcgacaatcttcaggttgaggtttctcagttgaaaaaggaattagctgagaaggagcatcagttaagtgtaaagcctactgaaaaaactgcagatagtgagctatcttggttaaatgtcttgagccaggaaactggtgagaatgttcaagaacgcataaatcttcagaaggctctgtttgaactcgaagaaaccaataagcgaaaccgcatggaactccagcatcttgatgattctattgcaaggcatcaggtgaaagaaatggactctaccattctccaagctttaacatcaaggagacaagttattcttgacaacatccgtgataatgacgaagctggttctggatatagaaaggacatcgaaatgaatgagagtcgcaggcgacaactccaggatatgattgaagaggccatcagtaacaatggcaataaaacctacctgcacattctcagccagtacagactacttggaatgactaacgctgagcttcaaattgagatggctatgcgggatcaagttatacataatcagagggaagctctaaggagcctgtggaacattctctatggaacagggctaaaccagaagcagattcttaaattggctgcaaagcaagggttaaccgtagaaggctgtcctttgcctagctcaagcccagacgttaccacgccaccttcctgtcaacctcataggtttccatcgtttatgccatttcctggtccgcagtcagagccttattctccatctgcttgctttttccaacatggtttcagcactatgtctttgctgaaaaatcagcatgagacgcccacaatatgtaggcaggagcacctcagttcttactacatgatgtctggctgctcgccttactctggtgatggaaaacagtggtcaagtggaagacctacggcattcttttctactccagaaaaacctaaggaggctcagtcccaacacaacaaggaacattctggcagccatgatttcagtctgcacagaaaggatctgtggtccacggaaaggaaatgacgggcctcgagatccttctggtacttaaaaacacctgtgatggctacaatgcggcctgtctgatgttcctaacctcggtcgctgtgtgcaccatcttctgtctaccaccgacgttcccggggttcctgagatctgaagatatggtagtggtagatttcgccggagctgttgccttgcccacgtccattttggttgatcctgctgggcgttgcccactccgtccaccatgtacagtagatgcaagtcctctcagtttttttgggggaaggggggtggatatctgatttctggaccaagaacagtgtaaatttgccgcggttctcgccctccttcagtaaatccaccggtaaagctttccggattggtcttcaaatcgggcgggtgacgacgatcaggatgggagttgggtgactgatgaacagtctaagggctacagtagcatgtggtaggaataggatctcatcagtcatctctctagatcattgaataagccctggtgaggctcacctgccctggagaccacattgaagcaggagcagcgctgggcatgatggtccctccggccggaaaaaaaaaaaaaaaaaaaaaaaaaaaaaaaaaaaaaaaaaaaaaaaaaaaaaaa

SEQ ID NO: 86938 - DNA, 463 bp, Zea mays
  Clone ID: MRT4577_179294C.1
aggtgacactatagaagagctatgacgtcgcatgcacgcgtacgtaagctcggaattcggctcgaggcacaatgctaaggtttatttggttgggtagggctagtattacctctggaaacgggaaaacagaggagaggtccagttataactgaacaatcttaaactaaacacccatattgaattgtcgatgtaacggataggaatatctctcaaagcacacatgctgtttttttactgactaatttgtatggttgttgctctgtaacaatcaatcattaggagaagcaaccatatgtggaccaagctgggcagaagaagcaggactatgagaagactaaggcaaactttgataagaaggagagcacaagctcaaagaaggctaagactgaggatgaggatggctcgaagtcagaggttgatgacgaggatggcagcagtgaccaggaaaacgatgaccatgagt

SEQ ID NO: 86939 - DNA, 194 bp, Zea mays
  Clone ID: MRT4577_179295C.1
cgcgtccggtcaggcccccacccacccgatccagccccgggcggcggtgctgttgagtgccgggcgaggagcaacggcacgcggttcgtaagttcttgtgatgcgcgtgcgcgcgctgacgcggctgtccgatcgggtgggaggcacgggcgccgtcccggggcaacgcgcaccgtccccctgtcgttcgtcgt

SEQ ID NO: 86940 - DNA, 513 bp, Zea mays
  unsure (1)..(513): unsure at all n locations
  Clone ID: MRT4577_179296C.1
gagagagtgcatagaaacatacatctggggaggatgaaatagagtttctgtttgccacggatgcagaaaggctcagccacaacacaaggtatgacatgtatttacatatatgggggggtgatatctcttacattacaaggcataaaagccgacatgattagcacaagtaaaatggcaatgggtggcaagagcaagaggaaaggtgggggaggcaatgtttgctgcaagtagggtggcgtgggccgatccgggcgctgatgtaggggttgtacggactgttgagtggtcgcatcctttcttgggccgaggtattttatctatatatattgattacgtatccgctcgttgatgtgacctatgttagtgcggctatgtaccttgtgggattaagtgtctgatgcctattgacgttccttgcgtattgctgccctgtttgcaagcgagcacacacaacaagaatggagcgcccgtgtttgttcccgntccttattacccttaaataaacacaaggtg

SEQ ID NO: 86941 - DNA, 741 bp, Zea mays
  Clone ID: MRT4577_179297C.1
ccggccgggagcacgttgtcgcggcgttgtgaggcgatcgaacagcgcatcgacgcctcggatcagcgtttccaagcatccgagcaaaaggccgaagcgcgattcatctcgcccgagatggatcacgcagagatcgacaattggaaaccggcgatcgagaagcgtctcggcaatctgtccctggagatgtcgcgcgcgaacaagttcatggaacacgaatccatggcgcaggactgcttcaagccgggcctccttcctacggacatgtcgtcgttcggacgcgcaactgctccacatcattccgccgacgagcctaatggcaaccacatggaattccatcaccgggagcgtgagttcgatcggattccgatcccaactcacggcccggtcaagggcatgtactacgacacctctcaacggatcgatcctgattcttatccattgtcgtatgctgctatggagggtggtcgttcgggtcatggcaaattgccccacattaactttcctcaattcgatggcgacaacccccagttgtggaagtcacactgtgaaaaatattttgatgtgtatgatgtcgatccagccatgtggatcaaagtagccactatgcacttcacgggtcgtgctgcgtgttggttgcaatcagctgaacgacgcgtacgccagttaccttggctagtgttttgcgctgaaagtctcgctagatttggccgcgaccagcatgaatctttgatttgcaag

SEQ ID NO: 86942 - DNA, 407 bp, Zea mays
  Clone ID: MRT4577_179298C.1
attaacacttttttgacttttcagacaatgttgatcttggcactgcctgcggcaagtactacagggtgtgctgcctcagtatcatcgacccaggttcgttcctgttgaattgccattatcttgtttctgtccgaactgtcactgcacaattcttaggccggcactgcacaattcttaggccctatttgtttcggattataatctggtcaaactatataatctaggtcaaataatttagggggtaaacaaacacctagattataggttcaaattatacaatctaaatcccggatcatgataatctcataatatcctcaaaagtagcttatttgagattatttttgtccaaagacccactacccatgtttatgtacatcaaaatcacgaaatttgtcatcactatattt

SEQ ID NO: 86943 - DNA, 436 bp, Zea mays
  Clone ID: MRT4577_179299C.1
tccggttcggggttcgagggtcgcgccacgcgtccgactcgcgtgccgttgaactctgttcgttattgtagcacctactgctaccacggatcgagttacatgctgcctaggttcaggatcggctgccatggaaccaactggtggcacagatcgtctctgatgatgtacaggcggagcagctagtatcattcaaccagctatctgacgtgagcgctgttaccttgttgatccagccacacgtggtgccgttctaccagctcgctgaggctaacacttgctacaatcttacaactgacacaattgttgccagtctaccaactcgctatgactaactcagcaacgtgctagctactgcccatcatgggtggtgccacatgttagacctcttaggagttgtagttgagtatgcaagtttattgtcagatgatcgtggctc

SEQ ID NO: 86944 - DNA, 671 bp, Zea mays
  unsure (1)..(671): unsure at all n locations
  Clone ID: MRT4577_17929C.1
gttgtatctttgtttaagaaagacacacttagtaagaaaaaaaaacaaatactaacacacgcttaagcgctacactcnttaacgttataaaaaggtgtccattagttcgaagaacgctttcatgagcagtcgctcaaccggtgcctatagttcgaacttcagttcacacttttcaatcgatgaaatgatacgcccgacagggacaatgacgaggatgtgcttcgattgtccggacactttggacaagttcattatgatgcgttcattcagtggcagagcacttgtcttggaataaagtctcaacactaaacctcaaccatctactgaacaggtggccagcagattgaataaatagaacaagctactgaacacttcgccagcagattgctatggtataaagtggaactaagggttagttttcattttcttttacggggcgtttggatcccttcattttagagaaattagaattcactcaataaagtaacttatttagtttggaatctgacattccaccactttccaaagttcatatataagtctatctcaaattcatgggatagaggataagaaatggttttatgtattagtaaaatttgtttctactctttaacttacatgacactcttcgtctcactcctctattgtaaaaatggacgctggtcgaccgg

SEQ ID NO: 86945 - DNA, 439 bp, Zea mays
  Clone ID: MRT4577_1792C.1
aaaaaaaggaaaaaccccgggcttaaaaaattttataaaaaaaaattggaaacccggtgggggggggtttttaaagggggaaaaaaaaaaaaaaattgtttttccaagaagagagaggggaaaagaaacaaccaaatccccaatttttaaaaaccaaagggttaaagcccggcccaaaggggaaaaagggggggggtttttttttttccccgggcctatgccaggggggggcacccgtaaaggaattggttccacgggtcccgcaccccgggaaggcaccaaggggtgaaaattttgcccggggggcccccctttaaggccgggggggggggttcccccctaaggtgggaaagaaaggggacctcaagaagggccaccggtttggaaaagggggaaaaggcggccccaaagggggcctggcccgggacggggccccggg

SEQ ID NO: 86946 - DNA, 644 bp, Zea mays
  Clone ID: MRT4577_179300C.1
atgtccccccccccccccaactgtcgacaccggctcgacacgaacccaaccggccaaccacctcccctgctggtcagaactctgcaagtccgcatcaattcgcactcccagcttcctttaccttcgcaacaagcaagccggtagcagcaagctagatcgcggggaagcgactcgcctccaccatcggcgctgctccggcgcggagaagcgtcctctcgcggcggctgggaagaccagtctccgccagtcccggcgactgcttccgtgaggtgcccttggctcctgggcgacgggctcgtggcggccggcgagatgaacagccatgcggccggaacaagcaacgggggacccggggatgcggccgcagccaggaggaacaccaggatggccaaggattcccaggtcacacagcaggaggtggcagcttggaagccgactcttactccaaaatggggtggctctggtttcctcatcggcgggggcatctttggtcccattggtggtggttcactggtaactgccagagatgttggtgagaatattgatcggtatgatgaagcatgtgtggcaggcaacatgactgagaacaagcttgcttacatccagaatgagaccttatcccaagagtggataaggaatcttac

SEQ ID NO: 86947 - DNA, 840 bp, Zea mays
  Clone ID: MRT4577_179301C.1
accgaaaaaaaagaaaggggagcctgtcgtgtctgaccgaggacgaaagaggcgcaggcgcaggcgcacatcctccccctccccttgccggccgtcgcctgctgctgctgtcgcaggcgcgccagcgctaccgacccgccgatgagcgtctagctaggcatcatctccgcgacgagtcgaccatcctgcatccacccacccacctacccactgcatcccctcttcctggttcctctacggcttgcctgcgaaccacccctgcgccgatccacctccgctgcctgtctgcctgcttctacatataatcgcgccggcctccgcctcgtcgcctgcgacccccaccacagaaccctccccctcacctccgctatcctcctccctggccgctccccgacagactccgatggccatcgtcgagaccgccgctgccgctgccgaccaccccgcgccgccgcgcgaggaggaggcgccgggcgccgccgccgacgccggggagcgcgaaatgcgggatctggaggacctcctctccaagctcaaccccatggccgaggagttcgtccctccctccctcgcctcccccatctccggctccggggccgggcacggcgcccacacgcccgcgccgctctccccagccgcctacggcttctacccggtcaacgccggcttcgcggtcgcctcgccgggccaccgcggcgtcgtcagcttcccggcggtcgccgacgcccacgccggacgcggcatgaagaaggacggagccggagggtttcgcggccaccgccacccccggcaggcggcggaccaatagccgcaccagcatggcgcagcgggacgaggcca

SEQ ID NO: 86948 - DNA, 567 bp, Zea mays
  Clone ID: MRT4577_179302C.1
agctcatcccttctttcattcgtcggcgccgcctgctctctgctggcgtcacatgttcgacaacgcctgccagatgctatcgccacactcaagaacacgccatactccatgacctgctactgccgcgctgtccctgaccccaagatctggatctaccctgttggcatgaatagaaactgcgcttgtgacatcccctactgtgagcaccttgtctcttgtgagaatgacaatgtctcccctgaggctcttgacgctcatcgtattgctctgcctctctacctgacccagtctgcatgacatcatgccttccaccttcgcgtccgtcttcaccccttccatgcccttcgtatcaacaagatgactttcgtgttgttgacaactgataggctcccagtgtaatgaggtgtggctttggcaagactcagggcacctgtgctagggagtacattgtgcactgcctcctttctgttcgatgtctggacaaccatgctgcacatgccattgtagctctgctgcaagcctagaacaagctacctggccccaaaagattattgatatgagaaagtg

SEQ ID NO: 86949 - DNA, 803 bp, Zea mays
  unsure (1)..(803): unsure at all n locations
  Clone ID: MRT4577_179303C.1
ctggccggggagtctcgacacacccatacgcacctaccctccgccaccgttcccccctccccatctcgcccgccgttctcgtccttgtagatctcctcgcacctcgcccatccgcttcaccaagggtttaagaccggcggcgatggcggcgaagctggcgcagctgcgcacacaggtaacgcgtgcggcggagttcgcctcgaagcacggctgctcctactacaaggaggtaatggagaagaacaagcagtacgtcgttcagccccccaccgtcgagaagtgccaggagctctccaagcagctcttttacacccgcctcgcaagcctaccaggtcgctatgagacactctggaaggagcttgattgtgtcaagcaggtatggaagaacaggaaggacctcacggttgaggatcttggcattgcgagtttatttggagttgagctctatgcatggttctgcgtaggcgagattgtcggcagaggtttcaccttgaccggctataaggtctagatgatttccactggtcaagacctgctttataattgatacttttagctgatgcttgtcgaaacgacgacgatggtacctgccttggttcacaattttgtttctttgtaggagtttacctagtgctgaatgccagcaaagacgggcacatcgttgcaacattgcctcaataatttgctcgctcaattgttgattttggtgcatgtaattctttgttggttgcattaaaacctgtgcggggctgatttggccgtttctttcttcctcaaataaattccttgtggtccttatngtg

SEQ ID NO: 86950 - DNA, 984 bp, Zea mays
  Clone ID: MRT4577_179304C.1
agagatcgactctcggcaacggatatctcggctctcgcatcgatgaagaacgtagcaaaatgcgatacctggtgtgaattgcagaatcccgcgaaccatcgagtttttgaacgcaagttgcgcccgaagccttctggcggagggcacgtctgcctgggcgtcacctaccctccgccaccgttcccccctccccatctcgcccgccgttctcgtccttgtagatctcctcgcacctcgcccattcgcttcaccaagggtttaagaccggcggcgatggcggcgaagctggcgcagctgcgcacacaggtaacgcgtgcggcggagttcgcttcgaagcacggctgctcctactacaaggaggtaatggagaagaacaagcagtacgtcgttcagccccccaccgtcgagaagtgccaggagctctccaagcagctcttttacacccgcctcgcaagcctaccaggtcgctatgagtcattctggaaggagcttgattgtgtcaagcaggtatggaagaacaggaaggacctcacggtcgaggaccttggcattgcgagtttatttggagttgagctctatgcatggttctgcataggcgagattgtcggcagaggtttcaccttgaccggctataaggtctagatgatttccactggtcaagacctgctttataattgatactcttagctgatgcttgtcgaaacgacgacgatggtacctgccttggttcacaattttgtttctttgtaagagtttacctagtgctgaatgccagcaaagacgggcacatcgttgcaacattgcctcaataatttgctcgctcaattgttgattttggtgcatgtaattctttgttggttgcattcccccgtgtgcggactgatttctgcctttctttcttccctcaaaataaattccttgtgttccgtatgtgatttttttggatgaacataacagaatgaccagtttctggaaaaacaaaac

SEQ ID NO: 86951 - DNA, 1803 bp, Zea mays
  Clone ID: MRT4577_179305C.1
tttttttttttttttttttttttttttctaaaagctggggccttccaatccgacccttagtaacatcacaataaattatgtttgagatgttacaatagaaaagagatgtcaactcagatatacaaggggcgttcaagtaattgtctgcaaaattacaagcatagatacacaagaataatttatggagtcaagcggtataatacaagcctgggttcaggcatctgaaaatgaatacagacgtttgtttgctctcacaagccataatagagttgcaattgcagcaccaacccatgcccgtatgcccaacaaaccgcacgtaaataatcaacgcacactgacacagacataagttcttgcgtccgctggacctagagatcttcatatgcctctagcagataactcatcatccttttgatattagtagggaggctctgggttaaatgctaaagattccctccagatgagttcttttatatgcgcttctgtaaaggatggttgctcaaaatcaaagctgaaaggtgcagggcaggtaggttcatcattgatctcatgaagtgaagccaagtatggatgatgcagagcctcatcaactgtaatccgtctgcttggatcaaacacaagcatcctttccaacaaatcgactgcgccaggagacatgttgcggaaacgcaggcggaagtcctgtcttggaaactgtggtagttgtttcatgtatctttttgcattatcacttcgaagaaatcccaggcttgcatcatctggagagcctatgagctcagtgatcaattttaattgctggatgtaatcccgtccaggaaacaggggttgacgagtaacgatttcacctagtatgcatccaactgaccagacatcaatggcagcagtatactgtgaacagttcaacagcagctctggtgcccggtaccaacgagtgaccacatactctgtcatgagatctgtctctgaagtggtccttgcaagcccaaagtctgcaatcttgaggtcacaatttgcatttaggaacaaattgctcggcttcagatcgcggtgcaatatatttgctgagtgcacatattttagccctcgtagcaactgatacaagaagtactggcaatgatcatcagtcaatggctgatttgagcgtacgatctgatggagatctgtatccattaactcagtaacaatgtacacgtcattaaagttctctctagttgggggccgaattacatcctttaaggcaaggatgttctcatggtccatgtggcgcagcagcttgatttccctgagcgtccgcttggcgtcgatgtggttgtcgaacgcattgccaaccttcttgatcgcaacctcctcccctgactgcgagttgacagccgcgcagacaatgccgtaggcgccgcgaccgatggggcggatgggtggggcgtacttggaggagacctcgaagaggtttccgtacacgttgtacagcacgtagcggcccccgtgcgtcgccatacccttgatctgcgctccaccgccgccgccggaggaatccatggttcctttcgcctccttcctcgcctctctggaagggggcgtggaggagggacctagggttatggggctagggttggtgcagcttgaccagcgtctagtcgttgatgggcggcctcaaggactgtagtggaagaagcttccctccttttgacttgggcggcgactggggaatggggatggatcccgagcgcaacgaggaggaaggaggtggagcggtgtttgggggaaaacacctcatgtttttttttatttaaaaaaatctcgtgc

SEQ ID NO: 86952 - DNA, 3058 bp, Zea mays
  unsure (1)..(3058): unsure at all n locations
  Clone ID: MRT4577_179306C.1
ggatcaactcatatcaactgaccgagcgcttgtcaaaaaccaaacagaacaaggacccaggcaaaatccactgacggcaagagataggagggagatctcgtgatttccggtggcaaggttcggttttgatcccaaccccaggttcctcaccccgaggagaaaaggatccagattttcttcctctctagtaagttgcagttcgcggtggcgccgccccccgccgcttcctccgtgttgcgcggttccgatttggagtgagggggagcgcgtgccgtgggattcccgttcggatctacggagtgggcagctttcctgctccaattcggtcggccagcaacgaaggcccttgaatcttgttgatgcgcggccagatgcgggaagcgtactgtgagaaggtttcttggaatcttcgtccgggctccgtggagtgaggtccctcgcccgcaaagctcgcaccgtcgtctaatgggcttcttcagttagcagattttggtctagctacattctttaatcccaatcaaaaacaacatttggacaagtcgtgtagtaacattgtggtaccggcctcctgagcttttgttgggttctactaactatggtgctgctgttgatctatggagtgccggttgcattcttgctgagttgctgtcagggaagcctatcatgccaggacgaactgaggtggaacagttacacaagatttttaagctttgtggttcacgagccgacgacttccgcgcggagcgaaaattgatcagattcttagagttcacgagcgacagatccaacaggcggtacgaagagcccgccttgacaaggggaagggaaagcacaacggcgagagagaccagtcagaggcactgctgtacaccaccgggaatgtcagggctgatcgctgaaaagttcagtttggtgtggacccccgatttgagcaaccatcagaagcgtagaaaatagcatcgagtcccttctatttttccacaccaagtggagaggtttttgctttgccagaaactccaactcctgatgcggtttggtgcccaggagatacagcagccaaaaaaaaaacctgttcctgtagagatttaccacccagagtttagcattaggctgtctaaaatattttttttctctcaagatttgttgctggttatccatagccatcagttgtatatctcaagtcaagagtactctccctgaaagttgatccacatacctgttttgacagaagcttggatcttgtatttgaatacatggagcacgaccttgcaggacttgcagctacacctggcttaaaattctcagaacctcaggtcaagtgttacatgcaacagctactttctggacttgatcattgtcacaaccgtggtgttttgcatcgggatataaagggtgcaaatctcctacttgacaacaatggcattcttaaaatagcagattttggtctagctacattctttaatcccaaacaaaaacaacatttgacaagtcgtgtagtaacattgtggtaccggcctcctgagcttttgttgggtgctactaactatggtgctgctgttgatctatggagtgccggttgcattcttgctgagttgctatcagggaagcctatcatgccaggacgaactgaggtggaacagttgcacaaaatttttaagctctgcggttcaccatcagaggagttttgggctaatttgaagttatcccgagctaccatattcaagcctcagcatccgtaccgccgatgtgtgaatgatgtatataaggactttcctactactgctttaacacttttggaccatctacttgccgtagaacctgggaataggggtaccgctgcatctgcccttgacagtgaattttttacaacaaagccatatgcctgcgatccatcaagtctacccaagtatcccccaagcaaggaatatgatgctaagcttcgagatgaagaagctaggaggcaaagagcagctgctaaaggacaggaagctgaagctggacggaggaagcaacctcctgcacctgatggtaatagtggattgcagcaccgccgagttcaggtgaattccaaaaacagcacttacaagttcactccaaaggaggatgtttctggatttccaattgatccgccagcaagagctgctgcagacaatggttaccctcagcgcgttcctttgatgcaagctggccgttcttcctccactctgggcagatcaagtgggatggatccaaaggcccaaagattccacacctcccaaattgtcactactgagatgtccggccaatctactgcatctgggcagcgaggcaatgctcctaagatgtctaacctcggggaaagtgccaggagacaatatcttcgagagcatcggtccagttcaagatacagtcaactcactgctgcggacccttctgacaggcctgaatggaaccatcaattccaagagcggccatcgtcttcccatcggaaggatgatgctgtggcaaacaaggagcatacggtggtgaacgggacaaagaagaacagaatccactattcggggccattgatgcctcctggagtgaacatggatgagattcttagagagcacgagcgacagatccaacaagcagtgcgaagagcgcgccttgacaagggaaagggaaagcacagcggtgagagagaccagtcggagtcactgctgtgtaccaccgggaatctcagggctgatcgctaagttcagtttgagcagtcatcagaagcaaagaaaacagcatcgaatcccttatattttttcggttcccccgccccaccccaacccccaagcggagaggtttttgttctgccagaaactcaaactcctgatgcggtttggtacccaggaggtgggcagctgccaaaagaaaacctgttcctgtagagatttaccgccccagagtctagcatatgcggtctgaaatattttttccctgaagatttgttggttatccatagtcctcaattgtatatctcaaaagtactcacccccaaaaatgaaaaattgatccatacactcgtttttgcnnnnnnnnnaaaaaa

SEQ ID NO: 86953 - DNA, 393 bp, Zea mays
  Clone ID: MRT4577_179307C.1
ctaaaacacacactggttgtggtggttacaaattggccatgcttctgagatgacgatggagttgatccccttcctagcttgtccatttactcttgtccatcaatcattaaaggaaaactcatctatcaacagtaatctaaatatactatagtatattatgattttgtgctatgcatcgcagttggtaaagattttgacctactgagttctctgagcatataaggttgtgtccagcagcgtgcgtcctggatctggatgcatatcgaaggtactagttctgtgacttctaaaagatcttatttttgatgattttggtgtaaaatatcatcgcagaaactgaggaataaacatcagaattcataaatctattgcctgctggcactacagttaccg

SEQ ID NO: 86954 - DNA, 735 bp, Zea mays
  Clone ID: MRT4577_179308C.1
ttctgcaggacttccgcctgcgtttctgcaacatgtctcctggtgcagtcgatctagttgtagaaggatgcttgtgtttgatccaagcagacggattacagttgatgaggctctgcatcacccatacttggcttcacttcatgagatcaatgatgaacctacctgccctgcacctttcagctttgattttgagcaaccatcctttacagaagcgcatataaaagaacttatctggagggaatctttagcatttaacccggatcctccctactaatatcaaaaggatgatgagttatctgctagacgcatatgaagatctctagctccagcggacgcaagaacttatgtcagtgtcagtgtgcgttgattatttacgtgcggtttgttgggcatgcgggcatgggttggtgctgcaatagcaactctattatggcttgtgagagcaaacaaacgtctgtattcattttcaggtgcctgaacccaggcttgtattataccgcttgactccataaattattcttgtgtatctatgcttgtaattttgcagacaattacttgaaaaaaaaaaaaaaaaaaaaaaaaaaaaaaaaaaaaaaaaaaaaaaaaaaaaaaaaaaaaaaaaaaaaaaaaaaaaaaaaaaaaaaaaaaaaaaaaaaaaaaagggggggccccttttaaaaggaccaaattttacttacccgtgcatgcaaaagaaataccttttttttagggccc

SEQ ID NO: 86955 - DNA, 286 bp, Zea mays
  Clone ID: MRT4577_179309C.1
gacgaaccgaccaaggtggctcggatatgtgattcaattcgacagacgcacttcctgaacatctataggccaaactgcatgggatgcgtacggtgtgcagaacgaggtattcttcgccacaggcaccaaaatctagctaagcagcagctatacaattctagacagacaaaagaaacgcgaggtatgcctgcgcgaggaatatgctgcgcacggtcgtctggccgtctgctacatcaagtaacctatgacgctaccgatgaccgaggggcgaccgtgctcgctcatg

SEQ ID NO: 86956 - DNA, 413 bp, Zea mays
  unsure (1)..(413): unsure at all n locations
  Clone ID: MRT4577_17930C.1
gcaggctttgacggggtggcgaggatgaaggcgattatgatgaggaggacatcggaccactgctcagcttcgatgagatgtttcacctccacgcggcgtgcggcgtggcgcttccaggcgacatgatggaggcaaaccggtgccgaggatcccacagtcgtggacatcgccgggacgcagctgatgccgaaggaggaggcgctccagctttgcaccggctgtgtccacttctagacttccttgcctcgcctatcacctccaggaagtgatacccaccttggaagaatttggggatgaggatcccacgtcgcaacgttccatagtgcccctgcccccaccgatgtccacggccgtcgcgcccgggcatggcagtccgctcccacgcgatgcaagtccatccncaccgtcgcagc

SEQ ID NO: 86957 - DNA, 453 bp, Zea mays
  Clone ID: MRT4577_179310C.1
atggagagggatcgccaggatgcggcgcagaagcgccgggcggtcactaggattggggaccctttccgcgaagcgaagaaggcgcggggaggcacaaagtctgctgcccctggcaacagcaaaccaccgccggccgcgaagccggccgcccccgggcccagcaagtgttcggcgggtgcgagggctgctacttccggcgcgagcaaggagccctcggccgaggccgcgaaggaacaaaggccggcgtcgctggcgctcactaaggtggcagtggcatgtgttgccgactttgacacggacatatgcgtggcggattatcttgttgctggctgtcgccccggctacggtggcggccacctcgccaacggcggcgggtggggcgaagggtgcttcgcaggacctgtggtccgccttctgcgcgagcggcgagatttcgtcggccgctgtcgctaa

SEQ ID NO: 86958 - DNA, 284 bp, Zea mays
  unsure (1)..(284): unsure at all n locations
  Clone ID: MRT4577_179311C.1
ctggaatgctacccaggcatagcttgctaccttatacttttgcttgtgaganggcgggagtactataatatgttgggtggacttaatgattgngaatggtatgtgttacataattgtttaaatggaggtattggttgantgatgaggattaattattgaaaaaaaaaattgggggcatgtggtagataagtaatgatgtttaaatagagagaaatagattatttatttaaattgttatgatatatatatttatatttatgtatatatatatatatatatatata

SEQ ID NO: 86959 - DNA, 131 bp, Zea mays
  unsure (1)..(131): unsure at all n locations
  Clone ID: MRT4577_179312C.1
ggcgggagcttactcgctgcaatcnggccgcgaatcaacgcagatcggcgcgggcgcgccgcttgatgcccgatctgtgagaggggctcgccaccatgagggccttgctgctgctggcgcttctcctggcc

SEQ ID NO: 86960 - DNA, 539 bp, Zea mays
  Clone ID: MRT4577_179313C.1
gcttatcgataccgtcgacctcgagaacacattggtcatagaggcgtcgggttgtggatctgatctcgccgggctgcagcttggaaccatcatggctcttacacgatactaggagtttgtcgtctgctcctcatgggcccttgttgacactctggtcgctcaactcgatcacatgttcaccgagttggagaagaactaccgctgctgcaccccttccgactagacgctcattcgctgatgctaaatgtaatgcgcggactatgtcgtatatggtgacatgtgtgaggcaataaatgcagatagctattgaagctagtgaacaccctggtcatgtataaatggacgttggcatggactcgactgggagaggctgaatgactgccattgaataggctcgctgattttgagaatatgatgatggctatatcgtggtcaatagatgcttaggatatattcagtgcatctatagcccacgatattagcaatcattctaagccaaatatggagggtgttgtacagacgaacgcgataagcactct

SEQ ID NO: 86961 - DNA, 792 bp, Zea mays
  unsure (1)..(792): unsure at all n locations
  Clone ID: MRT4577_179314C.1
gggtacctcgaggccggccagatgcagcatgtgtgagatgagccgctggggctggggctgggctcgcccgacctagcctaccacctgtcctgcgcccgtccccccatgcctcccgccctcgtctccttccgcctcgtcgtgtttcgttttcgtttcgtttcgtttcgtttcttctcgttccggttccggcgccccgtacgtagtacgacgtgggtcccggccggacggaggaaacaggaaggaactcaactgaaattaatggactgcccgcgaaacgcatgtctgaacggccgggatatgcattggaaaagcaggtcgcagagacagcaaccggccccaacagcacggagatcgccggagtcgtccgcggctgcgtcaagaccgtcgtctctgctggcaccaccaccacccagcaggctaataaggacgaccccatctacaccaaggttggctacatcctcggcctccgcgtctcgcccagccaccggtacgtacgtacgtacgcactcgtagtactatcgtcccactgtgtactatatatacaatattgcgcgggtgcatggttgccatcgatcagtgctgcgcgccaatataatgttgttgttttgttcgtcgtcgtcgtggtcatcatcatggagaagaagaatatataatcatggttcactgttagctcactgttgccgtgtgcaggaggaaaggggtggggaagaagctggtggatcggatggaggagtggttncggcaaacgggggccgagtactcatacatggcgacggagcaggacaacgagcc

SEQ ID NO: 86962 - DNA, 986 bp, Zea mays
  Clone ID: MRT4577_179315C.1
gccggccgggctggggtgcttttctagagaagtaccctgccgcgtcacgcttcgtcctcgcctgctttggattcaacggctttttggaggccgaggccattggtgccatgcggccagcccttttcttctccatggttcccatcgatgtgtttttgttcggttctctcgtcagatctgtataaataggcgcctcccttctccgccattcctcggtcctctgaagcgtttcagttcatcgattcagttcttgcctgaggatccaggaagaggacagcaatgggggaaggtgcaggtgaccgtgtcctgagccgcctccacagcgtcagggagcgcattggcgactcactctctgcccaccccaatgagcttgtcgccgtcttcaccaggctgaaaaaccttggaaagggtatgctgcagccccaccagatcattgccgagtacaacaatgcgatccctgaggctgagcgcgagaagctcaaggatggtgcttttgaggatgtcctgagggcagctcaggaggcgattgtcatccccccatgggttgcacttgccatccgccctaggcctggtgtctgggagtatgtgagggtcaacgtcagtgagctcgctgttgaggagctgagagttcctgagtacctgcagttcaaggaacagcttgtggaagaaggccccaacaacaactttgttcttgagctggactttgagccattcaatgcctccttcccccgtccttctctgtcaaagtccattggcaatggcgtgcagttcctcaacaggcacctgtcatcaaagctcttccatgacaaggagagcatgtaccccttgctcaacttccttcgcgcccacaactacaaggggatgaccatgatgttgaacgacagaatccgcagtctcagtgctctgcaaggtgcgctgaggaaggctgaggagcacctgtccaccctacaagctgataccccatactctgaatttcaccacaggttcca

SEQ ID NO: 86963 - DNA, 169 bp, Zea mays
  Clone ID: MRT4577_179316C.1
ctctcacctattcccgccctcgtgtgttcgcgttgatcgcatggtctatgagcggaaggaggacgagcaccatcgcaagatggagctggaccgcggcactctgcctccgaggcagaggcgacagctggaccaccacggcgaacctggctgctaagaccgccggaagcgc

SEQ ID NO: 86964 - DNA, 791 bp, Zea mays
  unsure (1)..(791): unsure at all n locations
  Clone ID: MRT4577_179317C.1
gccgtgcttttctagagaagtaccctgccgcgtcacgcttcgtcctcgcctgctttggattcaacggctttttggagccgggggccattggtgccatgcggccagcccttttcttctccatggcctgaggatccaggaagaggacagcaatgggggaaggtgcaggtgaccgtgtcctgagccgcctccacagcgtcagggagcgcattggcgactcactctctgcccaccccaatgagcttgtcgccgtcttcaccaggctgaaaaaccttggaaagggtatgctgcagccccaccagatcattgccgagtacaacaatgcgatccctgaggctgagcgcgagaagctcaaggatggtgcttttgaggatgtcctgagggcagctcaggaggcgattgtcatccccccatgggttgcacttgccatccgccctaggcctggtgtctgggagtatgtgagggtcaacgtcagtgagctcgctgttgaggagctgagagttcctgagtacctgcagttcaaggaacagcttgtggaagaaggccccaacaacaactttgttcttgagctggactttgagccattcaatgcctccttcccccgtccttctctgtcaaagtccattggcaatggcgtgcagttcctcaacaggcacctgtcatcaaagctcttccatgacaaggagagcatgtaccccttgctcaacttccttcgcgcccacactacnaggngatgaccatgatgttgaacgacagaatccgcagtctcagtgctctgcaaggtgcgctgagga

SEQ ID NO: 86965 - DNA, 1399 bp, Zea mays
  Clone ID: MRT4577_179318C.1
ccggccggggtagcctaaacttgcggctactctgctgccaccacccacctcctctctcttcacctcccattctctctctccgccccctgcttgcctgctctacccacctcataaacttccccactccttcctccatttccatccattcttctccccaggctgccgccgctggcagccgcatatgctgctgctggtgctctgctactccttcgtcaatctctgctgccgtttggcattagacggattccagtcaactccatccattttgatggttaaactatcaaagatactgccggtgctgtgaatggctgctcaagttcctcagattctttaaattctgagttcatcctcaattcggggctcttggtttaagccgttggacgattcattgtaccgcggaggattttttatggctcatgttgcctcgtgacattgtggtctgaccaaaagctgcttttacatctccttcatgggctgttcagcttccaagtgttgttcacaattgaagtgctctttgtgctcaaatgggtgcctggggcaggcacctgactccccgagggaatccaggggaaagtcaagtcgggggagagggagggtagattctagtggttcagatgattcttctggtgatgatctcggggaagatgacgatgcttttaaccatatgaatgctacaagggaatcaactgctggcatcagccgactgtcaagggtgtcgtcacagtttcttcctcccgatgcttcacgcaaggttcaggtccctttgggtaactatgacctgagatactccttcctgtctcaaagaggttactacccagaatcactggacaaggcaaaaattcatagctactgcgtacataccccatttggacctagtcctgatgaccacttattcggtgtgtttgatggccatggggaatatggagctcaatgctcgcaatttgtgaagcgaagattatgcgagaacctgctcagagataacaggtttcgtaccgatgctgtgctggctcttcattctgcttttgtggcaacgaacacacagctgcatgccgacaacttggatgactccatgagtggtactactgcagtcactatcttggtcaggggtaaaactatttacattgcaaataccggtgattcgcgtgctgttatcgccgaaaaacaaggggatgacattgtcgctgttgacctttccatagatcaaaccccttaccggtttgatgagcttgaaagggtcaaggaatgtggtgctagggttctaacgttggaccaaatagagggcctaaagaacccagatgtgcagtgtttggggtactgaagaaagtgacgatggcgatcctccaagggttatgggtgcaaaatgggcatgtacccaggaactgcttttacccgtagcatt

SEQ ID NO: 86966 - DNA, 1247 bp, Zea mays
  Clone ID: MRT4577_179319C.1
atcctgcgccttattatcatcatctaggtgtaattacttccgtttgtgctaatcacctcgtgattgcctgcaataaggaacccctgcccccccaccttgctgatgccgtgcttttctagagaagtaccctgccgcgtcacgcttcgtcctcgcctgctttggattcaacggctttttggagccgggggccattggtgccatgcggccagcccttttcttctccatggttcccatcgatgtgtttttgttcggttctctcgtcagatctgtataaataggcgtctcccttctccgccattcctcggtcctctgaagcgtttcagttcatcgattcagttcttgtatgcttcttgttgtattggttgtttcttgtttctggtctaggtactaggactatagtaccaggatctgagtcgtttttttttgggtcttgcacctgtctgccgtttcttcccccccttccagaagtatgttctgttggtttcttgcctgcaatatagtttcgtggcgcagcgtcaagggtgtgtcgagactaaaagactggttgttggcagttgggtttatgtcttgctggaggggttttagttttaggatgtcatcgcagcttttatgttaacggatctgaaccgtttttcggtttcagttgtctctgctgactgaagcttccgcttccgttttcgtttcgctgtgcaggcctgaggatccaggaagaggacagcaatgggggaaggtgcaggtgaccgtgtcctgagccgcctccacagcgtcagggagcgcattggcgactcactctctgcccaccccaatgagcttgtcgccgtcttcaccaggctgaaaaaccttggaaagggtatgctgcagccccaccagatcattgccgagtacaacaatgcgatccctgaggctgagcgcgagaagctcaaggatggtgcttttgaggatgtcctgagggcagctcaagaagcgattgtcatccccccatgggttgcacttgccatccgccctaggcctggtgtctgggagtatgtggcggtcaactgatagtgagctagctgttgaggagctgagagttcctgagtacctgcagttcaaggaacagcttgtgcgagaaggccccaacaacaactgtgctcttgagctgcactatgagccattcaatgactgctttcaccgtccttctctgtcagagtccattggacctggcgtgcagctcctcaacaggcacctggcatcaaagctcttccatg

SEQ ID NO: 86967 - DNA, 832 bp, Zea mays
  Clone ID: MRT4577_17931C.1
atctgccgaggatcccacagtcgtggacatcgccgggacgcagctgatgccgaaggaggaggcgctccagctttgcaccggctgtgtccacttctagacttccttgcctcgcctatcacctccaggaaggtacgtacgtgtcatccccacccaccccctctattgtcccttcgctatgaatccccatcccctcgcttccacaatgccgcagtgatacccaccttggaagaatttggggatgaggatcccacgtcgcaacgttccatagtgcccctgcccccaccgatgtccacggccgtcgcgcccgggcatggcagtccgctcccacgcgatgcaagtccatccccaccgtcgcagctgccgaggaccccccttccgtagatgattttgccaccgcctacatcgaggagcactttgacgaggaggaagccaaggcgtcgcgcccataatcgtcaccacaaaactgcccaccgcccagcgacgaccctggccggctattcgtcggcaacatgaggtcatcgggggaggccgatgaggtcctcgacggcaaccggctcagtggtagaagttgcggccttcgaattgggcggcatcagtgcacctctaggaagccactcacgctcggtcggcggttatggcattggagcggttgtaggactgtgaggaggcaggccagtaccagttctacggtgacatctaggcatgtgtttggtagtccgcggcagcttttggtggccagaagctggtgaaagccgaaacaaacaggcaccatgtgtgccagccacctgttggttgtattggctcaccgaatgatcatgtttctatcgattat

SEQ ID NO: 86968 - DNA, 131 bp, Zea mays
  unsure (1)..(131): unsure at all n locations
  Clone ID: MRT4577_179320C.1
cggggctcccttcctcttcccccggccacgccacttccccgacccacgaccccgtggggtaggaccgncgaaaccccgacctaacgaccctgcacgcacaaataggcggactgcatacactaagaggataa

SEQ ID NO: 86969 - DNA, 320 bp, Zea mays
  unsure (1)..(320): unsure at all n locations
  Clone ID: MRT4577_179321C.1
gccggccgggtttcgaccttccgttcgattcccttcgcgtctttcttcctctgctggactcaagtactcccatggcggtgttgttgcttaattcactgcaaattagagcagaaaattatgtgtaagcaatttccattcgcgctgtcatctcttcctcgatcgaaggttgctgtgaatttgtagatgtttgcggttttgatgttgtggacaatttggtggctatatacggttgcttcgtccatctgtacttggcttnaattaacccaatcatctgctaggtctagatcaagatgaagagctcatgtctacnttggatcagt

SEQ ID NO: 86970 - DNA, 256 bp, Zea mays
  Clone ID: MRT4577_179322C.1
tccacgcgtccgcggacgcatgggcggacgcgttgattgaagagggtctcgagccccacctccaagagaggatgtgaacaagctgagttactgataagggggaacaacccattcacacgcacttttgctccaacccaacattattagttgataactagattttcttttctatatctctatcattgtttagcactctgaacaatgtaatgcaatgcagcgtaaatcaattcagtgagagaagtcatgccgccctact

SEQ ID NO: 86971 - DNA, 476 bp, Zea mays
  Clone ID: MRT4577_179323C.1
gtgtgcgcttgtttcttctcttgcttctgctgctcggcgcgggcatccgccggctttgacgcccatcccgctcggggcattgactgcttcgggggggcgggcacggtccccccgctgaccggcgacggcaacgcggcgagcctcggccgatcagggggcggggcacatcaaggggcacgagtgcgccagcacaacgggcaaaaacacagggggcggcaccgagcgggataacccggacgaccccatgtacctgcaccggtgccacctgaacgcgtcggcgaccgatgacggccagggtgatgccggtgtgcgtgccgggcctggcccccgccctcgtcccccccaactacacggagtcggagtacaaccgggtcctcaacggcagcgcggtcttcggcgccgggaacgcgcgcgagggccactgggtcgcgggcgggctcagcgccagcccgggatcccgcgactactcgccgcct

SEQ ID NO: 86972 - DNA, 439 bp, Zea mays
  Clone ID: MRT4577_179324C.1
ccggggaaaaaaaaaaaaatataaaaaaaaaaaaaaaaaaaaaaaaaaaaggggaggaaaaaaaataaaaaaaaaaaaaaaaaagggcgggccgactttaaaggaactggggtttccgtttcgcgaggtttccaatctctagtgacctcgttttttcgaaggtcaccttactttttattttagtggacccttgaatttaaataaactggtctctgggtatatgcgcgggggggccctgagtaaaacctcgttgttacccacctacctttcgtgatgggccattcctttttagccgcctgggctaatggcacttgccctcggccgtgtcctctttctcaacagttgcccgccctttttggcgagtgattaaccccctttcccgggccttttacccccagcgttgcggttttttttctcaggttcttggctccccttcctt

SEQ ID NO: 86973 - DNA, 424 bp, Zea mays
  Clone ID: MRT4577_179325C.1
ttcacgcaccagaaaacaccggaccggggggggaagccggggaagacgagagcgaggaaaacagggaagagcccgcgaaaacaccaaagaaggcagctgggcacaccacagaaaagcaaactgccaccaaagaaccgaacacgccaacgggctcccaaagcgaaacatcggacgtgacgacacccacccacgggaaaagcaccccgaaaaggagaagatgatgaagagaaagaccgacgggaggagcgcggcgaggcagccgatgcccgatgacgaacacacgacagacggcacagaggaacaggaccccgcgaaggagaaagggccacaaccgaagcagcaagaaaggcagacaaagcgacacaagcacacgagcacaacgggcgagaaacaagacgcgacaacccgacggcaagaggaacac

SEQ ID NO: 86974 - DNA, 242 bp, Zea mays
  Clone ID: MRT4577_179326C.1
gccgactccgactcattatatagaatgggtggtgccgatacatagccagcattacagcatagttgatagaacaaaaaaaggggctgctggattctccatcagccggaccaaattacacgaaatgtaacatcaaagagactaattaacatacaaatataaagataaccatcattccacataggaagcatgttttttggattgcccaaaataagctctaacgagtataccacacttcggaacct

SEQ ID NO: 86975 - DNA, 414 bp, Zea mays
  Clone ID: MRT4577_179327C.1
aattatctcgcgcgggacgacgcgcctagtggacggggccgcccttttttttttttttgggggcaaattcaaagcgcgtaagacctgatttacctaaacgcaagctcagaaacaccgcacatcaactggacacctcgtgcggccccacattcgcttcatcaccctattacctctacatggactacgccgactgcgagcccgctgacgatcccgttgagggactccagccatgccctgagctcgaagaagcaggcgcccttccacttagggacagggtgggcgtcctcagacctaggcgcgcgcgcagacccgacaaacgccgggagcaggtaggccgggcttccctagcgcgaggcggcagaacagtgactgctccacggaccatggcttgagccggaggagggtcgcccggca

SEQ ID NO: 86976 - DNA, 634 bp, Zea mays
  Clone ID: MRT4577_179328C.1
cccacgcgtccggcggcgcctcggtcgcgtgccccctggtctccagccatcgtgcggtacgattggccaacggccaacccatgagccttatgactacatacagatccggtgctaaaccctaacatttacgccgccgcccgcttgcctcgaccccgcgtacgctgccgccgtcgcgctagaagcgaacggagctccgcctcaagggaagccctcaggtgctcgctagaatgctccagctgcctcttgaaagaatacttggacttgagggtacccatgagtgtgtggaagatcaaggaagactaaccagggttgcagcggatatactctgatagtttcaactttcaagggagcaattggagcttccagcagtaaaaaggcacatcagtgaactgacacaacgttttgccggtcgaaagataatgcttggtgttgatcgacttgacatgattaagggaattccacaaaagattctggcatttgaaaagtttcttgaggaaaacccagagtggaatgaccagattgttgtatcaataagaactgacgtccttgagtgcatgaacgctttttgtgttctaccttcatttgctaatacttaatgcaagtctgcaagcatgtgtgcagcatagaagggtca

SEQ ID NO: 86977 - DNA, 845 bp, Zea mays
  Clone ID: MRT4577_179329C.1
ccggccgggactacactctgcccggccttttgatcccctggcgcccgtgctcgcctacgcggcggagattatgttaagctaatgctcctatcccagttcggcctcggagttgctcttgctcctcccctccacttcctgtcggcctcttgcgctttccggcctcggattctttgtgtgcccaccattgcatctagctgcggcttctctccttcgctctgcatctgagtcgagcactcgagctggagcatcgatccgcctcgtccttccagacgcggcttcagctagaatccatcgctctttttttagttcggtttccatttcccatcagagcttccaaccggttctactcgatttggatttttggagctggagtctcccagagcaaaacttcccctccccttccctcctcctccccccttgcatttgacatgaggaggagaagagacgctgcaatctcccccatgttataaggctaaggcatgctgtcgttgaacaaaatgcatttcctcaagttatattccagcaccagcagcaacagcaacagcttcaggaatggctcctcggaacaccccgcccggacgtcctcccagggcagcaacaaggccgggcggacggcgaggatggccgagtctcccaccggcctcagccccaaggtggaccgccgcacggcggtgagcgccgagagagagaaaaggaggccaccgacgacgaagctgtcggagctggagtcccagctgtcgcagctgcaagaggagctcaagaggccagggagcaactacactcctctgaactctccaggaagcgggccctgcaggaggccgacgacgccaagggcgcagcgcgcg

SEQ ID NO: 86978 - DNA, 863 bp, Zea mays
  Clone ID: MRT4577_17932C.1
gtgttttttttttttttttttttttttttggacaataaaaatggcacgcatttttttttttttttttttaataatgaacgggtcgggagaccgatgtgtttgattgattcgacagatacatgtttctttttacatatatactgatatacatgtatccgtgaccgtcactagcaccttacgtataaataataacacacatatatagacgacgaaccacgctcgatcgatgatgcatcagaaggcgaggaagaagcgcttgttggtccggccggtgcgtccgacggagccggcggcgtcgaggttcttggcgatgagcttgcgcgcctggcggctgcggatctccacacgcatgctctccgtcttctccaccttgtcgtaccccgtggtcgtcgtcgtcgccgccgccttcctcgccccgcccctcttgttgcctccggtgccggcgccggcgcgcagcctggacttgatgccgtccaccagacgccccagctgacccatcatcaccatggacgacgttaattacctctcgatcgggtcttctcagctggtggtgttggagggcgaggacgaggacgaggaggcgaagcaagaggaaggcggtataggaacgcagcgggtgggcagatctgtactcgctctctgtaccggactaccggtggcggttgtatttatggagacacaggacaggcgcacacacacactatcagttatactgcaagctcaaccataggcgtagatagagagtatcgtgggctcagcttgggagttgggagacagagagagaattaactcttcaatctcctcctcaaaccaaaaacactctgacatcgtcatcagcgaatggagttggagccatgacgact

SEQ ID NO: 86979 - DNA, 430 bp, Zea mays
  Clone ID: MRT4577_179330C.1
aagaatcttaggaaggtcttatacctgaaaaaatgggataatgggaacataacaacaacggccaaaacttttcctttttcacagaagcttagtgtgtgatggccaaccgaattaaaaacccccccatggttccggatcactttttctttttccccccttttggggtctttgaactgccaccgggaatgggcgctggctcccggttttttggccttcccggaagcttgggaaccaactttggtacttggaacataagctggttcttcggtttaaaaacaagaatggcgggggagcccccattttttttaagatggaccctgacccttcccacctggaaaaaaaccccagggggccccctataccaccccaaggggggggggaacctggggggggaacaggaattaaagaatttcattgcagggggggcccg

SEQ ID NO: 86980 - DNA, 153 bp, Zea mays
  unsure (1)..(153): unsure at all n locations
  Clone ID: MRT4577_179331C.1
aaacgcganaacaaaccctagtcatggtcggctcctcgacctgacgacgtggctgagcatcttcaggaggatgaagacgtgaaatgatgaatgacgcgacgtggctactcgatcggctcctctaactacaccagcaggacaatggcaacgacg

SEQ ID NO: 86981 - DNA, 1142 bp, Zea mays
  Clone ID: MRT4577_179332C.1
accaaatgggactataagcaccaagttttagcagctacccatatgcctccctggcgaatttttctgtgggtaaagttgattgaaattttgctacaaactcgaccgaaagcactatggcgtttattgtttcaaccgaataaagcttcgcgacggggaatgtattggtttaccctgatgggtcgtcgcgttttagtacatgagctgattaattttttctttggcgatcgccgagtgaaaaatgggcccacactacaggaattttggggaatgccacaagaacatcaagaaattcccttgagtatcactcgtaaatagctaaaaacggtcagaatattttttgctcaaccccatcacctctgccataggtaaaatcgaaacccccaaggcgatcggcattttactttttccttgtcactagctttttgtagtcattttttcatttgttgtccctggaccggtagacagtaatcaaaccgacggtggaatccgcactttggagtattccccaaactgatgaattcagcttcgctcacccccatcatcaggtcagcaacaaaagtgtagtccctggccattccatcgtggccgcgccatgggcgatcgccgccggggccgattgtttagttaccccctgtcccctatgccatctgcaactggattcccgtcaaccggaaattggtcaggtattggggcaaccattaaatttaccggtgttacatctgccccaattggtaggtttggccctaggcattgatcccaaggagctgggacttgaccgccatgtggtttctactaccccagtgttagctaagcttggtcttacttaacttatctaacaattagttcaggcaaataaggcttaactcgggtttactgcaagcgactggccatggtgatcagcccctgctgaccgataagaatttcccgtaaaaaggtacagatgaagacccagaggataggagctaggtcaacgccgccgatggggggcactagcttacgcaggggaattaataatggctcggtgggtagggcaatgagcttccatggccatttagtcagctctacctggggataccaagtgagaataatccgaaaaataaataacaccgtcatcactgccagcagaattcctaagccctggc

SEQ ID NO: 86982 - DNA, 199 bp, Zea mays
  Clone ID: MRT4577_179333C.1
ggaagactttgacgaggagcctgatgaatagtctatacataaaagcacctacgatctcaccgagatcgaggatcaagacttggtgaaagcccagaatataaacgacaacgtagtcgattatagctagactcgctacatctcatggcgcgaaatgacacgacattgttaaacacatagctcaccaacgttatatgaagct

SEQ ID NO: 86983 - DNA, 449 bp, Zea mays
  Clone ID: MRT4577_179334C.1
gttagcaacaagggaaagaagaccgaggggggactattgaaaacagagccgacctagaatctgtaacaaatgggacatatgaaagcctgtgcgagtttgaccgaaggaaggtgacttactgtgaacaacatggcaatcgcgcaaagcgctactgggatgattccacagcacccactcatgatatatacgacaatggtctacggagtgcgagccaggaacattattttgttatgtagcctacataggacagccataaaagagaccactaccgatgcccactcatagtgggcagtgggacctaactatgcctattcgctttacagaatggctttgaactaaagttcgcgaataaacaagcaatgcccatggctgtccgccttcatgtgtgaatctctatgttgtgaacataggtagagcatataatgatggccaatgggatgatttgaccg

SEQ ID NO: 86984 - DNA, 127 bp, Zea mays
  Clone ID: MRT4577_179335C.1
taatttaccgcctatcagcggccactcctggtgctcatcgcagacgtgtgtgacggcctcaacaacacgcgaaaccaaccccgtccccattctgacctcaactagccaccatggcttcttcgaagag

SEQ ID NO: 86985 - DNA, 175 bp, Zea mays
  Clone ID: MRT4577_179336C.1
ggatgccctacctgacacaggttaccatgtggcctcactaaactacgctctggattggaatagccactgcggcaccgatcgatactcaaccagtccagtcaattcccgctcagcatgcgaccatgactaccatggggattaaccgcagccattgcgacgagctgcagtcatgata

SEQ ID NO: 86986 - DNA, 329 bp, Zea mays
  Clone ID: MRT4577_179337C.1
gggatattttatggccctcaagggacgtttctacttaaaaacagtatatccatacatgatactgataacagatcatacgtggcctgttgagctttattatacttaaacacagcgcatctcatattaatcggtatttgcaacccagtatatggtgcgaatataaataatattacatttaccctgcgtccctagaatgggattattctttaccaaaaaataataaatactcctcatcggagcatggatcatagaaaattatataattactgaccttttttggagtgaaaagaccgttatatctgaaactggctgtgttctatttgaatcaa

SEQ ID NO: 86987 - DNA, 840 bp, Zea mays
  unsure (1)..(840): unsure at all n locations
  Clone ID: MRT4577_179338C.1
ttttgttacttgctatagcccgtggcatgtgtcccttcttgttgctactacgcttgattagtcagtctggtcgatgactaatcgcgactagtcgactgatcggtagctatacgagtaggttcgactagacaacttgaaaacattgctaggctctggccatatttatatgatgttccaacaaagcagttctttgttgattgagtaagcccccctgcggttggtacaccatatatgttggactggagagagcacatatacattctgtatgaggtttagtggattaaactagcaatatatctctatgtcgtttcttactttttcgtggataaaacttggtcattcatctgagttttagcatgcaagctcagaaacgttgtctcaaataggaaggtccatgccctgattaattcttaacgttggcactgattgtaagtagcaattttaatgcagctgtattgttgtcaacaacgcagcaggttactataaactatgaaaaacaggttatttagggtttggatattcttcattttgtcgtatgcactacagttaacgttgtgtacctgcaggctataataaaatgctctaacaaattctcctgtttaggccctgtttggaacacctagagctaatagttagccagctaataaattattagcagggttgagccagctaataaactaattgttagttgtgaggtagctaataattagctacagtattagctgatggtgtttgaactcaacaactaattnttagtagctaactattagtttgaggttcccaacaggaccttagtatccattatggagaaacatgatatgtatgcagtactatctgcta

SEQ ID NO: 86988 - DNA, 202 bp, Zea mays
  Clone ID: MRT4577_179339C.1
gatctaggtaacagaacagcatgccaacaagtccacgatgacaccacgaggtggacgcggcaacacacgacccaacgcgcaaagagggagcgacggctagcgagctgggcgagcgcggaccttccaaggaacggcgtcacgagcccccgacgagggagaagtggaaggaggcaagaagagagggacgctggcgagctaggaa

SEQ ID NO: 86989 - DNA, 492 bp, Zea mays
  Clone ID: MRT4577_17933C.1
attccagggtcgaccgacccgtccacccacgcgtccgggaggttggcaggttacagcaggacagaatggtcattgggtcagccaggtctttcaggatttcagccacctcactgccagttctaagtgtgtatggacaacgaagggagaacaactctgacgatgacagtgcatcatcctaggacagagcaaggctgagggacaaatcaccaagtcacaacactgaattttggaaggagcacagcacatcagctatgccatttttagctgctgaagcggatgtcgcattggcatttgccccgagacacatgtttaaggttgggaggacgaaggtcgggagggggtggtatacttttggatcctgtggaaattctttttgtacaaaaggaaaataatcgtaacaggttctctctcttgttgggtgacttgcagaaactgaggtcgaggcttgaaaagctgcccactttcagtaagtagtgcactgcagtttctggg

SEQ ID NO: 86990 - DNA, 852 bp, Zea mays
  unsure (1)..(852): unsure at all n locations
  Clone ID: MRT4577_179340C.1
ttgggtacctcgaggccggccgggnaattccattccacggcgtcgaaagaatcctagccgggggccgcgatggcgatggcgatgcgggtggaatccgtggaggaggcgaagcaggccgccatcctgcccgcagcgcaggagcagcgcagggtgttccctgcggggatgctcaagctgttcctggggctcatgctgttcggcgtggtgatggggctgtcagcgttcggcgtgttcctggcgcggcacgcggaggagatggcggcggtcgcgcccgcgctgttccggccgtgcctcggggcggctgccgctggcgccgctctgggagcgcttcttccgggggaacgaggaccgctactccatctacgtccacacgatgcctctataccgcgccaacttcacctccaactccgtcttctaccgtcgccaaatccccagtaaggctgtgcaatggggccagatgactatgtgtgacgctgagagacgtctgcttgccaacgctctactggacatatccaacgagtggttcgtgctagtgtccgagtcatgcattcccctcttcgatttcaacacgacctacgaatatttccagaattcaagccacagcttcgtcatgtcgatcgatgatcccggaagagacgggagagggcggtacaacctgaacatggcgcccgaggtcgagctcgagcagtggcgcaaaggctggcagtggttcgaagcagacagagacctcgccgtcgcgatcgtcgaggacacggtgtactatccgaagttcaagcagttctgcaggcccggatgctacgccgacgagcactacatccagacgatgctcaagatcgaaagcccgcacaagct

SEQ ID NO: 86991 - DNA, 519 bp, Zea mays
  Clone ID: MRT4577_179341C.1
ctctcctgccgccgccttacccacagatagtagcgaggctgcctcgcggtacctcttctccggcgaacggaaatggcaaccggtccaaaggatctgatgtggcacgctgggaggaacatagatgtccttccttgcgtacgatctcggcaacgagattgtcaatgtgcagatcaccaaggagccgaacatgctctacaacatgcactccttcagacactcggcgttggaaaacgaaaagactgcgattattcagccagctgtgaaggactcggctgtgcacctctctactaccttgaccaacaacgacaacacacctgggaagatcatccacaagactgtgatgcacaaggacatccgcaagatggccaatgctgtgaaaaaccaagataacgacagactactacagcgctgatctgacacaccacagctcttgctatgctaagactctctgtaccgcatgctcctacatgccgagcacggggtctggcacaacaacaggcatctctaagaggtaagttt

SEQ ID NO: 86992 - DNA, 1212 bp, Zea mays
  Clone ID: MRT4577_179342C.1
atggcgatggcgatgcgggtggaatccgtggaggaggcgaagcaggccgccatcctgcccgcagcgcaggagcagcgcagggtgttccctgcggggatgctcaagctgttcctggggctcatgctgttcggcgtggtgatggggctgtcagcgttcggcgtgttcctggcgcggcacgcggaggagatggcggcggtcgcgcccgcgctgttccggccgtgcctcggggcggctgcagcggcggagccggagccggaggaggggctggagcggtggacccgccccccggctcgcgcgcagcacgcgatgacggacgaggagctgctctggctcgcgtcgtacgcgccgcgaatgcgcggccggagcgggtacccattccagcgcgtgcccaaggtggcgttcatgttcctcacgcacggcccgctgccgctggcgccgctctgggagcgcttcttccgggggaacgaggaccgctactccatctacgtccacacgatgcctctataccgcgccaacttcacctccaactccgtcttctaccgtcgccaaatccccagtaaggctgtgcaatggggccagatgactatgtgtgacgctgagagacgtctgcttgccaacgctctactggacatatccaacgagtggttcgtgctagtgtccgagtcatgcattcccctcttcgatttcaacacgacctacgaatatttccagaattcaagccacagcttcgtcatgtcgatcgatgatcccggaagagacgggagagggcggtacaacctgaacatggcgcccgaggtcgagctcgagcagtggcgcaaaggctggcagtggttcgaagcagacagagacctcgccgtcgcgatcgtcgaggacacggtgtactatccgaagttcaagcagttctgcaggcccggatgctacgccgacgagcactacatccagacgatgctcaagatcgaagccccgcacaagctggccaacaggaccgccacctgggtggactggtcgagagggggtcccaactcggcgcatccagccacgtttggtcggggtgacatcacggaggagttcttgaagggggttcgagggggagagacctgcctatacaacggccggaatacgacggtgtgcttcttgtttgctcggaagttcgctccgagcgcgttgcagccattgttagagttagcacccactgtgctcggttttggttaa

SEQ ID NO: 86993 - DNA, 295 bp, Zea mays
  Clone ID: MRT4577_179343C.1
tctcctatcccgtcgcccggatccggcgcgccgccctcctcagcgttgctacagccacctcaacatcagggagcacagatcctgtatcgacgtggccggcgtcaccgtggcggtctgcgccgctgttttctgctgcatcgtctgcgtcacggcggacgtctccgtgctctccacgtgtgcacgcgcacgctgcgatgtgctgcaaggccgcccgcttgcgcacagtccacaggcactctgcctcggtcggtcacgggagggggatatagtaactcgtctaggaccacacaggcgt

SEQ ID NO: 86994 - DNA, 779 bp, Zea mays
  Clone ID: MRT4577_179344C.1
cttcgcttctccctccatgtacctatcaacccctccccatccccactcgttgaccacaggtaaagagagctcgttgcaggagcaaaggagcagccatggccgaagtcatcgtccagagggcatgcgcgaagctcagatctgccataggagatgaagccgttgtgcgttccaacttcatcggtgacctgcgttatatgttgggggcgctggagtccatccaaccggtgctggagagagccgagatggagccgttcaggagtataccggtggcgcgttggctgcagcttgcctgcagcgcggcctgcaagaccatagacactgtcaatgagctgcacgacgcgagaccacaggctgctgcaacgttgacaaggatgctgccccaccttgccatcgtgaagaatgccatggccatcgaggtgcaggagacgaaaaaactagtgatgcgggcagacgaggagaggccaagtcggtttccaaattattacaccgaaattaccgaggaaccaaaaactcgaccagtttctgaggaagcaatgatttttggaagaggatcagataaagagaggataatagccgccctgctatgtagtactgagcccaacatcacgcaagagcacatcaccattcttcccatctatgggcttgaaggcagcggcaagacaaccttggcacaaatggtatttaacggtacccactcccttcaaggctatgacttccgggtatggtttcatgtgtctccccagttggacttccatgcactaggtaactccattatttgt

SEQ ID NO: 86995 - DNA, 355 bp, Zea mays
  Clone ID: MRT4577_179345C.1
acacaacgggtgtctttattatctccttttcatcctctttgactcctagctgtgacgcgataaaacacacaattttttttaaaccatagggtcgtgaatctccaccgacctctccacaaaaacgcatcctaatctacaaaaaaactaccccccatgaaaagccccaaccaatgctcaccacgggtaaccaggcccccaccaaaacttccctgagcaagcacccctccgggcggttttccaagccctctcaaaaagaaaaaccttcccgcctacaacaaatctaattccttggggggggggaaaacccaaacgccccttcttttgagccccgattgccaaaaaaactccaactttt

SEQ ID NO: 86996 - DNA, 392 bp, Zea mays
  Clone ID: MRT4577_179346C.1
cggggccagcacgcgtccggacttatttgcacgaccgcgatgcagccgcagccgcggatctcgctgccagcgactgatcggggacaccgcgcaagggctcagccccgcaacccacgttaagtccgccttcgggatgagtcgtctccgggccggcgcgggccggccatcgccctcgactgcaactgcgactggcgcatagacctgtcatcaccacgagatcgttccgccctatgtcggtaaagatgctctgttgcacacctcaagctgcactctgacggactctgatgactcgaagtttggctatggcgcaacgtagctcactggtgcagtcgatttggtgggccactacaagctgctgtcaaatcatgatttcttttgcaagaaacctttgc

SEQ ID NO: 86997 - DNA, 683 bp, Zea mays
  unsure (1)..(683): unsure at all n locations
  Clone ID: MRT4577_179347C.1
ctttcatatttattcgcatatggattggttttctgaatatgttcagtctcatgctggtgaggttgttatcgaagatagatccacatgtgagattattggaatcaactctatttatatccaagttcatgatggcagtattagaaaacttatcgatgtccgttttgttccaaaattgaagataaatcttatttctttgagcactttagaagcaatgagattcaattttgctgctattgatggtgttcttaaggtttcacgtggcaaccgtattatcttgaagggcaaccgtttgaataatctctattacttgcaatattcaacaattgatgctaaagctgtttctattgcgttccagaagagaggttattttgatgatacgaagtcgtgctccaattccaagtctaatgattccttagacttggttgatattcaaatttaacatcctagtggtgtttgggaaaacagttttatagatttagcgtcaaggggagatttgttggataagatcatatgaccatatctctatcttctttgccttgttggataagatcatgtgaccctatctctatctcctttgcctatataaataggcccctcttataccctgtacttgaacacacataatagatctttttcctgtggtttttttctccttcacattgngggagttttttccacgttaa

SEQ ID NO: 86998 - DNA, 3783 bp, Zea mays
  Clone ID: MRT4577_179348C.1
gcacgaggcgcgccgcgcaggcgcaacgcaacaaagggaaaccccagccggaggagcaaaagctagcaagcgtgtccctccccctccctcactcccgtttcattccattcccccccagacgccgctaccgccgccgccgcacgcacgcttgccccgggatctggagatctggtagcgccagggggatggaggccagcgccgggctggtcgccggctcgcacaaccggaacgagctcgtcgtcatccgccgcgatggcgagccagggccgaagcccatggaccagcggaacggccaggtgtgccagatttgcggcgacgacgtggggcgcaaccccgacggggagccgttcgtggcctgcaacgagtgcgccttccccatctgccgggactgctacgagtacgagcgccgcgagggcacgcagaactgcccccagtgcaagacccgcttcaagcgcctcaaggggtgcgcgcgcgtgcccggggacgaggaggaggacggcgtcgacgacctggagaacgagttcaactggagcgacaagcacgactcccagtacctcgccgagtccatgctccacgcccacatgagctacggccgcggcgccgacctcgacggcgtgccgcagccattccaccccatccccaatgttcccctcctcaccaacggacagatggtcgatgacatcccgccggaccagcacgcccttgtgccctcgttcgtgggtggcggggggaagaggattcaccctctcccgtacgcggatcccaaccttcctgtgcaaccgaggtctatggacccttccaaggatctcgccgcatatggctacgggagcgtagcatggaaggagaggatggagagctggaagcagaagcaggagaggatgcaccagacgaggaacgatggcggcggcgatgatggtgatgatgcagatctaccactaatggatgaagctagacagccattgtccagaaagatcccgcttccttcaagccaaatcaacccctataggatgattataataattcggctagtggttttgtgtttcttcttccactaccgagtgatgcatccggtgcctgatgcatttgctttatggctcatatctgtgatctgtgaaatttggtttgccatgtcttggattcttgaccagtttccaaagtggtttcctatcgagagggaaacctatcttgaccggctgagtttaaggtttgacaaggaagggcatccttctcaactcgcccctgttgatttctttgtcagtacggttgatcccttgaaggaacctccattggtcactgctaatactgttctatctatcctttcggtggattatccagttgataaggtttcgtgctacgtttctgatgatggtgctgccatgctgacatttgaagcattgtctgaaacatctgaatttgcaaagaaatgggttcctttctgcaaaagatatagccttgagcctcgtgctccagagtggtacttccaacagaagatagactacctgaaagacaaggtggcgccaaactttgttagagaacggagagcaatgaagagagagtatgaggaattcaaggtcagaatcaatgccttggttgctaaagcccaaaaggttcctgaggaaggatggacaatgcaggatggaactccatggcccggaaataatgtccgtgatcatcctggaatgattcaggttttccttggtcaaagtggtggccatgatgtggaaggaaatgagctgcctcgattggtttatgtttcaagagaaaaacggccaggctacaaccatcacaagaaggctggtgctatgaatgcattggtccgagtctctgctgtactaactaatgctccttatttgctgaacttggattgtgatcactatatcaataatagtaaggctataaaggaagcaatgtgttttatgatggatcctttgcttggaaataaagtttgctatgtgcagtttcctcaaagatttgatgggattgatcgccatgatcgatatgctaacagaaatgttgtctttttcgatatcaacatgaaaggtttggatggtatccagggcccaatttatgtgggtactggatgtgtcttcagaaggcaggcattatatggctacgatgctcccaaaacaaagaagccaccatcaagaacttgcaactgctggccaaagtggtgcatttgctgttgctgttttggtaacaggaagaccaagaagaagaccaagacctctaaacctaaatttgagaagataaagaaactttttaagaaaaaggaaaatcaagcccctgcatatgctcttggtgaaattgatgaagccgctccaggagctgaaaatgaaaaggctagtattgtaaatcaacagaagttggaaaagaaatttggccagtcttcagtttttgttgcatccacacttcttgagaatggtggaaccctgaagagtgccagtccagcttctcttctgaaggaagctatacatgtcatcagctgtggatatgaagacaaaacaggctggggaaaagatattggttggatttatggatcagtcacagaagatattcttactgggtttaagatgcactgccatggttggcggtcaatttactgcatacctaaacgggccgccttcaaaggttccgcacctctcaatctttccgatcgtcttcaccaggttcttcggtgggctcttggttcaattgaaattttcttcagcaaccactgccctctctggtatgggtatggtggtggactaaagttcctggaaaggttttcgtacattaactccatcgtatacccttggacatctatcccgctcttggcctattgcacattgcctgccatctgcttgctgacagggaaatttatcacgccagagcttaacaatgttgccagcctgtggttcatgtcacttttcatctgcatttttgctacgagcatcctggaaatgagatggagtggtgtaggcatcgatgactggtggagaaacgagcagttttgggtcattggaggcgtgtcttcacatctctttgctgtgttccagggactcctcaaggtcatagctggtgtagacacgagcttcactgtgacatccaagggcggagacgacgaggagttctcagagctgtacacattcaaatggacgacccttctgatacctccgacaaccctgctcctactgaacttcattggagtggtagctggcatctccaatgcgatcaacaacggatatgaatcatggggccccctgttcgggaagctcttctttgcattttgggtgatcgtccatctttacccgttcctcaagggtctggttgggaggcagaacaggacgccaacgattgtcattgtctggtccatcctcctggcttcgatcttctcgctgctttgggtccggatcgacccgttccttgcgaaggatgatggtcccctgttggaggagtgtggtctggattgcaactaggaggtcagcacgtggacttccccgtcagtgtgtggtcgaagaagtatttttgcagatgttttgtgcccatatttcttttttcaatttttgtccctctgtagatagaaacaaggggagaaggggaaaaaaagtacttgtatttcttttgttccatggtggtggtggtggtgggcggctcagcctcgtgagtgcagtattgggcaaaccggaggctgcggcaaccttgtgcagttcggccacgaatatactagggaagatcgcgaccaatcaatcaatcgatgaccgagttcaattgttcagcaaaaaaaaaaaaaaaaaaaaaaaaaaa

SEQ ID NO: 86999 - DNA, 645 bp, Zea mays
  Clone ID: MRT4577_179349C.1
agtctctgctgtactaactaatgctccttatttgctgaacttggattgtgatcactatatcaataatagtaaggctataaaggaagcaatgtgttttatgatggatcctttgcttggaaataaagtttgctatgtgcagtttcctcaaagatttgatgggattgatcgccatgatcgatatgctaacagaaatgttgtctttttcgatgtaagatctgtcatcaaaatttctaagaagttcccttgtctaacatgatacattgaacttacaatgctgtttccctaatgttacattcatacagatcaacatgaaaggtttggatggtatccagggcccaatttatgtgggtactggatgtgtcttcagaaggcaggcattatatggctacgatgctcccaaaacaaagaagccaccatcaagaacttgcaactgctggccaaagtggtgcatttgctgttgctgttttggtaacaggaagaccaagaagaagaccaagacctctaaacctaaatttgagaagataaagaaactttttaagaaaaaggaaaatcaagcccctgcatatgctcttggtgaaattgatgaagctgctccaggagctgaaaatgaaaaggctagtattgtaaatcaacagaagttggaaa

SEQ ID NO: 87000 - DNA, 274 bp, Zea mays
  Clone ID: MRT4577_17934C.1
acgcgaactcctttacgcgctaatgcgacaaacacgtccatttataacggaggggtggctaccgggacgacaactacgggggggggggcgcgaacggccagcccaagggggtcaccaaggtctgaagattctgatcgatgcacgtggtacatgtgacataatatcaggcgcttctgcagtgtgaggacgtaataagcactacccatatatatatatggagcgtgttgacctgctacggacactactcactggggtacataatagggagctaggc

SEQ ID NO: 87001 - DNA, 776 bp, Zea mays
  Clone ID: MRT4577_179350C.1
ataccctagttcttccttcccgaaccctcgcgccgccaccgccgccgtctagcattttcctacacccaatctgatctgaccaagccctctgaacaccaccgcccatcctcctcctcctccgccgccgccgcccaagatgggcttcgacgtgggcctcgtcccctacaaccccgacgggtggggtccacctgaagttgccgccgcgccgccttccctcggtggtggctcctcgtctgtccccttcgctcccttctcccgctccgacaagctgggccgcatcgccgactggacgcgcaacccgccgggccccggggctttcgtcgcgaggccgagaaggagcgcgcccgccgcgaccgccactggcagcagaaccgccgcacgcaccaccagttcaaccgcggcgggccctcctcgtcgtctgccaaaccgtccgttgacatccagcccgagtggtcggtgaaggagcagatccctttctcatccttctccaagctctccttcgccgtcgccgaccagcccgaggatctcctcgtctgtggcgcagtcgagtactacgaccggacctacgatcgcgtcacccccagggccgagcgtcgcctcgagcgcttcaagtcgcggaacttcttcaaggtcaccactaccgacgaccccgtcatccgccgtcttgctgagaatgacacggccacggtcttcgccaatgacaccatcctggccgcactcatgtgtgcgccccgtagcgtccagtcctgggatatcgtaattcagcgtgttggcac

SEQ ID NO: 87002 - DNA, 507 bp, Zea mays
  Clone ID: MRT4577_179351C.1
ccggccgggccgggactgcactacatcaccatgccatacctatacgataggcgcgctgatttcacttctcattgtcacagcggcatacggaacgagctgaaacaaagtacacggatagatgagctacatgtcggacggcacggcgacctgaatcgtacatcatgcctcgccatcatcctgccgccgctcggggccgtctgcaagttcgagatgacgtgttgaaatctggatgtgccttatcctcaccttcttccgctaccaccccggcaacatgtacgccgtctgggtcatcaccaagtaagcggccggagcagagcgaaccacggccccctgcaatgactccgtcccgtgcgtataagatgccatgtcgagaaatgtgattccgttcttccttggtgagatgatgctgctcctgctgacgtaggggtgtatccacgtccttttaattctctagattagcctgctcggctgaagaaacatgagagaaagaacggcccctagggccct

SEQ ID NO: 87003 - DNA, 2436 bp, Zea mays
  Clone ID: MRT4577_179352C.1
aaatttccaaaaaaaaaaaaaaaaaaaaaaaaaaaaaaaaaaaaaaaaaaaaaaaaaaaattgcggcattggtcgagcggatctacatccatccagcacaccataccctagttcttccttcccgaaccctcgcgccgccgccgccgccgtctagcattttcctacacccaatctgatctgaccaagccctctgaacaccaccgcccatcctcctcctcctccgccgccgccgcccaagatgggcttcgacgtgggcctcgtcccctacaaccccgacgggtggggtccacctgaagttgccgccgcgccgccttccctcggtggtggctcctcgtctgtccccttcgctcccttctcccgctccgacaagctgggccgcatcgccgactggacgcgcaacccgccgggccccggggctttcgccgcagctcgcgacgccgtcttccgatttcgcggggctcgaggactccatcgggctcgcgtccgcggacgactcgtccttccgcctcgtcgatggcaaaccgccgccgcggcacccgcggtttggacctcgctggcgcttccagcagcggccccaactcccgcagcgccgcgacgaagaggtcgaggctcggcgtcgcgaggcccgagaaggagcgcgcccgccgcgaccgccactggcagcagaaccgccgcacgcaccaccagttcaaccgcggcgggcccctcctcgtcgtctgccaaaccgtccgttgacatccagcccgagtggtcggtgaaggagcagatccctttctcatccttctccaagctctccttcgccgtcgccgaccagcccgaggatctcctcgtctgtggcgcagtcgagtactacgaccggacctacgatcgcgtcaccccccagggccgagcgtcgcctcgagcgcttcaagtcgcggaacttcttcaaggtcaccactaccgacgaccccgtcatccgccgtcttgctgagaatgacacggccacggtcttcgccaatgacaccatcctggccgcactcatgtgtgcgccccgtagcgtccagtcctgggatatcgtaattcagcgtgttggcaacaagttgttcttcgacaagcgtgatggctctcagcttgatcttctcaccgtcaacgaaaccgcccaggaggcactccctgaggccaaggaagacatcaactccgcgcattcgctggcggttgaagccacatacgtcaatcagaacttctcgcagcaggtgctgctccgcaatggtgagaaggtcacgttcgacgagcctaacccgtttgccactgaaggggaggaagctgcttccgttgcttaccgctaccgccgctggaagcttgatgaggagacaagcttggttgctcggtgcgaggttcatgccgtgagcgttgatctacgcggcgagcgccagttccttacactcaacgccctcaacgagttcgatcccaaggtcactggtgttgactggaggaagaagcttgagacccagcggggtgctgtgcttgccactgagctcaagaacaatgccaacaagcttgcacgctggactgcccaggcgctgcttgccggcgcagacatgatgaagttgggttatgtgtcacggctgcacccacgcgaccagtacaaccattccattctcagtgtgatcgggtacaagccaagggatttcgctgcacagatcaatctcaacaccgcaaatatgtgggggatcgtgaagtctattgtggatgtctgcatgaagcttggagaggggaagtatgtgcttgtgaaggacccagtgaaaccacaggtccggctttatgaagtgccaaatgatgcattcgagaatgactacgttgaggaaccactccctgaggaagagcaagtgcgtcccttctccgaggatgttgatgccagcgcgaaggaaatggatgctgccgcagaagcggaggctactggaacaactgcaggcgctgagaagagtggtgatgtcgctgctgtgtgaaggcggtggctacaacctgaagaggtctttttcggaccttgaataaggttaccttggctagctatctactacaatcatgggcatctggatacaggtttgatgtttctaccatcgaaggttatgctattattgttcgctgaatcttgagttgtgttccctttatgtgtccttatggctggacttaaatggaatcctcaaactatattgcactttccaagactcacatgttgtggattgccagttctgtttactgtgatttgagttgtggtgattgcatttgcatttacttggccatattagtaccttcagtttgttggatgaatacatgatgccatgtgaatattgccatttgtgcaaaaaaaaaaaaaaaaaaaaaaaaaagaaaaaaaaaaaaaaaaaaggcccctagggccaaaattattttatatttaaaaaatattcaaattttaca

SEQ ID NO: 87004 - DNA, 288 bp, Zea mays
  Clone ID: MRT4577_179353C.1
aagacctttttttttttttttttttttttttttttttttttttttttttttttttttgacagcaggaatggtggttttattttccccgtacccactaacaaaaccttcttgtgcaaaaacaagggggggaaagcgaaaccaattgcgcgatcacccagcgttttcacaaaaaaaacccaatccgatgggatcgggcactcacattccgtaatttcccacagcagaggggggggcttgcctctggcgatgatttactactgggcgtacctaaaacgcgggcacgggggg

SEQ ID NO: 87005 - DNA, 415 bp, Zea mays
  Clone ID: MRT4577_179354C.1
cagcctgtctgcaccgctgacaggggccgagtccggaaggcggaacctaccccccagcggttacgggatggcaagccgtgccagggcgatcaggtatagtccgcccacctcaagagacgcgcaaggagggaactccatgattggagaaggattgcgaagactggtactgctaacaagctacctacccaaggacactgatgccagtgcatcggggctggatccgcaccaagcgataggtagctaggacaatatatcgctgcgcgcggctaaacaaggagccactccggatattggagacctcggcacccgaaccaggtccacagagcttgagccatgaacgtgctcgcagctaacatgctgaagccaggaaacgatgcccctgctaccgataggcgccggcatcatcgaccacttc

SEQ ID NO: 87006 - DNA, 295 bp, Zea mays
  Clone ID: MRT4577_179355C.1
cttcctcgttcccgcatcgacacgccgcttcccgtccctcccccctcttctctctcccctcccggccgaccaaaccctaaccctaaacccctcccccaccaacctcggcccagtctccccacccccactgacccggctccccacctccgactcgccacgctggcccgattcgatcgatgtacgtggccgtcctcccgacctcatgatggttttggctgcggggtgaaaagaggcacagcaagcgtcgatggcattgggagatctcatggcgtccaggctcgtccactcctcgcct

SEQ ID NO: 87007 - DNA, 457 bp, Zea mays
  Clone ID: MRT4577_179356C.1
attcggctcgagaatcagggcggactgtcccttctccaagggtgcaaaggcaggcactcctaaattgacaatgcacacaacgggctatggatttgtgcacatggccgatcctacagtcaaccagacatgaccgaatgcttggaatgccttgttcttgcaggcatatgcgtattggtcctgcagctggtacaaaaaatacagactgtgtttttcaagagacagtaccagacactgaaggcgctaataccgagaatgaacctatcaatgccaatacattcagtgttggactgcacacgaatgtacacacgaagatactgctaagacctgggttttaatcctgacagcgacatcctacatggtaaggatcccctgcagggccaagcagatggtggttcacctacatttccgttaccagacattatcctgcacaagcacttctaatagctacaaggagcct

SEQ ID NO: 87008 - DNA, 653 bp, Zea mays
  Clone ID: MRT4577_179357C.1
cttagcaaatctagctatctcatcatctctgcctgagctcactaccactactattgctagcttgatcgagatggcccgttctgctgttgctcaggtcgtgctcgtcgccgtggtggctgctatgctcctcgcagtcacggaggcggctgtatcgtgcggtcaggtgagctctgccttgagcccctgcatctcctatgcacgcggcaacggcgccagcccatctgcggcctgctgcagcggcgttaggagtctagccagctcagcccggagcaccgctgacaagcaagcggcgtgcaagtgcatcaagagcgctgctgctgggctcaacgctggcaaggccgccggcatccccacaaagtgcggcgttagcgtcccctacgccatcagctcttcggtcgactgctctaagattcgctgatcgagcacttgctgccatcgctgttgctatcgtacgtcccctacgccatcgttgctggatctacgcttagtacgttgaggtcacacacacgcacacacacatatatatatgaataaatgctctcatattatctcactgcgtgagagagagaacgcacgtccaagcagctctgcatggccggccactgttatatcgatgtttggttgttcttccactccccgagtttgctgtactt

SEQ ID NO: 87009 - DNA, 733 bp, Zea mays
  unsure (1)..(733): unsure at all n locations
  Clone ID: MRT4577_179358C.1
gacgcctgcaggtccggtccggaattcccgggtcgacccacgcgtccgggcagcggtgcgggctttgtggccgcccggggttacccgcctggatgctgctcggcttggttccgcgccgtcctctcgccgccgagctccggattctcctgtagggagccagtggcaagaaggggatccggaagcctgaatttctggggatgaaaattcacataagatgatgtcagacgaactcacagtgctggagccctctgcctctgagtctcgggaatttcatgaagacagattggcgcagctgttggggaacccagacaagcagagcttggagagtccctcctctcaggacgggggcttcactcagatgacagtgacccactggaagattcaaacaggagacacagcccaaacgtgcagtaagtcaggaagaaaccccattctcaattcaaaccttcttatacttcagagagaactcatagatgcggaggcccgttcctgtggtggtggtggcaaaggcttcccatttaattcagatgtagttccgcatcagatctcgcacacgggggagaagccttacaaatgtgatcattgtgggaaaggcttcagtcagacctccctcctcactgaacaccagagagtccacactggggacagactctgtgtgtgccacgtgtgcggganagacttcgttcactacgcaagcctgagggagcatcagcatgtccatactggngaaaag

SEQ ID NO: 87010 - DNA, 288 bp, Zea mays
  unsure (1)..(288): unsure at all n locations
  Clone ID: MRT4577_179359C.1
gcataggacgactcgatcggtcgtgcgagcattccggctcgttgtcggtgtcgnacctcgactcagtcctccacggctgaggtaccattcacgtcggctcgaattgcgccaatgagggtggctcttgtcgatggctgatccggagacctaaccaccggggctttgtgtctgcagcgtcgggatcgagcggcggcggcgatagttctgcatgatagcggcagccggagcagcagtggcagcggtcgggatcagaacggcgtcggtcccttcggccaaatgcgcgtcctc

SEQ ID NO: 87011 - DNA, 209 bp, Zea mays
  Clone ID: MRT4577_17935C.1
tcgaggagctgagctgaggatcgagctcagggaacaagcaaacagccatagctcatatccaggtcgtgagggcaggggctattagccggcagtgatcttcttgtatccgccgtagcctcgatcgatcggtttgagctcgtggatatgggggagcaggagaacaacaagatcggcggcggcggcggcaaccacgccatggcggtggacga

SEQ ID NO: 87012 - DNA, 237 bp, Zea mays
  unsure (1)..(237): unsure at all n locations
  Clone ID: MRT4577_179360C.1
cccgttcctccncatttggttgatcagtgcgtggcttattgttgccaccgaagatccccttgagggtcctttcgttcaggatgttcatcggttgggtcttgaactcagggtccttatgcggcgcaccctccagcacagcgtctcccctctcgtcgtgatcacgttcgaaagcttggatcatagcgttggtgttggcagtgcattgcacgctgcggtggacccctgcgttgttgatct

SEQ ID NO: 87013 - DNA, 810 bp, Zea mays
  Clone ID: MRT4577_179361C.1
gcacacctackacttctggagcycctcgtccggcacgagggcsggggcccycctcgtggtggccttcctaggcatgacggtcctgcgttgccgtccttctacaacccccyagactaggaccatctccatgtkgtcgggcctaggcacatgtttttccttkatgcgtccaccacagcyggctctgcggattacaccccactatggtgccccttcgccttcggcgttcccttcttcagcaccacttgtyacctctkcctctycttccgctcctggggaaccccgcctcgcccacttggtchcstkgggtggcggctaggaccagtagtyactcgccggctagttwagcaccahgtcgctgacaccatcycccacaacgtcggattkggtkgtggactccsgagcctccyagcatgccactcctgatgctggtatgttatccatgctttccatcttctattattgttgggaacagttccacccyaccggttacctcagtaggtkactyggttctttcggcatcgttttacctcaaaaacattcttgttgctccccacataatctagaatctttattatgttcgtcggatyaccaccgacaactcttgttccatggagtttkacccttttcatttatwttttaaggatttggctaccaggacccttctcgcccacygttacagcgcggagcctctatacactctkactacyttcttyctccaccgccacgtcctcccygcatgcctyggttgccaccatttcgtccatcacttggcatcatcgtctcggacatctcgggttttatgttatatcc

SEQ ID NO: 87014 - DNA, 501 bp, Zea mays
  Clone ID: MRT4577_179362C.1
gttcatattattcatgcggttctgtttcttttggtaaaaggaagggaaacggacccgcaaaacgtggccaaactgaaaatgaagctggcgacccagaagcacacgccgtccaaattgatcctccccatacacaacctgcaaccctacatgaaaagccaggcggaaataacactactgggacaaaaacatgtaccggatcaggaaaacgaggcggaaaaccgcccccccactcgttgaacgtaccccgagacgaggtcgaccaacgggtcgttcaaacccaacccggtcttgaaaccgaagacgctcttgctgaatggaccgctgaaaccgatccaacccagagcctctaacacatcccccatgtttccctcaaggggaccgtaaaaaacaaacgtactctctaaatagaccttgatacccgaggccggcccctcgaaagagaccctaaggtctaccttggagacctggacagaagccacattgtcggacttaccagtgagg

SEQ ID NO: 87015 - DNA, 229 bp, Zea mays
  Clone ID: MRT4577_179363C.1
ccaagccgtccggaaccaccaccacctccattcaagcagcttcctggtggctacccccagcaatttctttcattcaaccaacttgcaacattggactcttctggttatttacaggaggaaccacttcctccattcaacccggttggtggtgggaggcctggttcctttttgacacaaccaccagtggtggcggtctaacaagacggtgggccttacggctgcacccttt

SEQ ID NO: 87016 - DNA, 121 bp, Zea mays
  unsure (1)..(121): unsure at all n locations
  Clone ID: MRT4577_179364C.1
gncggccggtccgggcgacgcgacgcctcaaatcgctccctgcctctggtcacctcgcttccgctccggggntccctcggncacccagacatcgttcggtcgctcgccaagagaaggaccg

SEQ ID NO: 87017 - DNA, 261 bp, Zea mays
  Clone ID: MRT4577_179365C.1
gggagattgggtcgtgcgcgcgcggaatggttatcttgccggtgtgggcgcgccgcgggctacgggggattggtcgggtcgcttggtggccattggatccaccaaggatggctcagattagaatcaggacaccgtttcacgtaattgtgatctgggccgtagatgccaaattggacgagtgaagctgggactcggttatgagaagcgcagacgatagatctttgatccaacggtggggatcacgtaccgttttaatttatg

SEQ ID NO: 87018 - DNA, 532 bp, Zea mays
  Clone ID: MRT4577_179366C.1
cttgttgcagttcaaaagccgtttgataaatcaacagcgcgcaacgattactttgatataagcacataacaattcgctgaatcaacacatcaacatcatttggacaaatgaacgccgccacttttataacacagacagaacacactctataatacaccgcgagtgaagcccttccctatgcgcccaatgtaatccaacgttaatataggcttgattactcaagacacctatggcacctgtgtaatggtcgattcatttaatcagatggccatcttaggccagacaggtctatggcacctacaccaagcgaggattcgtacgttgccaacatcatgtactttcaaaggcggagctccaatgctactaactctggcgcgcgcacgtactgcgacacctcccatctgtctgtgagaagatctccttcctcctttgtgatcagctcagacattatagggctttgagatcggtgataccgactcaaccctcttgctaatgctaccagggctttgcccaccatcattcctaactgctt

SEQ ID NO: 87019 - DNA, 600 bp, Zea mays
  Clone ID: MRT4577_179367C.1
cccacgcgtccgggggtgcgcgacgttctgggtcggggaggaaggggaggccccgcggcgggtggcggtgcccgtggcgcgcctgggccacccgcgaatgctggagctgctcggggaggccagggaggagtacggcttcgcgcaccagggcgccgtcgtcgtcccgtgcgccgtcgagcggttcatgcgggcggtggaggcctcggcgtcggcggggaacaggcacgagcaccaccgccacggacaccatcaccaccactttcgcctgcctcatattcacatcgcccggtgctttagaccgtcgcacgtcgttgcttaggattcacgtcgagcgcgcgcgagtagcaaaaaaatttcattttcctttttgtttggaagtggcaagatttctgtttttttttcttcttgtataatcaggtgaattttggtttcgtgatccatctgtggtgaagcggttcgcccacagatcacgagttgagcaccacccgcgctaagaatgttgcgcccgttatcatcagtttttttaaacgattgatgtatacttcgtatgtcctgaaatgtaaaagatgtcaataaatctaatattaaatatttttaaaa

SEQ ID NO: 87020 - DNA, 390 bp, Zea mays
  Clone ID: MRT4577_179368C.1
gtgaaaaggaatgttccttttcagttcattagttttacactccgggtttgaaaacttttcttatgtcttgtccaaaaaaaagggggggggggggggcccaaaggaggcaaacataactgactaccttacaaaccacgggggctaaaaacacccccacaggggggggcacccatcaccaaagagggggcgacccccccccaccaacaatattctagccccacggaaaaaagggggtgaccacaagaggccatggggggggggccccccatcaaggagatgaccagggcagccccacaacattttatttaccaagggacgaacttccagcgcccgaagggggcctcgcaccaataccacaacacaatgggggggcccccgcgcaccccacca

SEQ ID NO: 87021 - DNA, 272 bp, Zea mays
  Clone ID: MRT4577_179369C.1
cgccctcctccaggtggccaggccatcgtcggatcgtattcctcggccccttctccggtgatgagcacccagaataaaaggctcaaggatgtggaggtcagtttcccaatcgtctacggaaccatttccttctggctcggcaaaaaggccagcgagtaagtttcttgttcacagggatactgggaatggccgcgctctggatacagacagacttgtcctgtggattcttactgcgagttacaacgtaacggccaattgtccccccccccccc

SEQ ID NO: 87022 - DNA, 791 bp, Zea mays
  Clone ID: MRT4577_17936C.1
ttctttttttttttatgttatgttctttattcaatgtagatgatgtaatggcacccctatatgtggcattttccattttcctaattcgttaggggccaaattttgagcttatttcagcctccagttcccttgagtggagtgggtggtttggtacttgggtttcttcactatatgagtatagtgctgtttatccactcgcttttgcgtaagtaagggtctgtttggaagcacactagtttctaagaaaccaatttctatctccagtttttagaaactagtttataaaaaactgggtgagggtgattagaaccagtttctaaggaaccaatttctggtttttttatatacaatgactaacctactcatattctattttaaaaaacagtggcagtagatgtaaattctataaaatcaacaagggtatgatgtaattaaacggacaaaaactggttttagctagaggagaccagctttttggtttttaagaaattaggaatccagattctataaactagagcataaattggtttgtttggaaacaatccagtttttataaaccagttttttaaaaactgggtgctccacatggcctaaaccctcttctatttaaacagccctactagtactttttttaactcttcactgaaaagctgccaagctggagatacttgggctgtccgacatctacctactttgacatgctacaggtgagtgttcatcctattcgaatcttcctattcatccagacatgccaggctatgagcgacagcaacggaattcgagctggaccc

SEQ ID NO: 87023 - DNA, 316 bp, Zea mays
  Clone ID: MRT4577_179370C.1
ggcccaaaaaaaataggctttccatacattttagttgggtgtttttaaacccaaaaatgggtggggggcgatcccaaataataccttccctttttccataaaaagctccgggaggtggcactcaaacccccccttaactgttttacaaaaaggttacaaaagcagagtcttaaccaagcaagcttatggcattttgggggggcaaaattaggtcatattttccaaaacctggttttacaaaaaacgggcagcccaaactttagttttcccactttttgagctccataccataaggggggctcctttttactttttt

SEQ ID NO: 87024 - DNA, 345 bp, Zea mays
  unsure (1)..(345): unsure at all n locations
  Clone ID: MRT4577_179371C.1
tnatagacgagattaataatacagttctaacagtaganactataggacaccaatgatactgaagctatgaatatactgactatgaagacctatgtntgactcctacataatcccaaccaatgactaaaaccaggtgaacttcgtctattagnagttgataatcgggtagtcttancaatagaacttccattcgtatactaatctcatccgaagacgtcctgcactcatgagccatcccttcatagggttaanaaccgacgcatcccggccgctaaaccagctacagtcacatcaaaacgacagtctatctatggccatnttantnggtcancnagttcataccat

SEQ ID NO: 87025 - DNA, 672 bp, Zea mays
  unsure (1)..(672): unsure at all n locations
  Clone ID: MRT4577_179372C.1
atatgtcgatctctctctctagacggagcgatccagagagggacaggtatcgagttatcctgtacggcgccacgacactgcgagtatcttgcttctccggggggcggcaggaccaatcttgctctatagtccgccgccaatgtacggtacgatagaatcagccgcacctgcgctgatcccatccttttgcaccgtgaagatagtgagctagcctatggaaaaggaaatccaggatgcttgtatgaagataagaggtcatgctgcgagcgctactaggatacatgctattgcccgcgcaagtacgattgctcttcacgacttcacatgtgggacagggtcgtagtcttgatctcttgcaactcgatcgaactgatgaggacccccagctgaggttcatcagtgcatcctatcaccgttgagtcgaccgttagggccagaaggagcactctgctgaccctgcgtgaggatctagtgtctgggaaaggtgctgcctttgtgctgcccctggatgcgcgagtaatggactcatcggagttagtcgtccatgtctcaataagccctttggaaatgtatgtcgttatctgtgcctcgcaggaagaagcatcttgttccacacatctagcgtggacgactagcgatttcatcacaggcatcggncgactattgtgactt

SEQ ID NO: 87026 - DNA, 2096 bp, Zea mays
  Clone ID: MRT4577_179373C.1
ggggtgtgtgttttttttttaacatatattatttatatattatacaaaaatcatacaatgtacaatgagttcgcatgagggacctgaaaatcatacgaccggggctggctgacacgggtccggaagtcgacaaaatgcaagggttataggaccctcaagggtctgctgaagttgctaaagcagagtgttttccgtgtacttggttttcacaattcccccatctttctcatgaaaacattctcaagtgaaaactctttgcatttttgctgcaacaaccacctcaaataatcagcgaacaatgtaccatctctctctctcccttacacacacacaaagaatgtaacgaatattgaaatccacaaccaatttcactcccaaatctcttagcctctcagcacttcttggcgcaggcgctcttggccttgtgcctgaacagcaccttcttcttcctgtgcgaggtgttctggacggtgagcacgaccttgcccggctcgccggtgcggaacgagttgcggaccgcctcctcgccggacgccatcttcttgcccttcctgacgatgatggtgtaggagccctcgtccgccggcacgaactcctccttgtagttcacctcccaccccagcacagtaaggtcccatgtcagcgtggcatcagcctcagtggcttcgatctcgatggtctccgtggagcttcccttgacggtgacctccgcgacctcgccgtcgtccgcggagaactcggtgtcgccgtcgcgcttcaggccgccgtacttcaccgggatggcctcgatcggaatgtacttgaggagggtctcggtgaccttggacgggcgagcaacgacgaacttgctcttcgtcctctgcgtcaggaacgggtagaacagggtgctgaacgcgtagtaccagaacggcacgttgaccaagatgtttctcgcgacgagctcggggtagttgtcctggaacaggtcgagcacctgcttgacggcgactcggaagtccttcttggccggccccggcgagttcctgaggtcgatcacctgcagcagcgacgcgacgccgccgggcctcaggtccagctcggcgacgtggcgctccatggcgcgcacccgccaccggaggaacctggccttgccttcctcggtgcccagcgccttcttgtacacggcgtcgtccgcgaacacgcccagcgcgttgtagcacaccgggtggccctcgtggtccgcgccgtcgaggtagcacgcgcccgcgagctcctcggggaggtcggcgtcggcgtcgcactcggcgccggagccgaagccggtccagtccctgcgccagcggagcgtgcggcggagcatctcgaacgcggcgccggccttgaagtcgcgcgcgcggaggaacttgaggagcaccacgtcggtggcctcgtcgcccttgctagggagcagaggcacgccccacagcgcgatgtccttgtcgacgacaacggccgccgtctccggctccttcgccgccgccttctccccggcttcttcctctttcttggcctcctgcttggtgtcgtctccgctctcctcctcggcctcctccttctccccttcctcctggccttccttcttctcccctccctccacgccttccttcttctcctcctcggcgtcggcctccttcttgccatcctcctctcccttctcctcggcttcgggctgctcatctttcttctccactgctttcttcttgacctcctccttctccttctccttctccttcacctccggcttaccgtcgtcgaacagcttgccctccacgatggccgcctcgaccttgtcgcggagctcggcaagcgccttacgctcgctctccttgagatcgtccaggaagttgctctcctcccggaaagacgcctgcttggtgctcacctccttcgccggcgccgcggccactgcctcggtgccatttccggacacagcctccacggccatggcgctcacagtcacagctcaaaaatcgacaggaagcacgcgtgcggatttcacggcggtggtggcgatgaaagagagagagcgcgagagagagaggagtcggacgcggggcggacgctgggcggacgcgggg

SEQ ID NO: 87027 - DNA, 384 bp, Zea mays
  Clone ID: MRT4577_179374C.1
aaccaatcctaacactttatttttactggaacattcattatttttttgaaaactacaaattttaaaataaaataaaaaatgggtttgttagatggcaaagtgatattgattactggatcgacatctggaattggtgcttctactgctattgaggctgcgaaagaaggtgcttctgtagtcgtcagtggaagacgtcaagacaaaggagacgaggttgtcaagaagattaccgatgctggaggcaaagcaatctttgtaaaaaccgacgtgaacgtcttatccgacatcgaccacttatttgctgaaaccatccgtgtttttggaagattggatggtgcatttaacaacgttggttacgctctctttaagccattcgagcaaacg

SEQ ID NO: 87028 - DNA, 386 bp, Zea mays
  Clone ID: MRT4577_179375C.1
tcctcatacagccgcccccctttttattttttttttttttttttttttacttatggggtccttttgaaggggcagggggccacaaaaaccaccttcctgcaaccaacagcaccaatccaagccctggcaacaaatgctagccccggctaaccgccaaaacccctctaacaattttttatacacaaaccccttctgaaacgacaccccgtaacaagcgtaacaaactgctttccacgcaacaacacataacagggccaccagaacaaacacggattatgtggagaaaaactctccaactacaggaagataccctcgcatgaggttaacgtcatcatgtgcaaccttcctttaggctctctgttttaacacgatccccacaactccca

SEQ ID NO: 87029 - DNA, 1859 bp, Zea mays
  Clone ID: MRT4577_179376C.1
ctcgaggccggcccctcgggtacaagtagtatagaacctgcctgccctgccctgccctgcgctccgatgaccggaggcgggttcgccgtggcggagggcggccacgcgcgcgacgactacgggggaggcgtcacggtctccgtcgtggtcacctgcctcatggccgcctcctgcggactcatcttcggctacgacattggcgtctcaggtggcgtgacacaaatggagtcgttcctggcgaagttcttcccggaagtgtcaagcgggacaaaggacgcgaagcacgacgcatactgcaaatacgacgaccagcggctcacggcgttcacctcgtcgctgtacatcgccgcgatgctgtcgtcgctggtggcgagccgcgtgacgaggacggtgggccggcaggccgtgatgctgatgggcggcgtcctgttcctcctaggctccgcgatcaacgccggcgccgtcaacgtcgccatgctcatcctcggacggatgctgctcggcttcggggtcgggttcaccacgcaggccgcccctctgtacctcgcggagacatcgccggcgcggtggcgcggggcgttcaccgcggcgtacagcatcttccaggtgctgggcgcgctggccgccaccgtcactaactacctgaccaaccgcgtcccggggtggggctggcgcgtgtcgctcggcctcgccgccgtcccggccgccatcgtcgtcctcggcgccctgctcgtcccggacacccccagcagcctcgtgttgcgcggcgacgccgacggggcccgggcctcgctgcagcgcctccgtggcccgggcgcggagaccgacgcggagctcaaggacatcgtccgcgccgtggagcgcgcgcggcgggacgacgagggcgcgtacgggaggctgtgcgccaaggggtacggccactacctggtgatggtggtggccatcccttccttcttcgacctcaccggcgtcatcgtcatggccgtcttctcgccggtgctgttccggacggtcgggttcagcagccagaaggcgatatttgggtccgtgatccttagcctcgtcaaccttgcctcgtcattgctctcctccttcgtcttggaccgcgccggccgcaggttcttgttcatcgtcggtggcgcggcaatgatgatttgtcagttggccatgtcgtgcatcctggcgggccacttcggcaagcagaacgcggtgacgatgccgcgggactacgcggtggccgtgctggtgctcatgtgcctgtacaccttcagcttcggcgtgtcgtgggggccgctcaagtgggtggtgccgagcgagatctaccccgtggagatcaggtcggcggcgcaggcgctgacggtgtccatcgcgctctgcctctcattcgcgcagacgcaggtgttcgtctccctgctctgcgccatgaagcacgccatcttcctgttctacgccggatgggtcctcgtcatgactgccttcatcgccgcgttcctgccggagaccaaaggcgtgccgctggaggccatgcgcgccgtctgggcggggcactggtactggaggaggttcgtcagggacgccaagcaggaggttcaggtgaactgcatgtagggaaaagtaaagagtggtaaaactcaagtgtttgctggtaaattatgatggttcagtgtgccgttagcctcgggctccctcgacacaaaatatcctgtctgcctagagcgcgtgcgcgggagctgggaggtctcgcttcgcctaactgggccacaacggactgtcgtgagagcccaattaaagttttcggccagcgtaacgattgcaggattatcttggctgtttttaatatctttttcctactgaacatc

SEQ ID NO: 87030 - DNA, 393 bp, Zea mays
  Clone ID: MRT4577_179377C.1
ctttcttttttttttttttttttttttttttatttattttgcttttttttcttttttattaacatttctctacattttactttataccaaattttaaagacaaaattttttcaacggggattaaggatttaaaatttggggcttaatggcaaacaaaccaaatgcacgttggccccaactttttccttatattaaaagccttaaaactcggctctttccatcagggttcctaaatacaatggggttttaatatcccccccccatttcgttttcatctttataaaccaaccacccattaccaaattttccggggttatttagcttatccccttttgttggggggaaagaaataattcttacatccaatttagacccaaacccttctcaaaataa

SEQ ID NO: 87031 - DNA, 368 bp, Zea mays
  unsure (1)..(368): unsure at all n locations
  Clone ID: MRT4577_179378C.1
ctcaaagcctatcttccgtcagctactgaaccgattcagttgtgaataattttggaatccgctagagtccgtgaggtagtgatgaaaccattgcaaaacgtttgtgcttgaatggtttattttcctcctgcatagcgcactgcagagcctgagaaccagattgctgtagtcgatttgcgaggggttctcttttttttttggggtacctttcgcgaggaactcgccattgtttttgggtactgaagcatgtactcgagcagctttgctaaggagaaatgaactattctcaaagtgcaaaaaaaaaaaaaaaaaaaaaaaaaaaactaataaatggcttataanaactgtngcgtccttttatcctggaa

SEQ ID NO: 87032 - DNA, 391 bp, Zea mays
  Clone ID: MRT4577_179379C.1
agtaagcttagcaactagattatggtctacagattggagtactcgacaccgtgaaggtgctgatcgttgcccttgctcttctggcgctcgctgtgagcgccgccttcagtacaagcgtaggctgtggctgccagacaccaccgtttcatctaccgactgcgttctatatgccgcctccgttctatctgccgccgcagcatcagccgcaaccatggcaataccccactcaaccaccgcaactaatcccgtgccagcagttcggatcctgaggcgtcggcagcgtcagcagtccgtacctgggcacaatgcgtcgagcacctgaagcaccaatgcatgctggcaaagacgcgctactgctcgccacagtgccaggcgctgcaacagcagtgct

SEQ ID NO: 87033 - DNA, 364 bp, Zea mays
  Clone ID: MRT4577_17937C.1
cccacgcgtccgcccacgcgtccgcccacgcgtccgcccacgcgtccgggggaaagcgtcggctgagataagagatcctcacaaaggtgtccgagtctggctcggtacatacaacacggctgaagaagcggctcgagcctacgatgaagccgccaagcgcatccgtggggagaaagccaagctcaacttccctcaaactccacacctaactcagcctcctgctaagaaaaggtgtatgatggctcctgagttgactccgccgagttctgaaacaaagagcccaccaaccccacaactttttatgggttttggttacgagaatggcgtttacagaccgagtgaagcaatggaaagcgagatggag

SEQ ID NO: 87034 - DNA, 1090 bp, Zea mays
  Clone ID: MRT4577_179380C.1
aagatcagtccaacgatgggatcccgacgtgtgtgactgctcttcgtgggcacgccacgccccatgagtgcgaagccgccgccccaatcgtaggtcgctcgtgaaaaagctgcagtgaacctaaagctcgtcgtggggggcgacgacgggcccgtcgttggctgccgcgcggttccgcaggtacccgatggcgaggttggcgtgcattgcggcgccgtacggaagcgcgtcgtcgtcgacgaggaagtgcggggagtgtgcggcgtgcacggccccgatcccctcgttccgtatcccaacaaagtagaagtgcgaggcggggacggcctccgagaaggacgcaaagtcctcgctacccatgcacggcgccatggcggcccggacggcgctcgcgcccaccgtctcggcggcgacggcctcgaagtgcacgtgcagcgaggcggcgttcactgtcgggggcaacagggggctcccaccggcgccgaagtccacggacgcggcgcatcggtgcaccgcggattgcgaaacgatcacctcctcgatgcgacgcttcagccgcatgaagccatcgctggagaagcaccgaaacgtgccgccgatcgccacggagtccgggatcacgttgaacgcgccgccgccctggaacctcgtcactgtcaccacctgcgagtccagcgggtccgcctcccgcgagacgaggctctgcaagctgaggacgacgctggaggctgccaccacggggtcgacgatgttgtggggggtggcggcgtggccgccggccccggtgatcaccgcctcgaagaacccgcacccggccagcaacgggccggccctagagcccaccacgccggtagggagcattacggtgacgtggaacccgaatatggcctcgacgttctccacggcgcccgcctccaccatcttcttggcgccaatgccgacctcctctcccggctggaaaaggaggactactgtgccctgcaggtcgtggcggcgctcatggaggatcctggcggcgccgagcagcatcgcggtgtgggcgtcgtggccgcaggcgtgcatcttccgggcctccttgctcttgtggtcc

SEQ ID NO: 87035 - DNA, 373 bp, Zea mays
  Clone ID: MRT4577_179381C.1
tgcacgcctgcggccacgacgcgcacaccgcaatgctgctcggtgccgccaggatcctccatgagcgccgcaacgacctgcagggcacagtagtcctccttttccagccgggtgaggaggtcggtattggcgccaagaggatggtggaggcaggcgccgtggagaacgtggaggccatattcgggttccacgtcaccgtgctgctccccaccggcgtggtgggctctagggccggcccgctgctggccgggtgcgggttcttcgaggcggtgatcaccgggggtcggcggccacgccgcctccccccagaacatcatacaccccgtcctggcagcctccagcgtcgtgctcatcctgcaaagcctcgtgtcgc

SEQ ID NO: 87036 - DNA, 1657 bp, Zea mays
  Clone ID: MRT4577_179382C.1
gaagagctatgacgtcggatgcccgcgtacgtaagcccggaatcctccccgaagccgagccccccacaccggacagaaaagcgccactaaaaccctagccatccgccatgtccacctccccagccgcctcatcctccgctccgaccgccttcgccgcctctgcggttacgatggctgccgaggccgccgacgggccggtactcagcgtagtatcgaagcgtctccgcgcgctgcggaagaagtacaatcgtatcacgcagatggaggagtcgctcgccgccggcaagtcgctcaaccgagagcaggaggaggttctccgctccaagcccgtcgtcgctgctctgatcgacgagctcgagcgcctccgccccccgctcgcatcagctctcgcggaggagctctcctcccgctctgcccccgcccctgctcccgcccccgccgccaccgcttcctcctccgacccagattcgtcagtccaggacctcctcgcgctcgtctactttggctccctcttcgatgtcaagcaacaaagcgacttcgtctctttggtatacacgcgcgagctcgagcggagcagctgcctcacttatgactacgtcggggatgatccggaagacagtctcgtggagaccgatctgaacgccgtttctgcccttgccaccctcgcggcgtcgcgccctcctgctgcagctggagtctctcaccgtgatgccctccaggcttgtgcccatcacgcccgcctctggctcaaccgtgcggatgaacccatccaccctgactccaccatcacatatgctggggtgagggcaaagctggatagaatcatggcatcgggctactacacagctcagctagaaatgaggacaccaatggatctggctgctgcagtggcaaactttggagccggaggtgtgcaggtgcaagagagcatggttgtgtcgcctcaggcactggaagcagtcgaggggagccaggatgttgaagaacacaaggacgagaaggaagattctcaggctacagaaatctacagtgaccatcaggctcctgttgttgacgctgaacatgtggatgatgaaggcctggtgaacccagctcatgaagttccttcagctgaggcagagcaggagacatttgacgattatgtggacgatcaggaacaaaaagaccaacaattcacccagcggcgctcttaccagaaccagcgtagtggcggcggtcgtggtggcggcaggaggggctatcctaatggtcgtggagtgcgtgggtaccagaatggccgaggtggcggtggataccagaatggccgtggcggaggcggtgggtactacgaatctggatactaccagccgaggaactacaacaacagaggccggggtggtcgcaactcttattacaacaaccatggtggaggtgcacaggcaggcggccatggccatcctgggagggttgagctgggtgcaaacgcctagctcgagctgactgttttgtttgaggagcagaggtcggggggagccattttgttattatagaactaactgagcctgttatttcttttttgctactcgcatatggaaatgctttggggaagtagtttcaggtcgactttgttcttctaagttacgtctattaatcgtgttaatatgcccttatttcttaa

SEQ ID NO: 87037 - DNA, 891 bp, Zea mays
  Clone ID: MRT4577_179383C.1
cggtccggaattcccgggtcgacccacgcgtccgcaatggatctggctgctgcagtggcaaactttggagccggaggtgtgcaggtgcaagagagcatggttgtgtcgcctcaggcactggaagcagtcgaggagagccaggatgttgaagaacacaaggacgagaaggaagattctgaggctacagaaatctacagtgagcatcaggctcctgttgttgacgctgaacatgtggatgatgaaggcctggtgaacccagctgatgaagttccttcagctgaggcagagcaggagacacttgatgattatgtggacgatcaggaacaaaaagaccaacaattcacccagcggcgctcttaccagaaccagcgtagtggcggtggtcgtggtggtggcaggaggggctatcctaatggtcgtggagtgcgtggggcgctggtaccagaatggccgaggtggcgggtaccagaatggccgaggtggcggtggataccagaatggccgtggcggaggcggtgggtactacgaatctggatactaccagccgaggaactacaacaacagaggccggggtggtcgcaactcttattacaacaaccatggtggaggtgcacaggcaggcggccatggccatcctgggagggttgagctgggtgcaaacgcctagctcgagctgactgttttgtttgaggagcagaggtcggggggagccattttgttattatagaactaactgagcctgttatttcttttttgctactcgcatatggaaatgctttggggaagtagtttcaggtcgactttgttcttctaaaaaaaaaaaaaaaagggcggccgccgactagtgagctcgtcgacccgggaattaattccggaccggtacctgcaggc

SEQ ID NO: 87038 - DNA, 275 bp, Zea mays
  Clone ID: MRT4577_179384C.1
ttttatgtttaaaagaatgagcgaaacggggggcattttttgtacatagtggcattcataaactcggaaggtgccaagggaggcaaagggcaacacacacctacctaatttcgggagattcaaaccggacaattgtgcatggacggggaggcacaaatcaccatatcgaatcacacaaacatcagaaccgaccatacacggacagtacgcagacaatagctgtcacctgggcacgcactgcgcttaaaagaacttaaaggccaggtatttttcgg

SEQ ID NO: 87039 - DNA, 504 bp, Zea mays
  Clone ID: MRT4577_179385C.1
ggccgccccttttttttttttttttttaatcgaatgtcacatctttactatataatcagagttttgtacaaaataaataaataattacattatatggagacaacggtccagcaacccgaagttgactgggagacgacgacctagacctctcacgaacacatcgcagcatcctccatgcgcctcatcctgcggtacctgttcttgaccggatggttaagcgttggccgagcgggttcgtgacggaagacttgcttgccgcagcttcctaccatggacccgacggaacatggcacctggcgtagggcgtcggccgtcttcgtcgccaggagagaaagagggatgaacgcctgaacgggagaagaattccaagaaacaggaacggcaattcctgctcccacggtctctctccccaggcgacggtgcagggtgctcccctccctgttttttttcctgggaatgagaacgtgattatgtttctcggccagctttttttttcccggccgg

SEQ ID NO: 87040 - DNA, 589 bp, Zea mays
  Clone ID: MRT4577_179386C.1
caagaaaccccagaattaacggttaaggggtggtcctacaaaacaaaacaaaacaaaaagggggacggtgggattccttttataaacaaggggggttagccttatcgcccagtggttgaccaaacacaaactcacagccaaacaaaaaaacccacaagctggggtttgtctgcaatggcatttacaaaaaccccttgcccaaaaagggaataaaattacttctccccctttttgttattggctaaaaggggccggagaatggggttcccattgacaacctttgttgtggcaacaaaaaagtcgaaccccattctttcctgggccctaaggaagcaaagggcaccattctcagcaaaggggacccccccatggaatacacccaaacccagagagggaggaccacccctgtaaatactttgtggaccccctaaaccgggatgtacctccggggataaataaatggaaaaaccaccttttttaaaatccaaagggggccctggaaatagtttaaacagtttttaaataaaccgccatccaaatctaactgctggctgaacagggcaaatactaaaaggggcgtatccaaaaa

SEQ ID NO: 87041 - DNA, 835 bp, Zea mays
  Clone ID: MRT4577_179387C.1
acatcacatagtggagtagtgtattatgctccggcggcccgaaccactctaaatccttgtgtgttcttgtgttcttctcgtttccacctaacaggcaaaacgtttaggcatctcctcatcttaggatttagggcgggtgcattccgccacccggccggagatttcctcttcgacagtattatttgtccagttctatctaggttttgtcctacagtcaacattcctctgataccacttctgtcacactcgggttttagagatccgagcgcaaacataaacaccaggtgtgctgggaccaagtctcacacatatgatgaatagtggtatagcaacgaatgtcacatctttactatataacaggagttctatacaaaataaataagtaattacattataaggagacaacggtccagcaacccaaagttgactgggagacgacggcctagatctctcacgaacacatcacagcatcctccatgcgcctcatcctgcggtacctgttcttgacctcggacttgagattccaggtaccaacttgctcttcagatgacacgtgtcctcacggatggttaagcgttggccgagcgggttcgcgacggaagacttgcttgccgcagcttcccaccatggacccgacggaacatggcacctggcatagggcgtcggtcgtcttcgtcgccaggagagaaagagggatgaacgcctaaacgggagaagaattccaagaaacaggaacgacaattcctgctcccacggtctctctccccaggcgacggtgctcccctccctgttttttttcctgggaacaagaacgtgattatgtttctcctcgtgc

SEQ ID NO: 87042 - DNA, 173 bp, Zea mays
  Clone ID: MRT4577_179388C.1
ttttccacaaacaaagaggttttaacacaaacaacattgggttggtgcaaaatgggggtccagtccagaccagtgggttctttggacattgaacaaaaaggaaacatgccgtttttaaccccccatgatttgggggtttgcagggattggattggaaatggggcattgttttt

SEQ ID NO: 87043 - DNA, 596 bp, Zea mays
  Clone ID: MRT4577_179389C.1
ggccgccccttttttttttttttttttgaatcatggcacaagatcgaatgtcacatctttactacataacaggagttctgtacaaaataaataaataattacattataaggagacaacggtccagcaacccaaagttgactgggagacgacgacctagacctctcacaaactcgtcacagcatcctccacgcacctcatcctgtggtacctgttcttgacctggcacttgagattccaggtatcaacttgctcttcagatgacacgtaacctcgcgcggatggttaagcgatggccgagcgggttcgcgacggaagacttgcttgtcgtagcttcccaccatggacccgacggaacatggcacctggcgtagggcctcggccgtcttcgttgccaggagagaaagagggatgaacgcctgaacgggagaagaattccaagaaacaggaacggcaattcctgctcccacggtctctctcccgaaggcggacccgtgatgccgacgtggatctaccacggcggtcgcatgctctacccctgctacgacggcgactctatttgtcgatgtggagggtcactgattgtcgccccggccgg

SEQ ID NO: 87044 - DNA, 520 bp, Zea mays
  unsure (1)..(520): unsure at all n locations
  Clone ID: MRT4577_17938C.1
acgacacgacaccatatcggnagctcaaaggcaccaattatggccggtgtgaaactacagcgtgatcgggctaaagaccgaccgagaagagacgaaggccagctgcggcttatgcctgggcaagcgggtgcaggtggacggactcctaggatctaccaagcctatcttctcgggctggccgccttatgtcatggcacggccaccacccggatcgggcaaggcctcaatgttggatcagtacttgacaaagagcaaatgcaacacagagatcaacgacagcaagaggctcgacatcagttgcgccaactttgcgcgcgcctacatcatgcactaccgcagctgcaactaactctacaacttcaatgacatccagcacctcgacaagataaataaaaatctctacattaacgacaaccaccatatataatgcaaggagaatgacaatattaagtgcaaatacgacattttatcacaagagctaaatcagttttcacatgcaatttatctgaatggaggagat

SEQ ID NO: 87045 - DNA, 660 bp, Zea mays
  Clone ID: MRT4577_179390C.1
aaggccacgtccaaggcacgtacagcatggctctacgatacattctcgcctcatcttcccctcatctgagagaacgctgaaaaatacctccatcagaacgatctctgagggttggcccaggattgtccagagaacattcagatcactgtcaaatcgatcgttgaggaatcactcctgagtgacacctggcttaaaagcacgcagaagagcactagcagcggtctaaaatagtgcaaacatatggtgagctggacatatgatagtgacatgaaaatgtgcaggatagatgcatgacctacatgcgtcccgcattctatcacacatgcataaaaacttcatcaaaacgacttgttaatgaatagctaaagggcatgtaggggcgatgaaggtaaaaaagggccctaggggcgccctaggtccacaaccactgtataactagggctgcccccattctatatcaattttatataagcttatacctcaggcgacctccaggacccgatccgtcccctattcagcctaaatagacgcgcactatgcgcgctcattgaccacctcttgacagcgacaaccctggcgataccctgctgaatcccctcttagtccacttgcctttcatcacccgttctaatactgaagaaatacccaacaatcccgctt

SEQ ID NO: 87046 - DNA, 1062 bp, Zea mays
  Clone ID: MRT4577_179391C.1
ggagaagaggagcaggggcagttgcagcatgacgaggaccaggaccaggaccaggaccagcaacatcaggaggagcaggggaacgtggaggcggaggcggaggatccggaacagcaggaggaagaagaggagggggcggtggaggacgcggacatggaagatgcgggggaggtagtcgttgatggcgatgcggaagaaggtcagggtgaaagtgaaggtgttgacccaaagccggaggaggaggcgagttatcctgatggaattgatgacaagaacagaaaacttaatgaaaagctggacgccctaaataaaaagaagcatggccttgtgcagatgctgaagcaggtcttaaatgctgaagaagaaatccgaaggcgcaacatgcaggcttcattgcgcgctgccatgccccagccatcagaaaacgcaacagatggaagttctgtctctaggttggccccgactgcaaaggttggcccctagaatgactgttgatgtcaattttggtgatgttgctggcgattcagatgctggttccaaccagggcactcctggacgccccttgcatcacttccacagtatctctccttcaacagcctcttttgcgaggtcaccgtttggttctctacagggccacactccaaggagtccggcaacattctctacggcaagtccatcacgcttcgccacaaatatacacccaggacaacctcctgctctttattcagcatcgttgccaggaagtaactatgtagccacatcaccttccccggccgcatctggtggttcttcctcggtgttcagggaccctcggccacctaactctacataggttctatgctttgctcggagttctaatcattgataatgttgctaaagtctcttcgggcaacactagtggaaaaacaaattcgtgtctctatgtgtgaactgtaaataacgtgatagcagtgaaattcaaaattagtatattcatttctctgataggtggctagggcgccagatcttctggacaatgtgttaggcaatgactcctaaagcgtctcgtatcctatatttagg

SEQ ID NO: 87047 - DNA, 556 bp, Zea mays
  Clone ID: MRT4577_179392C.1
atctctcttccactccccggttgatttttttttcataggtgagatgagtgcacatcaccctacacccagatccacttgtctttctcctctctcctctcgcagccccccttgcaagctcctcctggaccctggaaacaggagatcttttcggctgatatttcatactgctgcgcctgactcacaccttgactactcgctccaagacttcttctctaccttcggcgacgccctcaagtgcaagatctttgatctcatcaggataagattacagcccccagctactgctctgcgacctacgccgctgatcaggcggatgattaacgcgcacgatcttgtgaactgcaagcgaggtgcacgtctgaacctcatcttcaacaaggtccaatcgctgtgctgccgttcctcggagctcagttccccacttcgacgttcttatagggagctcttaccactgtgagagctactccgctcctcccctgaggctactccgctgcctccccaaatctaaaagaccttgcagtcgctacacccgctagtcgcgggacccctaagccct

SEQ ID NO: 87048 - DNA, 223 bp, Zea mays
  Clone ID: MRT4577_179393C.1
ggcacatctggatacaagttcccattggggaaccaatcttgataggctactcaccaagatacttattaagcgcaagaggcaaacccaaaaatgagggctgcacatgtatcgagaagcaaataaaattggcatacaaacgtaccacgaatatggatatgaaacaaaaaggaaacatgaataaaaataacaattttcttagggagagcatcccattggaaaggcc

SEQ ID NO: 87049 - DNA, 573 bp, Zea mays
  Clone ID: MRT4577_179394C.1
tataaaaaaaaacaaaaaaaaaaaaaaaaaaaaaaaaaaaaaaaacaaaaaaaaaaaaaaaaaaaaaaaaaaaaattttttattttctctgtactgtcctttcgatagggcctttttttgaggttttttttctctcctcgtgcgctctttggcgtgggggtggctgccccttttccccctattgggggtcttattacattcgttttctccctcattttacatcgcgttgcatagaaatttcctttcttcgcctaacttagtccagtacccaccctttccccttttcctacctttgcgtaccctgaatgggccctggccgggcccccttttccccgttttctctccctgggtggggaggggaccccccctgtttccgctccttttgctcggccggtgtggcgggccccctccgctttctttcttccttttctatcccctttcgcccgcctccttccccttgcttttttttttttttcccctttttgccggttttccctgccttgctttgactcgcggcttcccttaagggttccgtttgtttgttggtttagtgttttggtcccccccgatttt

SEQ ID NO: 87050 - DNA, 546 bp, Zea mays
  Clone ID: MRT4577_179395C.1
atggcgctgtcgtctccaatccgcccgtggcccgcggccctcggcgttggtcctcgtcgtggtctcgccagaagaacccaatgcccgccagtactggctgcgtgggggctccgctgggggcgaagcatacaattcgcgcccccactgtctgacggtggctgtactcgcggctacaccaccgacagcgacgtggggtcgaaacggagagatggcatatatcgcggctgcactgcaaaattaacagcgcttcctgtccggcaccggcagagaggagcggagacagtccagtactccagcctgtttctggctttggtttttgattcgtcctcccgccgatccgctgcggccgctccacgtgacgtgatggcctcccctcgtcgcggctcgcgctcacgagacagtgttccaggggtgacgttcgccaacgccaagccgattcaaaacgcacccccgggaaagaaacggcgccgctgcgcttttcacatgatgacgatggaaggcaagaaggctttccccggcgccacgcatgccatgccaacacattga

SEQ ID NO: 87051 - DNA, 291 bp, Zea mays
  Clone ID: MRT4577_179396C.1
tttttttgcagctaccacctagcgaacgctgggtttagcaacctggcatacatgtccgtgatctctaccgccgcatgaggagaaggaccatgaatacaaacggacaggagatcggatactacatctatatattacacctaacgaaataagtggtaaatccagttactgatacgggaaataacggatcatgctatgcttcggtgtcgttagtttatttcatcagacagaggacggattggctcatgctgtttatttggatctagttataaagaaatgtttttacagagtgtg

SEQ ID NO: 87052 - DNA, 445 bp, Zea mays
  Clone ID: MRT4577_179397C.1
aacagggaaacaactttttttttgggggggggggccagtataaaacaaacccgagacacgacaaacacaaacagggcgcggggggagactaccaacaccgaacacgtaccaacagggggggcgaggaccagggggctacaaaaacccaggcagcaaaaaaattttttaccaccacaccaaacacgccccagttactgggtaacaaaacggaaagccctttatttaacaaccagggttcgaggcctttcgccttgccttgacccggggaacaacccccaccggcgaagcgggagcaggaaaggggaccaaatgcacacacacgcgcgcgcgcgcaattgggggacgggcgaagaaaaaccgggccctactggagggaacccccggggggggggccccgctggaaacccttgggggcggggccaaatttgaaaaaaaagtacttgcc

SEQ ID NO: 87053 - DNA, 451 bp, Zea mays
  unsure (1)..(451): unsure at all n locations
  Clone ID: MRT4577_179398C.1
cttggcttgngacctttgggctgatttatgtgcttgtggatgtgcgggtggatgtgcgggtggcgtttattctttcttgtaggttgcgcatatgaatgtgctttggctgcatatgcttgcttctgagcttcttactaagaattcgtcgcctgcgatgttggtgattttgatgttagctgttactgcggtggttagtaatgtgctttatgcttaggttgttgcgtgtcgtggtgtttgttatggtgctggtgcgtgtttgtgtagtggtggttatgatcatgagggttcgcttcattgtctttctagtgtgaggtggtttcctgttgctgctgattcggttaggtcttgtgttgctagtgctgatgtgaggaattggatggtgcgggctgggctgggtgttatttccggtgagtctcatcatgttactgtgagttgtaatgtgtgttcgggg

SEQ ID NO: 87054 - DNA, 1040 bp, Zea mays
  Clone ID: MRT4577_179399C.1
ctcttcagctcaccttgtctcttgacgaccggccggccgggttcttgcttgcttgcttgctaacagcgctgcctagcaggtccgacagcagcgacttcgccgagctgctatgggagaacggccaggcggtggtgcacgcgcggacgaggaaacagccgccccagcagcaggccgccttcccgcccttcaccttcacctgcagcagcagagctcaacaaaggcagccggtgccgccgctgctcaagacgggaggaggtctctttgccgacttctcctcggccaccgccggcctagacgccccccgtcacaacggcgacctcgacgacaccgtgccgtggatccactaccccatccccatcgtcgacgaagccagtcccgccgcgcctgccctggcagatagcttcagcccagatttcttctcggagctgcatgcggcggcggcgacgacgagcctcggccctctgccaccaccaccaccaccagtccagcacaccggcggcgacgacaacgacaaccggagcaccccggttcccaatcccaccaccggcagaggaccagagccctcaaaggaaacccaccgcgcaccagtactaccaggtccagccggcaggcctgagccaccacaaggcccacaagctgaggtcgcgcccgccaggaagcctcggccggagagcggcgccggggaggctttgatgaacttctccatcttctctaggccggcagccatggcgcgtgccagcctgcggcagaggccgccacacacaggcaccgacaaggcgtccaataataatgccaccaccagcacccgcgtggagtcgacggtgctacagtcggccagtgccagtggcccgagaactgcaactgcccccgccctgttcgtggaccagaggacggcgtggccgtcgcagcagcccaaggacgggcggtttcgatgcgcagcagcaacgccaccgccgccgccgacgccgacggctggtaccttgcgccaagaagacctagcaacaccaccacatgactcctccgcagaaagaagagagacc

SEQ ID NO: 87055 - DNA, 360 bp, Zea mays
  Clone ID: MRT4577_17939C.1
atgattgggtctcggcgcctattaatgagacatgcttgagagcatcgacaccagcctgacgctcggagaggatgtttcttgctggactacacgtcctgaacgcagaattcgagaggatgctggactggatggcctagagcaaccaaaatgaccttgctgtcagagagtgcggctaaatctcccttactgagacccggagaacgataccacttaggccctctctagtggcctatacattatctcctacctgatgccccacacggactctggatgatgttgttactgctataatgagcgccggcttgcctactgattgctgacagacatatatccttgagatattgaccctgtaagacttgc

SEQ ID NO: 87056 - DNA, 329 bp, Zea mays
  Clone ID: MRT4577_1793C.1
ccggaccggaactgaattctcgactcgagcgacgcgttacacactacctaatgtcgatcggagacctataagatcttaagacgctggaccactgtgcacgggagtcctttgttgatgagagcgtaaagagacacaagcactcttaattttcgtcatgctagtgactgtcacaaagaaaaacagaacacccattttcttttcttttcagtgctatggatacctcgcacattagagaaacctaatgaccacgatttactttgaacaatttggtgctttaccctggacaagttacagtgctttctgaacctatgctcaacagtgttacatca

SEQ ID NO: 87057 - DNA, 300 bp, Zea mays
  Clone ID: MRT4577_179400C.1
ttttaataattttcttgtttttttatttttttttaggcaagattaattgaaattccttagaataatccccatattataccctgaaaaaaaaggggtttcattgggtaatacccccattattaacacaacccacactttatgcaactttacttttttatttagaaaaagaaattgttaagcagtcttgacctaaaaaaaagtccatgtgaaggcttttcacgcgttaacattatttacaaccctccctgctttatgtttccctttaaaagggaaactgggagtgcaaaccttatttcacat

SEQ ID NO: 87058 - DNA, 236 bp, Zea mays
  Clone ID: MRT4577_179401C.1
ctaccacctgctagcatcaggcattagcttctcatagctaatctacaggctagatacctatcatgcacagttcatcgcaggtagcaagttcctatgcctcactaacgccactgctgagctggcatagactcagacctcagaccacgatgcatactccccacactaccctgcgccactgcaattcacatagtgctgtagggaccggatacttacgggcaaccgatcataactgatcc

SEQ ID NO: 87059 - DNA, 620 bp, Zea mays
  unsure (1)..(620): unsure at all n locations
  Clone ID: MRT4577_179402C.1
ggtaccctccgggctggccggggnaaccgatcaaaacgtttgcacccacccgccgccgtgtccctcctgctataaatagcctcgccccctcgctcccagctcccatcaaccgacccagcagctctcacattctcacagtcatcgcccatccagatccactccgtcaccaggccgccgcagatcgagcaattctttaaccttccaacgcagcataatccaatcgcacatggcggcggctcttcaggcgcagcgcctcttcctgacggcctccacctccacctcctcctcctcgtcttcgttcgctacgcggccccgccggacaaccaccaccaccgctccctgccgcgccggcctgcgcgtgccgtccggcgtccagacgacaacagccgcgtcgacgtcccggccggcggacggcggcggaatcaggctggactggatcgacatcgcgacgtcccccgccgaccgcaacacggtcgagaagctccgcgcggtggcggaggccgcggcggaccgcgccgagatgcacgacatcatcggccggcagcgggacaactggaaccacctgctgctgcactccaccaactcgctggcgctggcggnctccgtgatggccgcgctgg

SEQ ID NO: 87060 - DNA, 358 bp, Zea mays
  Clone ID: MRT4577_179403C.1
ggcgatctcttccctctggcgttcggcgtggtcgatgaggagaccgacgagaactgggtgtggttcttgtccgagctgcatgagttgctggagaagaacacggagaacatgccgaggctcaccatcctgtcggacaggcagaagggcatcaccgacggagttgaattcaacttcccgactgcgttccatgggtactgcatgcgccatgtgagcgagaccttcaagaaggagttcagcaaccccgtgctcgtcaaccttctctgggaagccgcccacgcgctgaccgtgatagagttcgagacgaagctgctggagatcgaggacatgtcgcaagaagctgccgtttggatccggcacc

SEQ ID NO: 87061 - DNA, 367 bp, Zea mays
  Clone ID: MRT4577_179404C.1
agtaaaaaaatattgaaaaataaacaacaatcaggattcgaactctggctggttagttcaaaaacaacacttagaccactaagctaattgtccttctgtgttcttaggtgtgccgtggtctatatggaccacccactgggtccgcctctgtgcagagccaattagccagatactggtccaactcgctgacatcagacatctgatgcatgcataagcattgttcctaaaatgatctatgccacattcaaatcagcttggttagttggtttgtatctagcgatgcaagttggtcatcaatggtgttttctgagctaggttttagatattgtgccatgccattttagattctctctccacaggcacactc

SEQ ID NO: 87062 - DNA, 391 bp, Zea mays
  Clone ID: MRT4577_179405C.1
aacgggtgtgatgataaattcacatatcatacatcagaagcaatcatctgctatttccatgtatgtcatagatgcagagtcagacgagacacaaacccaattacgagaggacaaaattccaagtcaaggtcagacagggaaagatggcaatgatcttgacaaaatacaaacccaaggaattgaaaagcacctgaaaaatgcttcccagctttcgcaaaatggtggttcagattcactccttgtggtgtgctgtgaggatgttttgcttttgttatccctggcgtcattgattcacggaagcagcaagcatctacagaagacgaaacttgcaaaaccttgttgctggtcagcacttttcaaaaacatggatgacagagtctgtgggctgata

SEQ ID NO: 87063 - DNA, 116 bp, Zea mays
  Clone ID: MRT4577_179406C.1
ggcagcggcgtggcagcgcgtggcgtgcaatccggagacgctctcgcctgatcgcgtcctcgcgctcatctgctgcgcgccactcgacctcctcgtgcgccttgccgcgttcctct

SEQ ID NO: 87064 - DNA, 522 bp, Zea mays
  Clone ID: MRT4577_179407C.1
tgacggagtgcaactcgtgcgagtccggctcgccgccgtcgaccggcgcccccctgcccccgatcagaataccgccagtccccctgccgcaaccataatcgcgcgtgcagcagtgttttcctgtaccaaacgctgcactgctgctcgcacgatggaaccacttgcagccggttgtctccatgaggcaggagtgcctacatcgctgtccccccctggttggtcagtggcagaatactcaactggggcaaggtcacctcgccgtcttatacctacgaagagggccacagttacctgcagacatgtgccaggaccagcgccacaacggatgccgtcaagctgccccgcgcgtcgtcgacatgcccgcggacgagctgcctgaggtcgaccccacgttctagtgctgccacctcgcttatgggaatgacggtgtctccgacgcgttctgtctgggaaccgacatcaacgccaaggtgatgcatgtctccgactacgtggccatcgccctggaggagctctgcaact

SEQ ID NO: 87065 - DNA, 273 bp, Zea mays
  unsure (1)..(273): unsure at all n locations
  Clone ID: MRT4577_179408C.1
attgttacanaggccaccaccaaaggtacaggcgagcgtgctcatacgatcaacaccatgccgtccacataataatctaacatatcgagggcttatacccaccaaagatgccagggctggtcaagcccacatttacattacaaaatcagcatgcaaagttcgagccccgtttccatccaacatgatgtgtagctccccagcctgataaaagtcatgtcggcctaccacatggatgatatcctacagggctcccgcttgtcgtatccatccact

SEQ ID NO: 87066 - DNA, 960 bp, Zea mays
  Clone ID: MRT4577_179409C.1
tttttaaccgtttgagactgcagttagttgtgatgtgctttgttgttcttacgatgaatgtgccggtctagtttcgtctgggttggcccctctgcttggccgcgtttgtcgtttagatctatccaaatatcatcgtttgttgatttcgaaattggggctgttttgctcatgatttcagttcaaacttcaccatgcttcatgttttggaattgtaattggtggctatgttaattgtctagacaattgtttagacttcagttcagatttgtggacttgctgctgcgtaatgctatcctctgacactggcggtttggttcaataagttgtgcgggcttactattttgttgaattcgatgttgaaatctgttcgttcctagaagggttttgttcaacttgcatattcacttcaacgctccgatgcagtatacgtttgttcccttgcccgccctttgacgttgtgcagtttctgaatcgcaggagaaggctccctacgtatctaaggccgagaagctgaaggttgagtacacaaagaagatggacgcctataacaacaagcagtctggaggaggacccacattgtctggtgattctgacaagtccaagtccgaggtcaacgacggggacgaggagggtgatgagtgatggatgacgggtgaaactctgggctgcccaagtgcttgcagtcagcagggaaatctcatcgtcgttgggcctaaccgggctttgctgctccgtagcgtctggaagctgtctgtcttttgagatgctgtagactagtagtgcctgctctgagttagtaattgaaagtgttgtccctgaagtgatgctgtttagttggtagtgtgttcgcttcttcggcacttatacttacccccaagcatcaacgctgcctgttttaaatctcaataggtgctgttttaaatctcagatctcaatatatgactactgatcgctgaatag

SEQ ID NO: 87067 - DNA, 124 bp, Zea mays
  unsure (1)..(124): unsure at all n locations
  Clone ID: MRT4577_17940C.1
agggcccnctacccacacatccgcccattttttgattttangttagacgctgcacgaccccgcgcgcgcttgttttcacggcacttgaggcatctctgagatactctgtagttacctcggagcc

SEQ ID NO: 87068 - DNA, 722 bp, Zea mays
  unsure (1)..(722): unsure at all n locations
  Clone ID: MRT4577_179410C.1
atagtgtttctgtgaaaaaggagtattggtatagacacaagaacntataaaaaaagatcttagtgctctgttctgcacatgcactctggacaccgtggatgtctaaatacgcttcttgcaacaggcctctcgtgaacttgcttagtttgctgtatgagttttcttactctattttcaaatccattccactcaattgtggcattcttcacaagtatgctggctagccggcgcttgtttggccttatcgtgggaagatccccaccaccgtagtacatgcggtaaccttgaacaagggaagagaattgacttcctgggtcagtcatagcaaatgcatcggcagctgcgcatgcaatgaagtccagggctgccaactgagatgagaagttcctaaatggttcgagctctgatggagacagaagggtttctttagttactaaagcaggataaagacgacttatggcagccatcctatccttccctccataaatttcagcacctgcaacgtatatatttgtgatgcgcttgaaaccaatagctgctagcataagcacagcctcttcaggtgcaaggggacatttgccttcggaccgtaagaaagcagcagagggcaactttgtcatcttcttgagttctgacaacacaggaaagtgaatttggcgataagcttctagttcgtcttcctcatctttgccaccaccaacccggcccggccggcctcgagg

SEQ ID NO: 87069 - DNA, 246 bp, Zea mays
  Clone ID: MRT4577_179411C.1
caactcgcaagggtcaggccgtagctggacgctcaggctctgattccgagcaacagaatcgcgcaacaccctcgtcagacctagctacggcgcttcggtacaatgcgcgacatgggactctactactaggacgtggcccgggacagcaggaaggcgttgtcccgggtgcaggagttcctcggggttccggcgagggagctggccagcaagcatgtcaagatccacaccaggcccctcccggacctc

SEQ ID NO: 87070 - DNA, 1243 bp, Zea mays
  Clone ID: MRT4577_179412C.1
agggttttgttcaacttgcatattcacttcaacgctccgatgcagtatacgtttgttcccttgcccgccctttgacgttgtgcagtttctgaatcgcagggccgggccggccgggccgggactcgcacgttaacgctacacactcccgtttacgtgcacacctccaaaccctcatcacgatccggctccaaggtctcgagatgaagtcgagggcgaggtccggcggtggcgactccaggctctcggtgaggaagaccaaggttgagaaggacccaaacaagcccaagaggcctccgaccgcgttcttcgtcttcatggaggagttcaggaaggactacaaggagaagcaccccaatgtgaaacaagtctcagtgattggcaaggctggtggtgacatgtggaagtccttgtctgatgccgagaaggctccctacgtatctaaggccgagaagctgaaggttgagtacacaaagaagatggacgcctataacaacaagcagtctggaggaggacccacattgtctggtgattctgacaagtccaagtccgaggtcaacgacggggacgaggagggtgatgagtgatggatgacgggtgaaactctgggctgcccaagtgcttgcagtcagcagggaaatctcatcgtcgttgggcctaaccgggctttgctgctccgtagcgtctggaagctgtctgtcttttgagatgctgtagactagtagtgcctgctctgagttagtaattgaaagtgttgtccctgaagtgatgctgtttagttggtagtgtgttcgcttcttcggcacttatacttacccccaagcatcaacgctgcctgttttaaatctcaataggtgctgttttaaatctcagatctcaatatatgactactgatcgctgaatagatttcatgctctcttgattgactgcgtgaaaaagtgatgtatgacggatgaaactctgtccaagtgtttgcagtcagggaaaaaatctcgtcgttgtcggcctaaccgggttttctcgaaggactttctagatgcagtagattagtgccgtcttctgagtagtttccttgcaagtgtcgtcccgtccctggagtgaggcagtttagtttgtagtttcttcgcttcatcggcactcgaccgttgttggattgggatgtttagcctgcagtctgtacttaccccaagcatctatggtgcctgttttaaatctcagatcccaatagacgtttgttttaaaaatc

SEQ ID NO: 87071 - DNA, 601 bp, Zea mays
  unsure (1)..(601): unsure at all n locations
  Clone ID: MRT4577_179413C.1
gggtaccccctcgaggnccggcccgggaaaaaaaaaaaaaaaaaaaaaaaaaaaaaaaaaaactttccctttctgtcgctgcttcccaccttctagccccgacagggtganacgccgccgccgcttgcttgtgtccatttagccaccgcagggagacttgaagagtgggggtngttttggtcaagaacccaacaagaagcaattgcattactttcaaggcggttttccaggggtgaagtttcaagaaagaaggccgcgcttggcaagagacagactacaggggccagggataagggcttgattacaccaagaacaaaaaacaaggtacaattaccaccccaaataccagatttggttggtggcggatttacacaacaagggaccattcacagcacaaaatcattatctggctagtattagcagggtgatatgggttctttgctttctggcttacttcgcatgaggttgccacagatatgggctttcgaaagttgtgtctgaccaacatattgcagcttgcctactgcactgggcctttcgtgttggcctccgcgcgtgtgctacaagacccccgtggttatagataaaggaatatagaggg

SEQ ID NO: 87072 - DNA, 1182 bp, Zea mays
  Clone ID: MRT4577_179414C.1
acgccacgataaggccaaacaagcggtaaccttgaacaagggaagagaattgacttcctgggtcagtcatagcaaatgcatcggcagctgcgcatgcaatgaagtccagggctgccaactgagatgagaagttcctacgtgctcacacacccaaaccttagtcgcgatcaggccccaaggactcgagatgaagtcgagggcacggtccaccgccggcgactccaggctctcggtgaggaagaccaaggctgagaaggacccaaacaagcccaagaggcctccgagcgcgttcttcgtcttcatggaggagttcaggaaggactacaaggagaagcaccccaatgtgaagcaagtctccctgattggcaaggctggtggtgacaagtggaagtccctgtctgatgccgagaaggctccctacgtgtctaaggcagagaagctcaaggctgagtacaccaagaagatcgacgcttacaacaacaagcagtctggagaccccacggcgtctggtgattccgacaagtccaagtccgaggtgaacgacgaggacgaggagggtgacgagtgatgtatgacggatgaaactctgtccaagtgtttgcagtcagggaaaaaatctcgtcgttgtcggcctaaccgggttttctcgaaggactttctagatgcagtagattagtgccgtcttctgagtagtttccttgcaagtgtcgtcccgtccctggagtgaggcagtttagtttgtagtttcttcgcttcatcggcactcgaccgttgttggattgggatgtttagcctgcagtctgtacttaccccaagcatctatggtgcctgttttaaatctcagatcacaatagacgtttgttttaaaaaaaaaaaaaaaaaagcggcctcgagctctgatggagacagaagggtttctttagttactaaagcaggataaagacgacttatggcagccatcctatccttccctccataaatttcagcacctgcaacgtatatatttgtgctgcgcttgaaaccaatagctgctagcataagcacagcctcttcaggtgcaaggggacatttgccttcggaccgtaagaaagcagcagagggcaactttgtcatcttcttgagttctgacaacacaggaaagtgaatttggcgataagcttctagttcgtccggacgcgtggg

SEQ ID NO: 87073 - DNA, 284 bp, Zea mays
  Clone ID: MRT4577_179415C.1
ccttgatcttcctcgcagcctccttcctcgacgatacaggaacttgttgcctgatcttcccctcctcccctttccattataggtgctcagttctggtctatccagtcgcccctccccaccgttcgcgatggatggacgacaagcacccaaatcccgtcgtgattcgttggatgctgccctaggtatgatttctagatcccatcgaagttctgtgcaagacattcgagggaactccatggccaccagtggtattgctcgacgccatgttcagacagcaccagcct

SEQ ID NO: 87074 - DNA, 307 bp, Zea mays
  Clone ID: MRT4577_179416C.1
acgacccacgcgtgcggatccatctccgttgattcaaagccactccaactccggctcgtgttctctcagaccaacatggccaccccttgcgcgtcttctttagaggctaccctaccgcctgaagccgcagctgtcgccgaggaagaccattgacatgctgacggatatgttatttctaatttgcccactcaacataatgatgtttcttagcctaatgtactcaaagaaaaatatcctgagcctctacagacaagcgaagataaaatatttctggaaccctatacaactccaccatcttaaacaaatc

SEQ ID NO: 87075 - DNA, 538 bp, Zea mays
  Clone ID: MRT4577_179417C.1
cccggtcgacccagcgtccgggccgaccgtgccctgctaatctcctccttttttttcttttttctgtttgcctacgcgcagcatagttctgttcttttcgtatgcgtgttcttttcgcatgcctgttgcatgcatgttacttctctctctgtttctgtttcttttttttgtgcgcagtctcatcggaccgcagggagcaccggcgcttggccggtggcgctcggccagagcggccttgcagccgcgctcggctagaggagcggccctgcagcccctcccgcctgctacgagataactacaggaccattccagctaacagtgtgcatctgatctatacctcctaactcgattccccctatgtgaatgcttgtacgagatgtaattatctgtattttgggatcgagtttggaggtaactatacgtggatctgtttcctatgggtgttctctgtttattttgatgcggtccaaacagctctgtgcgttggaccatacctgatgcacttgatttttaagatttatagtgcactttttactcg

SEQ ID NO: 87076 - DNA, 470 bp, Zea mays
  Clone ID: MRT4577_179418C.1
acataagttcacaaattcacataagtccaaatacataagttcacaaattcacataagttcacatttttagttcacaagttcaaacaaacaagttcaaacattagctccatcgctctcgatcaggacatcagaatgttgttcgtagctccaccactagaattgagacatctgtccgcaaagtcatcgtgagggggaggagtcacttgatgagagccggaatcctcttggatcaactgattgcaggaataagaatgatagacttaatcaaatacatcagaatgtattctcaattcccatagcatacatggggttaccagggtggggtctgtctgcaatgataaagtaaacacaagaaatatcattaggacaaagaaatttttgttattgtttcaacaaaacaccacaatcaagaatcatctcctgcttcagccaacatatttaactcattgatatcataacggaaaaggaaa

SEQ ID NO: 87077 - DNA, 523 bp, Zea mays
  Clone ID: MRT4577_179419C.1
ggtgtggggttttttttttttttatcacaaattcacacaagtccaaatacataagttcacaaattcacataagtccaaatacataagttcacaaattcacataagttcacatttttagttcacaagttcaaacaaacaagttcaaacatggggggggtgggtctcgatcaggacatcagaatgttgttcgtagctccaccactagaattgagacatctgtccgcaaagtcatcgtgagggggaggagtcacttgatgagagccggaatcctacaaaataaacaaaaattctcataaatatacaactggcattaaatcagatgtacacaaagatataggaaagcatgataaacacaaaataataattgggtgtccctaagtattaatattttcttgcacatatttggtcaaaggtaaaagtatttgacctcttggatcaactgattgcaggaataagaatgatagacttaatcaaatacatcagaatgtattctcaatttccatagcatacatggggttaccag

SEQ ID NO: 87078 - DNA, 1662 bp, Zea mays
  Clone ID: MRT4577_17941C.1
atggagagtcatgatctccaggcagaaagggaatcacagcttgtgggtggcaacgagaatgatggttttggcattggctatggtaatggtgaactacaaggcggagggaatcattgggtgttggatagtggatgtactcaacacatgaccggagatatgaaaatgttcacccaaatgtgtgaggaagattgctcaaattatggtagtatcacatttggagataatcgcaaaggaaaggttaaaggcttgggtaaaattgctatttcaaatgatcattccatatcaaatgtgcttttagttgagtctttgaattttaatttactatccgtagctcaattatgtgatttaggatttagttgcaatttcaccgttgatgatgttattatctctagtgttgatggtagcaatcttaagtttaaaggttttagatatgaaaatctttaccttgttgatttctcatctagtgaggcaaagctcacaacttgcttattctcaaaggcttcactagtaaggcttatagaaattttcaacaaaactcatggtattattgaagaagcatatgatgttgagtttgatgaaactaatgggtctcaagatgaaagtggtaatcttgatgatgttggtggaactcaattgaaaaatgctatgaaaacaatggccattggtgaaataaagccaaaggaaaatgatgatgaaaatagtgtggttgtcattcctacctcttcaaccctaaatgaagaagatcaccaaagccaacaaaatgatgaaattatggatactcatgatcaagatacttcaagtcattcggttcctcctcatgcttcaactagcaattaccaaacagtatcaataattcatcattctattgtgaaggatcactcggttgatcaaattgtgggtgacattagtaagggtgttcaaactcgctctcgtatagcttcattttgtgaacatttctcttttgtattctgtatggaacctaaccgtgtatatgaagctctacttgatgttgattgggtgaatgcaatgcatgaagaattaaataacttctctcgaaatgaagtttgggagcttgttgagagaccaaagaaccacaatgttattggtacaaaatgggtgtttcgcaacaagcacaatgaagatggggttgtagtaagaaacaaggcaagattagttgcacaaggatatactcaaatagagggattggattttagcgagacatttgctcctgtggcaagattggaagcaatccggattcttcttgcctatgcttgtgcacataatatcaagctctaccaaatggatgtaaagagtgcctttctaaacggtaagattagtgaactagtgtatgttgaacaacctcccggttttgtggaccccaaaagacctaaccacgtgttcaagctttctaaagctctctatgggcttaagcaagccccacgcgcttggtatgaaaggcttagggatttcttgctttccaaagactttaaaattaggaaggttggcactaccctattcactaaaagaattgacaaagatttgtttgtttgtcaaatttatgttgatgatatcatttttggatccactaatgaattgttttgtgaggaatttgaaaaaatgatgtcaaaagaatttgaaatgtctatgataggagaattgtga

SEQ ID NO: 87079 - DNA, 758 bp, Zea mays
  Clone ID: MRT4577_179420C.1
gccggccggttcgggaacatctgcgtgtaccgatgacgcgctgagcaccacgcaccacctcaccatatcgttcttcgtgttgcttcctcggatggttaccttctctcgccgcgccgcctgcttctacacccaaccaacgacacgaagcaggcatggcgatcgcctccgactaggtccaggaggaacatgaacgccgaggcagctttcagaggtcttcaggtggccatcaagtgcaagaacagcaagggggcctacgagagcgcagccgtgggacaggtgaacaagtccggggccttcagcgtcccgctggccgccgacgccgtcggcgaggacggggagctcaagtcggaatgcttcgcgcagctcatccacaagcctccgtcgacgccggcgaacgctgcaccggcgacgcccacggagccgtcagcgccggttaattcgccgccgaagccagcccccatctaccacccaccggcaaggcacgacgctgccactggcccgtagctcttcaagaggctgctcccgttcttcaagaagatgcccttctttcctccttctgcgatggagagtcagcactataatgtttggacagtgtttcttggcttttgcaggttatgcagtttcctcggaataatttgtgacgttgattagttcagcatgaacgttgggtcagtttaagagtgtgtgttctacttccatctaatggaggcaatttcatgtcaactgttttatcaaaaaaaagaaaaaaaaggccccta

SEQ ID NO: 87080 - DNA, 457 bp, Zea mays
  Clone ID: MRT4577_179421C.1
gaggcggagccgcccgaccgaatccgcgcgtgagctggacgagatggctacagcagcttacgctgcgatggccagccaggtgatgaacagcaggccaggtgcactagaggtacgaggggcctgtcaggcgctgcgctcacgcggaccgggccccggctcaagcgtgggcaaggccgccatccaacccgataagggaacgtaccacgtggagcagcctatcaacggagagccgttcatagatagactggagacgcctgataaactccagtccgcttatggcgtatcacctctccaacctgccggactaccgcaccgtagtgagcccgcttctgcggtgccgtataggtcgacctcgcccacgggtacctactcgtcggacccttcgcgctcacacgtcccggtccgtaccacgcctgagcacggacaggcggacgcgctcacactcgccgacctcctc

SEQ ID NO: 87081 - DNA, 618 bp, Zea mays
  Clone ID: MRT4577_179422C.1
actagataaaacagttgacactccattagatagaagtaggacacacactcttaaactgacccaacgttcattcgaagtgctgaactaatcaacgtcacagcttattccgaggaaactgcataacctgcaaaagccaagaaagaaacactggccaaacattctagtgctgactctccctcgcagcaggaggaaagaagggcaacttcttgaaaaacgggagcagcctcttgaagagctacgggccaggggcagcgtcgtgccttgccggcgggtggtagatgggggctggcttcggcggcgaattcaccggcgctgacggctccgtgggcgtcgacggaggcttgtgctccggctcgggcaccggcgccggtttgtgctcaggagcgtctaccggcggcgtcgacggaggcttgtggtccggcacgggcaccggcgccggtttgtgctcaggaacgtctaccggcggcggcttggtgacaggcggcacggagtggccgtgaacgggcaggtgcgggataaccacaggagtgtggactcctacgtgatggacctgatggtggtgcatgctgtggaagaaagatggcagaggaaagccgaggcgcattcgggcgacgggcg

SEQ ID NO: 87082 - DNA, 396 bp, Zea mays
  Clone ID: MRT4577_179423C.1
tcttcatcaatatccccgtgtagcattgatcatgaatactgaaaggtatccttcctgatcactatttgaccttccaaactaacatcctcttcctcatgcgtagtagtgctgaagtctcatctcatatagctattggtctactaaatctaaaacctttgtactttagcgtctcctgccacaactccagttttctatttactccttcctgactttgatcaactagcactacatcatccgcaaaaaaatacaccaagggatatctcctatatgtcccttatgacctcatccatcaccaaggcaaaaaggtaagggctcagagcttattcttgctgtagtactattctaatcaggaagttatctgtgtctccatcacttgttcgaacactagttataata

SEQ ID NO: 87083 - DNA, 577 bp, Zea mays
  Clone ID: MRT4577_179424C.1
agaagaaatctcattctccatctgcaccttcctactccccgtgctgatctccagcgatacactgatcgaccgctagcgcctttgcggattgttgttgtcctgtacgccacatggagtgctggtccctcctcgcctccgcccgaacagcccgccacggtctgacgggatacgaccaccagatatggatgctgacgagccacgccccgctaaagttatccatgcactcttgttacacccaccactcacgcgcccccggctggaaccctctttcagtgctcaatctaggacagcgaggtgccctcctacttgacgactatcatgttgtggatcaacttggtcaccgcgagatacaacgtatcctacaacgcgttgtacaagctcggcgacttacggatcaaggtctatttgaggacactctagatgaaccctctacctctcatgtgagaatagatgtttcatacctggttgcctgttggactacgacccctgggtattgtcctactcatacatccaagtccactctacgatctagaacactgacagctacaacaatacacgcgatgactctgacaagttc

SEQ ID NO: 87084 - DNA, 1319 bp, Zea mays
  Clone ID: MRT4577_179425C.1
tgcggccgatcgaggccggccgggcttgcgatgcgatcataccagcactaaagcatcgcatcccatcagatctccgaagttaagcgtgcttgggcgagagtagtactaggttgggcgaccgccggcgcgggccgggagctctcacccatccacgtcttctcattcctcgacaatggagatccaggcacgacagctactggtgtctgtttttggcattctgatagcgataggtttcgccaatgccgcgctgggagagacagcaccgccggttgttgtcggcttggccaagtgctcggactgcgccaggaggaacatgaacgccgaggcagctttcagaggtcttcaggtggccatcaagtgcaagaacagcaagggggcctacgagagcgcagccgtgggacaggtgaacaagtccggggccttcagcgtcccgctggccgccgacgccgtcggcgaggacggggagctcaagtcggaatgcttcgcgcagctcatccacagcgcgtcgagtgcgccgtgccccgggcaggagccctccaggatcgtcgccgcgccacccggccacacggcccacaccaacggcaacgggaagacgttcctcgcgctcggcggcagggtctaccaaccgtcgcccgagtgcgcctcggcgttcctctgccaccctttcttccacagcatgcaccaccatcacgtaggagtccacacgcctgtggttatcccgcacctgcccgttcacggccactccgtgccgcctgtcaccaagccgccgccggtagacgttcctgagcacaaaccggcgccggtgcccgtgccggaccacaagcctccgtcgacgccgccggtagacgctcctgagcacaaaccggcgccggtgcccgagccggagcacaagcctccgtcgacgccggcgaacgctgcaccgtcgacgcccacggagccgtcagcgccggttaattcgccgccgaagccagcccccatctaccacccaccggcaaggcacgacgctgccactggcccgtagctcttcaagaggctgctcccgttcttcaagaagttgcccttctttcctccttctgcgatggagagtcagcactagaatgtttggacagtgtttcttggcttttgcaggttatgcagtttcctcggaataatttgtgacgttgattagttcagcatgaacgttgggtcagtttaagagtgtgtgttctacttccatctaatggaggcaatttcatgtcaaaaaaaaaaacaaaaaagccagtgaccatatagctgtgatggcattgagggattctatcaaaagagccctcaagctgaca

SEQ ID NO: 87085 - DNA, 1141 bp, Zea mays
  unsure (1)..(1141): unsure at all n locations
  Clone ID: MRT4577_179426C.1
caaagtctcctagacgtaactaaaataattgttgatttagctatgatctacaagggattcgtcatctaagatacttcttaatgatgtttttatactaaaattttgttttactgcaagatatgtctttgatattgccataccttatttttgggtcgtgctccgccactgtttctatacattaaggcagtatgttgctcaatacaagtgtgatccaactgcagacttaagccttaggtgcttcatgggtgatgaagcagatggtgttccaggaatccagcacttggttctgggatttggcagaaagactgcacttaaactactgcaaaaacatggttcattagaaaacttgctaaacacagctgcaattagaactgtcggcaaaggttatgcccaagatgctctcactaagcacgcagattacttacggtgaaatnatgaagttcttagcctgaagagggatgtaaatgttcagtttgatgatagttggctacccacgaggaacacaagcaatgacacctatgttctagcggacttcattcttaaacttaatggcgaaggcagaagctaaacagctggtacactgaaatatttgaacaagctggactgttcctcaccagacacatgatttaacaagaagacagatgcataaaggttggagggggcagttgctggaaaaaatgtgcatacaacatactatatatccttgctccaaagtagtagccatcactcatcacacatgagtacatgacaaattcttgcttgtgttgtggaactggacactgaagtagcctacctgtgttgaagctgggtggaaaatagaggtttggagggtctgtctttggtggatacatgcgtacatggtgtccggaacaaagttatgaacagccaaaaacaagctgtcatggtactactactagctgtagcctgtaaactgcacagacaccttgccaggagattacagatggatgcttcatgcttcagtagcaactcgttgatgtatattgcatgcaatttagaaacaatatatgtcccaatgtatttgtcaggaagcatctttaaatcattagcgactccagggtttcatgaatccaggctagatcattataatgtatatttactggcatcggatattgttttactt

SEQ ID NO: 87086 - DNA, 260 bp, Zea mays
  Clone ID: MRT4577_179427C.1
attgttatgataatatgcttgttttaagatgaaaagttgatggttacaagaacatgagtaccagggtcagaaatgaagacgttcacgctacaataggaacgaacatggcgagccatcaaggagcctgggtcctataggtttgacttctgcagacgtgtttaggaagaaatctgtaccttgcacgggccctgatgtatgcacaggcgtttaatctgaatagctgcttgcagagctcgtgcgaattggctgtagccatcaca

SEQ ID NO: 87087 - DNA, 535 bp, Zea mays
  unsure (1)..(535): unsure at all n locations
  Clone ID: MRT4577_179428C.1
ggccgggccgggttcccaaaaggatattccggataagcctttccgatgatggccccaccgatatccgccgatgccttggtggaggctgcctcggccgtcgccgcgtacccagccatcgcgccgaacagaatgctttgcaaggacgcgccggcgccggccatctctgtcgtctcgaagcagacggtccggcccgccggcgcgtcggcggcggtcggcagtggagacctcaggctctcggtgtcggacatgccgatgctatcgtgccactatatccagaagngatcccaactaccggccggcgcccggcgccgttctgccagtgtcagcgtcggacctcgtcctcggcccgtcccagtggagcaaccacgtcgtcgggaagatcagcgagtggatccatttggacgcggaggacgagcggctccggctggactccgagctcacgctgaaacaagagatcgcttgggcatctcacgtctcgctgcaggcatgtggtattcctgcccccaggaagacttttttgcggcaattatgccag

SEQ ID NO: 87088 - DNA, 653 bp, Zea mays
  Clone ID: MRT4577_179429C.1
cattgggtacctcgaggccggccgggtacacgtctccatgtcgcactgcgaacgtctcgttgtccagctctttgattgttcttacaagctgtctctggattacggagtagtcctacagcctcattcttatcggcctacctggccatctcccacaatggcactgggtccttacaccaacctccgcgtccaacgctacgacagcgttttcgtcattgcgctcgccaaagcacccgaaaaccgcatcaatgctgcttttgcgcaagaaataatactcgcgctacgtgatatcgagagcgagcttgcgcccgacgcaaaacgctgtgtcattacaaagggtgcgcacgaaaagttttaccgcacaggtctagatctggacaacaacaaggcgaatccgcatgctaataccgacggctatcttcccgctactagctacgctactcgactatccgttcccgaccatcgcactgatcacagggcacacatttggcggtgcatgcccattggcattgtgacatgattatcgcatcatgaactcgcagcgcggcttcttttctatgccgccagtcaacctaggactgcatttcccaggcattgccttcctaccaaagctgaaactcagaccgctggttgcgctcaagatgctgctcgaggca

SEQ ID NO: 87089 - DNA, 599 bp, Zea mays
  Clone ID: MRT4577_17942C.1
tcgaagccggccgggccgggatatcgagcacagatcacgcactagggaaccgcttcctgaactgctgctcctgaccaggatcaacatcatcacgacatcagccacaagtggtgtcctacttccccctctctaccatgtcctcagcccccgctgcactgtggcactctctgcatgcgagaccctattgctcgatcccaacattcccatccccttggcttcgatcccttacatgaaggcaatgttgccgactcaggcgctcaagcttaatgagaggaccaccgtgatatgcctctccaagagcgtactgccccaaagagactgacgatcgccgatacagtaaagaatgaggtcacttacagccagactgtgcctatgtcccgacatcaatgtcgatgaacgcgacatccgcctcaaagcgcccaattagccatcagcctcttcctctccaatgtgcatcaaagaaagaccgaatcgaattacctcgccccaactaattgagctgaatatggagacatcgccattcttcgatgcatgaaccccttagtgtccatactcgagcatcccagtgtgacttgaccgccaacaatgtataacaactg

SEQ ID NO: 87090 - DNA, 291 bp, Zea mays
  Clone ID: MRT4577_179430C.1
cttgtgcagatatcctcctccttgatgtggctcctctcaccctgggtattgagaccgtcggtggagtcattaccaaattgatcccgaggaacactgtcattccgaccaaaaagtcgcaagtgttcaccacctaccaagaccagcagaccactggcttcattcaagtaaggacgcgcattctggttctggcttctttggattggcagctgggtgcttggtagtaatatgaccttgttgttttggcttgggatccaaacatacaagtctttgggggtgagcgcaacatgacca

SEQ ID NO: 87091 - DNA, 318 bp, Zea mays
  Clone ID: MRT4577_179431C.1
gcccccatatttattgttgatgacaatgatgacaaatacacctcccattttaacattgtttccaatgctatctgcaccacatactaccttgctccactcgctaaagtcattcatgacaactttgtcattattgagggcttgaaaacaactgttcatgccatcactcacaccctaaaaactgttaatttacccttcaccaaagactgtatacatggcaaggctgacatctttaacataattcccagcaacacctgtgcttccaaagctctcaaaaaacatcttcctgaattgaataacaacctcacttgcatgtccttt

SEQ ID NO: 87092 - DNA, 705 bp, Zea mays
  Clone ID: MRT4577_179432C.1
tggacgcctgcaggttccggtccggaattcccgggtcgacccacgcgtccggaacacatcaaaacatcatgcactatgatcaagtaggtttcatctcagggatgtagagatggttcaatatacaaaaattcattaatgtaagccaccatataagcaaactaggaaaaaaatcacatgatcatctattagatgccgaaaaggccaagatatggatctagctcaatgtccatcagtaggtgagtagatcaaacagaaacaacagagatttattcaactataaagaacaaagtgatatcactgcaggaaaacagatggaactggacaccaccatgctaagagaaatatgacacactctaaaagacaatgttgtatgggtttttactcctatgtagaatttagagtggtacaggggacatcaaagtaaaaaactgactattcagggattggaaaagtacaaaatcaaggaggcagggagagaaaagaaagcaatagagaagatgaaaatgataagctcatattgtgtgttatataaaaatgcaaccccaggccagcctggtctacagagtgagttccaggacagcctacacagagaaaccctgtcttgaaaaacaaacaaacaaacaaaaaaaagcaacctcaaagtaaatacaaaaaaagcagatttttagattaccaattatctgcattattaacaaaaacaagcct

SEQ ID NO: 87093 - DNA, 1857 bp, Zea mays
  Clone ID: MRT4577_179433C.1
tttccttgaatacaaatccttttcgaaatcccacacctatggcgatcgtcggcggcggcgggagctggagcatccacggccgcgctgatgtcacatcccgctacgaggtcctcggccgcgcgggctccggttcctattcggtactttaccgaagagcccgtgccggcacctatagaaggattacgatgtcccggcatcaaaggacgaggatgatgacagctcaactgaagaatggggtaattacagggatggtgtctctcgggttgacatttgatgagtttggtccagtatggatgcccccaaaactggtcctcgtcctcgagtggctcccgctcgacctcgccgccgtttgtgcttcacgccatgaggcgcgcgggcgggggcgagggaggggaaggcatccccgcctcgcaactcaaacggtggatgctgcaggtgcttgagggggtcgccgagtgccaccgcgccggcgtcgtgcaccgtgacctgaagcctgagaacctgctcatctccgaagacggggtgctcaaagtcgccgattttggtcaggctaggatacttcagcagtcagcacctacatttcaagaaatgtacccacacgagcaaagttcaggcatggaaacatgggttccacaacaacaaccagcagtgctacaagggacagaagaggaaccaacatcttatgaatcagatgctactgctggtcaggagccagagaccctaactgctgctgactacctgcgtgaactggaccaactccgagaaaaatccagcgatgttgacaaaatgagctttcaggatgaacatgcatcctgtcttgccacgtgcagcacaggagacattgaagatgatccatacccagcctcctactctgacgatatggaaggcataggtgaagattctggtgccttcacttcttgtgttggcactaggtggttcagggctcctgagcttttatatgggtcaacaaactatgggctagagattgatctctggtcgcttggatgcattttggcagaactgatgaaattggaggctttgttcccagggatatctgatattgatcagattagtagaatcatcaatgtcctgggcgatataacagaagaaacctttccaggctgttcaaacttgccagattacaacaagatttcctttaacaaagttgagaaaccgacaggccttgaagcatgtctgcctaacagatctcctactgaggttagcatcataaagcagctaatttgctatgacacagcaaagaggaccagtgctgttgatctgctgaatgatcggtactttaccgaagagccattgccggcacctatagaaggattacatgtcccggcatcaaaggatgaggatgatgacagctcaacagaagaatggggtaattacagggatggtgtctctcggattgactttgatgagtttggtagtatggatgccaccaaaactgagaagggtttcagcatacagttttcgtgacgaagaaagacgtagacgtacggaccatgcgtgccatgtccaaactaagaccatatcatggtatttatctacatgggagttgaattgctgtcaacatagacgaacatcagtaagcgatcaaaggttgtgcaatgttgctttgggtttaacatttttttagtttctatggaactttgtgattctttgtacggcagaaccagttttttccctggcaagaataaaactgtgtgtggtagtctgaagttcctatcgagatttccattatggcagttggaagcgctgtcagaatcgaaagtaaaataaactcatcagaggaatatcatataacattgaagtcctttcatgctatgaataataaagagatttgatatt

SEQ ID NO: 87094 - DNA, 126 bp, Zea mays
  Clone ID: MRT4577_179434C.1
aattcggcacgagggtcacaccgacacatcgtgcttcagtctgcgccctcactgactgaccgatccctggctatttcacatgctccgcgggagcattctccacgctcgcgcaccagccttcttgcg

SEQ ID NO: 87095 - DNA, 125 bp, Zea mays
  Clone ID: MRT4577_179435C.1
gacagatcctcctttaccttaattcctttatcatgtatcaccaacgacctctccgtataggagttggttaccctccacaaggaggttacccactacatgattgacggacaccttaaactttccaa

SEQ ID NO: 87096 - DNA, 328 bp, Zea mays
  Clone ID: MRT4577_179436C.1
taccagcccttcgagcgaggatggccggagaccgtttaagccggcaacccaatgcgggagcaaaatggaagaccgaccctcgggaaatatcacccaccgggtgcttgtcaatacgggtgaaaaggaggactagggcgagactgccctgatcgacaagctgagtataggtcgtttctcgaatggcctacacgttaccagtttttacaaagaccggttcaggcccagggaatgatgtgctcgaccttctcggggaggacccttttttcaagattaacgttggaatacagatgggtgccttcttcaaagtcaaggaagtatattggggcca

SEQ ID NO: 87097 - DNA, 875 bp, Zea mays
  Clone ID: MRT4577_179437C.1
atacgcatcacttctccagtccagcgccggtgggcggcgttcaacttcgttcccaagccaaatccctctccctctccccaccttgccccccaaaagccgaaatcaaaacccagagcgagcccgcggcggcgagaagcagcagcagcaccagatggatcccccggcggagatggataccggcgagctggacgcgctgctccgtgcggcggccgacttcgcctcctacccagggacgcatggtgaggacacagtgaggcagttcctggaacaattccctctgcctaagctgctaggtgtattgcagagccaggcagacgtacctgagacggttgaaactgttgcagcgtgcttggacaaagtattttcatccagatatggagcatcgcttctgccaagctatggtgaatttattcaagctgggttgctcacaaactcaaatagtatcagacaattggcctgcaaagcagtggttcatcttcttgacaaggctggagatattgctgttgccgtggacacatttgtacagcacaatctgtaccctcttctgatcaactgcttgattgagggagacgaagagatctcagcaattgttttggatgccataaagcgtctagcagaaattcctacagggaccgatatcatatttccaccagatggtcaaggattgcaactcaacaaagtggcagcccagtcatcctcaatggcacggattcgcactctatctttgatagctaagctctttggtgcatcaagttgtactgctactgcaattcgtgactcaaaccttctcagcttatttgaggacgagataaaagatagaaaagatatgcttaaaaccctgagtgcattagaggtcctctatgagcttgcggagc

SEQ ID NO: 87098 - DNA, 460 bp, Zea mays
  Clone ID: MRT4577_179438C.1
ccattggcttggccaaaaaatccctgggggaaccggaattctgggccggccccagggggggccccaaataacccccaatccaaaccccgattttttatagccctacgggggcttggccaaccccaaaggaggccctttttggggaagggccattttttaaaggggggccccacaaccccatcataatggggggcttccctttacaaaagaaacaatggaaggggggggggcccccgggccccggggggggggcccaaacttgcccagaaaagggcccttggggcccataaggccttaccttaggcagggggggggggggaaccctgggcccccgaggcctggaccgccttttttttttcccggggggggaggtttcaggggggccgggggtttgacttttttccaccaaaaagggtttttgaaccgccgggctggtttttggaatcaaacggtttttcct

SEQ ID NO: 87099 - DNA, 322 bp, Zea mays
  Clone ID: MRT4577_179439C.1
agcagtggtaacaacgcagagtctttttttttttttttttttttttttttttcttgaggtacctttataaatttttccacttgtgcaatttgtttctgttgatgcagcagtcactggactaatcagttattttaacatttcggcacactttcaccactagtttctgcttatcgcggggcattgcgcatataagggcaccataacaatcatatacaatactgccatctagcggaaatgatcaaggtcactatttttgtggacacacgtacactccatataccatgacacttgtgctaccacagaaacaccttgatgattatcg

SEQ ID NO: 87100 - DNA, 5829 bp, Zea mays
  Clone ID: MRT4577_17943C.1
atggctagtaacaacaatgtgcacattgggaagccaccgcattttgatggaaataattatgactattggaaaataagaatgtcaatgcatcttagagcaatgggtggaaaaatttggccaattgtcagggatggatttgttgtgttgaaagaagatgaaccatccgttagtgataatgagaatatcctcacaaatgatcaagccatgaatgtcttttatgatgctcttgatataaatgaattcaatcgtatcaagaatctcacaaccgctcatgagatttggattaagctaatggaaattcatgaaggaactacaattgtgaagagtgccaaactatatgtgtgcaaagggaagtttgagcaatttattatgaaagaagatgagagtgtatctgatatgttcaatcagttaaatgagaaagtaaatgaactcaagggacttggttttaatgtaccggatgtggatttcactcacaagttccttagatcacttccggagaaatatgagaccattgtgacaatgttatttggcaaagaaggtgaaaatgaatcaattgctctcaaagctaaggcctcaaaggcaattgaaaaggaagatagtaatgatgaagaaaatgaaagtgagagtgatggtgacatggctctatttgtaaggaaattcaataaattcatgaagatgaagagaggtcaacctagaagaggtcaaacatctagaagaaatgctttcaatgatagaaagtgttttgagtgtggggaacccggtcacattgccatgaattgcccaagcaagaagaagaagggcaaagatgaaagtgacaagaagaaaaagaaatactataacaagaagaaagatggcaaagcctacttagttgaatgggactcggatgatagctcggatgatgatgatgatgatacctcatccaagcttaatgccggaattgccatcaaggaagctccctcactcttctcatccccccattgtctcatggcaaagggagatgctaaggtaaaaatcatcaccgatttaaatgatataaaagatgatgatgatatcgatgatgttgatgatgatggctattcatatgatgatcttgttagaatgttaggtgaggtcgatgactacatgcacaaagaaaaagaaaaatttaagaccttgaaggaattgtataaaaacctccaagtgtcttttgaggagctcaagacctctcacaatgacctaaaagaaaattgtgagaagcttgtggatgctcaaaaatcatctattgtgcatgaagttgaggtggtcactaaggatgttggagtcacttgtgacttacttgatagtcttacaagtgaaccactacctactaactctatttgtgataaatacaaaatttctctcaatgataacattgctcttgatgaatcaaaaactattgttgagaatgaagtgttagtagatagagtaaacactctaactcatgacctagaaaaggcatatggtggtaaggctaaattggatttcatattgggaagtcaacggtgctctcttaaccgtgaaggtcttggatatgttcccaagaaaggaaagaatgcttttgtaaagcaaaagacattgtttgtgaaagaatgtgacacagtgtgtcacaagtgtcacaaaaagggacatgttaagaaaaattgtcccaagttcaaaaatgtatcctccacttgttttgagcattgttatgttctttctcataatgcaaaaggtgttcatgctaaatttgttggtaaactacaaggcgggaggaatcattgggtgttagatagtggatgcactcaacacatgaccgaagatatgaaaatgtttacccaaatgagtgaggaagattgctcaaattatgatagtatcacatttggagataatcgcaaaggaaaggttaaaggtttgggtaaaattgctatttcaaatgatcattctatatcaaatgtgctcttggttgagtctttgaattttaatttactctccgtagctcaattatgtgatttaggattttattgcaatttcacggttgaagatgttattatctctagtgttgatggtagcaatcttaagtttaaaggttttagacatgaaaatctttatcttgttgatttctcatctaatgaggcaaagctcacaacttgcctattctcaaaagcttcactaggttggttatggcatagaagacttggtcatgttggaatgaagcaactcaatcgattaaccaagcatgactcagttcgtggcttaaaagatgtgaagtttgagaagaacaaattgtgtagctcttgtcaagccgacaaatctaatgtgtttgaaacattcaagtcatttgctatattggctcaaaatcaatatgatttcgacataaaaaaggttagaagtgataatgggtcggaattcaaaaatgcgagaattgatgaatattgtgatgacaagggtattaaacatgaattctcttccaaatataccccgaaacaaaacggtattgttgaaagaaagaatagaactctcattgatatggctaggtctatgttagcggaatataatatatcggattcttattgggccgaggcaataaataccgcttgtcattcatcaaatagactatattgtcacaagcttttgaagaaaactccatatgaattgctcattggtagaaagccaaatatctcatattttagggtattcggttgcaaatgttatattttaagaaagggaagccggctttctaaatttgagaagaaatgtgatgagcgttttcttcttggatattcatcaaatagtaaagcttatagagtcttcaataaaactcatggtattattgaagaagcatatgatgttgaattcgatgaaacaaatgggtctcaagatgagagtgataatctcgatgatgttgggggaactcaattgataaatgcaatgaaaacaatggccattggtgaaataaaaccaaaggaagatgatgatgaaaacagtgtggttgtcattccttcatcctcaactctaaatgaggaagatcaccaaagccaacaacatgatgaaactatggatactcatgatcaaggtacttcaagacattcggttcctcctaatgcttcaactagcaattatcaaacggtatcaagaattcatcattccattgtgaaggatcacccggttgatcaaattgtgggtgatattagtaaaggtgttcaaactcgctctcgcatagcttcgttttgtgaacatttctctttcgtatcttgtatggaacctaaccgtgtagatgaagctctacttgatgttgattgggtgaatgcaatgcatgaagaattaaataacttcgctcgaaatgaagtttgggagcttgttgagagactaaagaaccacaatgttattggtacaaaatgggtgtttcgcaacaagcacaatgaagatggtgtggtagtaagaaacaaggcaagattagttgcacaaggatatactcaaattgagggattggattttggggagatatttgctcccgtggcaagattagaagcaatccgaattcttcttgcttatgcttgtgcacataatatcaagctctaccaaatggatgtaaagagtgcttttctaaatggtaagattagtgaactagtgtatgttgaacaacctcccggttttgaggaccccaaaagacctaaccatgtgttcaagctttctaaagctctctatgggcttaagcaagctccacgcgcttggtatgaaaggcttagagatttcttgctttccaaagacttcaaaattgggaaggttgacactactctattcactaaaagaattggtaaagacttatttgtttgtcaaatctatgttgatgatattatttttggatctactaatgaattattttgtgaggaattcagaaaaatgatgtcaaaagaatttgaaatgtctatgataggagaattgagcttctttcttggccttcaaatcaaacaattgaaagatggaatttttataagtcaatcaaaatatttgaaggacatgctcaagaagtttggtttagaaaatgcaaaacctatcaagactccaatggcaacaaatggtcatctagacttagatgaaggagttctactcactgtgaatgctgtgcaaaattttgaactcgtttggatgggtattctctgcaaagtcatcaattcaacatttgtggcggctagggttctttggagtcgcccctggtcggtcgcggaccgtccgcctggtgggcacggaccgtccgggcctctggcgcggacagtccggccccctagcgcggaccgtctggaccctggcagagaaatgcagttctattcctttttattgtgtggttttggtggtctccgcaagaaacttgcaggtcactttaaatcaaagcgccctcgtggagatgatgatgactatacaccaaccactgattcagaggcccaatcctcagctaggggcactgaatctatggatgctgaagactttcctcatgttcatcccgattatcccattgacacctcaagatggacatatccaaagcggaggttttctatggctgagtactgctcaaggcggactatgaaccaatacactctgccatctgacaccaatattcaaattttccacactcagctgcagtttgatgttttttggggcaccttggtggatacaaattttcataaacatcaagtgattgattggtccttcatgctaggtcaatcagtcatggagggtctgatccctaagtttgagacgtgtggcctgtatcagtttatggggcaacgaacagacttcagtgaaatggctgtcaagcaattcctggccacctcagagattgatatagaagaagaatccgtcacctggatgactggcttcaagcgctattctgcctcttttgctgactttgccactaccaacagtctagattatggcaccatttcagctggactggatctctacactgaggataattttgaggacattgtgcaattctatgagccagcacggctgggaatacccaggaggattggagagacaacaggactcaggcatcatcctgctgtgatcaacaaaattgccagagtcactattcttcccaagagtggggataagagcaaaatacgggacaaattctggaatattatccatcacatcatgaatggtgagatggacaagaatcaaaatttagcatatgctccttatattatggctctcatcaaagccaagacaagatttgaggggccctgcgagattgttcacacaccattcagaccctttaagaatgagatagggtttctcaccaggcctctcactcccttcccagatgatgaggaagaccctggctataatgcaggagcagctcctgatgttgaggccgagcagatgcctcctcctcagcctcagcagtattggcagcctggtccaggctactttgatccctattttcacaatatgcagcaggggcttgagacccatattgatactcgctttgagggcatgatgacacatgtggatcaccgcctagatgacatgcagtctcactttgacagtaactgggatgcgctcaactctgagttttctgagtttcgtgatcacattcacactaatgtcactgatcctatcatgaccaggctgaataatgtgcagcagagttttcaagataacatgggcgctctctccagccaatttgaccatctttctacaaatgacagcatgcatgatatcagtcagaggcagcagcaactccagcgagattttggccagttctcctctctatttgacacattcagcactcactactacaacatgcatcctccgcccagtgatcagtga

SEQ ID NO: 87101 - DNA, 353 bp, Zea mays
  Clone ID: MRT4577_179440C.1
gaaaaaaaaaggggaaagagggggtttttggacttgggcccaaaggtttgaaaataacgccggggaaggacacacacacccacaaatcaatttttggttgggccaaccaagggggcgggggctttatactccccccaaaaaaacgggggcggggttctttccagaggataactgggggggaacttccatgggagggccaaaaatttgtgatccgccaaaaaattggcaaccccggggccgcgttttttttgggacaaaagcaggggcccacattggtgtacataggggaaaaaaacaactgaaggggaacaccctccccgggggttggagggggtttatgggggggaagggcc

SEQ ID NO: 87102 - DNA, 192 bp, Zea mays
  Clone ID: MRT4577_179441C.1
tctctagtcggtgggcgcacttttttgctgggggtgcatgtcaatgcacaggcgggataaatggatgtttcccatttgactccaaaatctcgaaaggtacacgtttcactactgcatccccaaggaccccaaccaaagaagtggttgctttggggcctcagctactgacaggctctgcagcctgatcgccgt

SEQ ID NO: 87103 - DNA, 519 bp, Zea mays
  unsure (1)..(519): unsure at all n locations
  Clone ID: MRT4577_179442C.1
ggtaccctcgngggccgggccgggcctcttcctgttttacttctacccaattgttccgtgggttccacggacccgcccagtagccgtaccgatacgatgcggccgacgtttgccctggttaaggtcgtgccgtggttcgctagtagccatgctgtgcatgctagtgcggtccagcctccagcggagctactggctggacgagttaccacggacggagacgtccgcagatactaccaccgttctgtccggcatgtggcgtcttttggcctcgaccagagatatggcgctggtttctgctccacgcgcatgtacctctttgcagagcacagcgcggatacgaagctggttggggagactccgctgggacgtggacctcgttctacctgacttccggggaggcagacaagcactactagaccgacatggagttggtggccgtctccagggcctcccaggcggctctgaacacgaacgggtgggccaccgctcactgaaagaaggagcactaattctatctgt

SEQ ID NO: 87104 - DNA, 308 bp, Zea mays
  Clone ID: MRT4577_179443C.1
atgggattgttcaaactgcaaatgatattcatcgttatgtgcggtgtacgctgcttaattccacaagaccttttgatgatgtcgtgaagtcagctcaagactcccttcgttggttatgccataaaagctttcttgagtggaaccatgagaccaagatatactccgctactccccttggtagagctgcttttggaagttcactcaaccctgaggaatcattggttgttcttgatgatctttcgagggcaagagaaggctttgttctggcatctgatttacatttagtttacttggtcacacccataaat

SEQ ID NO: 87105 - DNA, 378 bp, Zea mays
  Clone ID: MRT4577_179444C.1
gggtgtaatgtgatggaatatgggcttggacaagattcaatcaactgttcaattatctcccactcgctgccatgatagaaaagaaaataatttgctccacggtgtttattgaccttcctatgcctccatgcatgcagattattaaacaccgtggagcaaattgagaaacttgagaggcctatcacaatggatgttggttccattgtcctcatggacctgctatggtctgatcctacagaaaatgatagtgtggagggtttgagacctaatgcacgagggcccggcttagtgacatttgggcctgatcgagtaacagaattctgtaaacgaaacaaattgcagttgatcataagagcccatgagtgtgttatggatggg

SEQ ID NO: 87106 - DNA, 1739 bp, Zea mays
  Clone ID: MRT4577_179445C.1
gtccggaattcccgggtcgacccacgcgtccgcgaagttggcgagctatgctacgctgccgagcagatttttatgcaagaaccaactgttttacaattaaaagcaccaattaaagtatttggtgatcttcatgggcagtttggggacttaatgcgccttttttgatgagtatggttttccgtcaactgctggtgacataacgtatattgattatctcttcttgggagactatgttgaccgaggtcagcacagcttagagacaatagctttgcttcttgctcttaaaatcgagtaccctgaaaatgtacacttgatcagaggaaatcatgaagctgctgacatcaatgccctttttggcttccgccttgaatgcattgagagaatgggtgaaagtgatggaatatgggcttggacaagattcaatcaactgttcaattatctcccactcgctgccatgatagaaaagaaaataatctgcatgcatggaggcataggaaggtcaataaacacagtggagcaaattgagaaacttgagaggcctatcacaatggatgttggttccattgtcctcatggacctgctatggtctgatcctacagaaaatgatagtgtggagggtttgagacctaatgcacgagggcccggcttagtgacatttgggcctgatcgagtaacagaattctgtaaacgaaacaaattgcagttgatcataagagcccatgagtgtgttatggatgggtttgagcgtttcgctcatggacaattgatcactttattttcagcaacaaattactgtggtactgcgaacaacgcaggggccatacttgttgtcggcaggggcttagttatcgtgccaaagttaattcatccacttccacctcctgttaattcacctgagtcctcccccgaacgtggggatgccacatggatgcaggagcttaacattcagcggccacctactccaaccagagggcggccacaagctgccggtgataggaattctcttgcttacatatgatacttgacacgacagagccacctccatctgctggatatgtttgtttgtaatcagaaatttctttaccagtttcaaggtacatatggtatagccaagaagaacaatcaaccaacaggacatcatggatacacttgtgatcagttccctggtaatcctttgtgatgcatcggttttaactgtagttgtgtgctaccgtgacttcagctcctaactggggagctgcataatcagcatttcagatctcaagcaacattgtatgattgcgataccagtggacaataatcaagtctgatgtagttgtaatagctaatctgtaatttcagtgtacatggatagattgttctttcgtcagagtaggaaggtttccaaatgtttgcatactatgcatgctgcagcctgggacgcggtttaaacaggacagctatacaagttgccagatctgagctagattgggcagagaagatttgaaccattttatttgctctccgcggagcgcgaatgtaagaggttgtgttgtgttgtgaaatactgaattcgttataggtatttgtgcaataaattaagttttgcttaaaaaaaaaaaaaaaaaaaaaaaaaaaaaaaaaaaaaaaaaataaaaaaaaaaaaaaaaaaatataaaagaatataaccgaccggtctaccttgatcaatcttagggtccccctcctattaaaaacattttatttaaaggggggggggt

SEQ ID NO: 87107 - DNA, 241 bp, Zea mays
  Clone ID: MRT4577_179446C.1
actttcttatttgtgcgaagccacaaacactcatccaacaaaacttcatatattgatactataacatcataagtcagtttaaacagagggcaccaccaatgatggagcgctggtagaacactgctgggtttgtaaaacaggttaggatgatatggcagcaataggtagaatttttgagaggatgccagcggcttgcccgagatcacactgagcgtgaccggtggggcgatcgataggactg

SEQ ID NO: 87108 - DNA, 589 bp, Zea mays
  Clone ID: MRT4577_179447C.1
taaggccgccatgtgctggcgaatcgccctatgacaatctggaggaacgcggccttagcttatttctgggaagccacaaacataacacaaaaaactagattgattgaactataactcataagcaatcataaaagagggcaccaccaatgatgggttcgttggtagcaacactgctgggtttgtcaaagcaagttggttgaatggcagcaattgttgcagttgtaagagggtgccagcgttaggcatagcgtgtaggtagaacggcaacaactgttgttgtgtataagaaggcagtagggctcacatcatctagctggctgaatgggagtagatgttgatgatgataataagcagtagagttaaatgatgcttgttggtttaatggaacaacatgatggggggaggcagtagctagatgatttaattaaagctggtgctgtatataaactgcagaaattggtgtaaatagaccaattagttgaagaaaagctgttgctgagagaaaagagaaaggtatggcaggctacttgtttgatcagaggtaggacgagtagctgaagatggagggccctggagggatgtacctggg

SEQ ID NO: 87109 - DNA, 195 bp, Zea mays
  Clone ID: MRT4577_179448C.1
gactggattaaggtaacaggcgccaactcgccctgcgcattcatcatgatcacaccgacgtaaccgcaacgaattcgaatggtggctagatcagctaaaataccacatgtgcgtggactaaagttacatgtaatataacttttgcgattccacagatgagaactcttcaaagtttaaaccgtcgatttagctctt

SEQ ID NO: 87110 - DNA, 302 bp, Zea mays
  Clone ID: MRT4577_179449C.1
cgggggccttctaatgtaccaagtatatacataatgtgctcgtgttaaacaggatacatgatgtccttatttcaaactgtaataatggaccccctttggtacaaacttggtggggattcacaatttttttgtaggtttacaaagtttcaacagttcctgccattacatataatgataaaattggtcgatgtcaaggaattgctcttattgactgaccatttaaatttttaaacaatggcacgctttatttggaattaggcatgtcttgcactcaaagccagctttacttccacaccctagag

SEQ ID NO: 87111 - DNA, 738 bp, Zea mays
  Clone ID: MRT4577_17944C.1
atgagtatcaggccgcggaccgtccgcccatggaccgcagaccgtccgcaacatcaggcaatggacagtccgagcagcctcgcagactgtctgagtggttttggtggtctccgcaagaaacttgcaggtcgctttaaatcaaagcgccctcgtggcaatgatgatgattatacaccgaccactgattcagaggcccaatcctcagctgggggcactgaatccatggatgctgaagattttcttcatgttcatccagattatcccattgatatccaaggatggacttatcccaagcggagattttctatggctgagtactgctctagacggactgtgaaccagtatgctctgccatcagataccaatattcagtttttccacactcagctgcagtttgatgtcttttggggcaccctggtggataccaactttcataagcatcaggtgattgattggtccttcttgctcagtcaatcagtcatggagggtctcatccccaaatttgaaacatgtgggttatatcagtttatggggcagcgcaccgatttcaatgaaatggcagttaagcaattcttggctacctcagagattgatgttgcagaagaatctatcacctggatgactggcttcaagcggtattctgcttcttttgctgactttgccgcagttgctctatgtcaacttcaaatcaagataagtcctatgaaactcatctccaagatctatcttataccttag

SEQ ID NO: 87112 - DNA, 451 bp, Zea mays
  Clone ID: MRT4577_179450C.1
agatcttagctcagcactagttttgattataagatgaattcagatattagtttgcatcattcaaaaacatatgatctcttctacaaattacttaacaagggatacctttttcttgtctgaaagggatcttacaagctccaaatatcagttcatgtaatgatccagagagaaacagagctgtcttatagcctctcttttctcctcctctcggtctgttatcacatttctctgcaactccacttgtttctccaacacttcaactttggctctcagttcttccacaatattcttgtcaggttctgactcagatttaatctcagtttcattaagacacaaaacctgggtcaaatactcctccatttgctcaatctggatttctcttgatctcaactctgctcttaggctatctaacaaggcatcagcattatcggtctgcaggttcgatttctcg

SEQ ID NO: 87113 - DNA, 1033 bp, Zea mays
  unsure (1)..(1033): unsure at all n locations
  Clone ID: MRT4577_179451C.1
ctagccttttttttttttttttttaaaagaaacagcgcgtaatggcatttgtaaacagaaccatgcatgcactctctagtctagccggcctaaaaagaaagctaattaataacgcatgaagcgaactaattaataatgcaccttagctttctagcctccaaagaattgaaggttaattattaaacaagtgcgaagcttgccatgctactaaactcgtcgtcgtcgcccgacccggccgaccgatcgagaatcagtttttgttgatcgacgacgacgacgccgcccggtggttgaagtcgtggtcggcgatgaaggtcatgcagctggagctgcgtgagatcccggtgccggcggccttggcgacttccctgttgacctccctggggttgatgctggacctggacctggggccgagcgtggccgtggcccggcgccggaggatctcgcgcatggcctcggcctggaacagcaccgggtgcgtccgtccgaagccgttgaaccgcttgcacacgcccatgtgcgccttgagcgcctcctccagcggcaggcccttcttcttctcggcctcctccgtcacggcctccgcgcacaggccgcagacccagcgccccgcgaacctggcgcgcacgcgcgggatgtactcgggcgtgcactcctgcgacatgccgcagcactcgcacttggcgtgctgcagtaccggcgacgctcaggcacggcgggctgctgctgctgctgctgctcatcggcctccgccttctcgtccttgttcgtcaccacgccgtgctggtggtggtggtggtggtggagctcgtaggcggagacgtcggacgcggtgcgctggagggcgttggtggacgaggtccgcgccgcnctttgacctcaccgttgccgtgctgttngcgctngcgctggcggcggcgcgttgctcncatcgcaagaacggcccgccatgacgccatgngacgcacacgctctctgcttgagtggagcatantgatcancctcgtgcgattctgcagccggggatcatagt

SEQ ID NO: 87114 - DNA, 382 bp, Zea mays
  unsure (1)..(382): unsure at all n locations
  Clone ID: MRT4577_179452C.1
cgcgccccanggaagggggcaccagggaagagcaagnacggagggggancaagagccgccagaaggacccccacggagcgcagagnaacggggacaggaacgccgccgagccaggaccgggnccagcagcgccagcgcgacggagagacacgacacggcacaggaagcgccaagaaagaaccaaaacggccggaacaccccgagaagagggaaccagacaaaacgcgagaagcggcaggggcagaacaacaacagaagggggccaaccccagcagagaacggcaagcgagcaaagcgcaggacgcaggcacaagccaggaacaagggacagggcacaggcccaaaancaaaaggccgccacggaagacgccagaacaaaaga

SEQ ID NO: 87115 - DNA, 313 bp, Zea mays
  unsure (1)..(313): unsure at all n locations
  Clone ID: MRT4577_179453C.1
agcagtggtaacaacgcagagnactttntttttttttttttttttttttttttttccggtntttttttttttttttttttttttttttttttttttttgggttccaagttttcctggggcaccaacatagccgcagggacgcttaaaaaaactaacatttaacatcgtaccagttcgagccttcctggaccacaactagagcgtcatccaagagcgtttaccgacataactagaggggttcaccatcccccaaaaaagtaaaaccacggttcagcaaaagaacatggagctcctaactttttaatgcaggccc

SEQ ID NO: 87116 - DNA, 414 bp, Zea mays
  Clone ID: MRT4577_179454C.1
ctgatgctccagtgatgtggcagacagaaggatctgggagagggtaagccctggctgttaaagggagctggttcttagacgactggatatcctgctgccaaagagggatacgacggtggtgttgtattgtgggctctgaatctagatagttgctgtccagccaatgcttgacatccagcgcgtcctatatgccaatcaggctaacatgagggacggaggggagcagacaattcttacggtagtgtggctgatcctgctctctcttggaggtagcatagcagtcagtgtaggacgattgtgggacatacactggtccttctggatagattattcttgaaggctctgcgtatgaaatataagcctctgtgataagtaactatacatctttcttttttcatactattatagctggtt

SEQ ID NO: 87117 - DNA, 204 bp, Zea mays
  Clone ID: MRT4577_179455C.1
atgaccagaggaaaggtaaggtgtgagcagaaaacggcaaatgaagcccatgacatgatccgaatcatggatctttcgcccggaaagcttacatttggatgctactggtccactacaagaatccagaatcatcaatgtgtcaggttgcatctacttcaagaacccaacctctttcaaaaagcaaccacaaatcaacagatgtaa

SEQ ID NO: 87118 - DNA, 399 bp, Zea mays
  Clone ID: MRT4577_179456C.1
agactcaaaactttgacttccaggtgagtatatttatgtacactctcatatatgtacatcaaaattgtttcgatgatcagcagatcctctaaaacacggatgctaatcgcaggcattagagttgtatgatctatctacagagtgagagtgttcagaagagaaactctgctctggatcagtgtcctgaacaaagtggcaactccactctcaagatcaacaatgtccaactccaacgcctgcaattgctcctccttgcacacaaatttcttcttctcaaatgccttggacacaagagaccacttgctagcgctgggcaacgcgatcttcttcgagaggagatgtgatgccgattcgagcatcgacacagcaatctcccttgcttcagccaacaacatacct

SEQ ID NO: 87119 - DNA, 572 bp, Zea mays
  unsure (1)..(572): unsure at all n locations
  Clone ID: MRT4577_179457C.1
gccgatctcctctgtccgagtcactcactcgtaggtggcttccacccatctccctcagcagtcagtcagcaggactcagcagcactatctcccaccccccatccttcgctactctttcgttccttctgatcgccgctatcctcttcagccccgactgaggaggcggccggcgctccccaggcacgcacgagttgacgggtccagcagcggcctcgggatcttgccgccagctgcagcggcaatccggtccgtccgcccaggaaaccagtgctgtcttaggtattgttgattcatgattcttgattccgggaggcggtttcgtgttgtgacagcccgatcttgcggttcagcagagagccaatccgctgggtatcattttgttttgttttttctttgttgttaattaatatacagggagctgcgcctgcgcaattttcgcgcactggtggctagagagcctccaaatctcttctcctttccaggtggtgtgagtgtggagtgtatgtgttgtgtgtgtccggttgtttgtacccaataaaaaataatcaatacggttgaacatnnnanaaaaa

SEQ ID NO: 87120 - DNA, 132 bp, Zea mays
  Clone ID: MRT4577_179458C.1
gatatcatcatttgttgtcagctaacggatcattccttgtgccttctaaatatgattgaaattgtcaatagcaaaatgttgaatacctagctattgaaaatttgcattgtcaaggtttcacgcaacataaag

SEQ ID NO: 87121 - DNA, 3002 bp, Zea mays
  unsure (1)..(3002): unsure at all n locations
  Clone ID: MRT4577_179459C.1
attgggtacctcgagccggccgggaccaagtcatacgtccccagcctcctaaaatttcccctttccccaactaacacgacaccccccttcccttcctccgatccccccgcctcccccaaaatccgacgcgtaatcgccgccatggccgtcgccggcaagttcctcacgtgcctcctggtcgccgctatcctcttcagcccccactgaggaggcggcaccgcgctcccctggcacgcaccagttgaccagtcgagcagcctccgtccctccctaccgtaggtggcctccacagccccgcctgcctccgcagtcagtcagcaggacgcagcagcactatctcccaccccccatccttcgctagtctttcgttccttctgatcgccgctatcctcttcagccccgactgaggaggcggccggcgctccccaggcacgcacgagttgacgggtccagcagcggcctcgggatcttgccgccagctgcagcggcaatccggtccgtccgcccagtctccaggaaaccagtgctgtcttaggtattgttgattcatgattcttgattccgggaggcggtttcgtgttgtgacagcccgatcttgcggttcagcagagagccaatccgctgggcttccgtggatatacatatactggtctgagttgtcaagtccttgacctgatcatatcagttttgcttataaggatgggggtttacctcagtactccaaaaactgacaagctatctgaaaatggagaaaatgatagacttaagtttggtctttcatctatgcaaggatggcgagcaaccatggaagatgctcattcagcattgctagatcttgatagcgagacagcattctttggtgtttttgatggtcatggaggaagagtcgttgccaaattctgtgcaaaatatctgcatggtcaagtcctcaaaagcgaagcctattcaactggtgacctaggcactgctgtccatagagctttcttcagaatggatgaaatgatgcaaggacagagaggttggcgagaactatctgcacttggagacaaaataaacaagtttagtggtatgatagaaggattgatttggtctccaaggggcagtgattcaaataatcaacaagatgattgggcttcagaggagggacctcactctgactttgctgggccaacatgtgggagtacagcgtgtgtagcattaataagaaacacccaacttgttgtggcaaatgctggtgattcccgatgtgttatttcaaggggtgggaaggcatacaatttatcgagggaccacaaaccagagcttgcagctgagagagaaaggataatgaaagcagggggcttcatccatatgggacgagtaaatggaagtttaaacttgtcaagggcaattggagacgtggaattgaaacagaacaaattcctgcctcccgagaagcaaattgtgacggccaatcctgatatcaacgtcgtggagctctgcgatgatgacgactttgttgttgtagcatgtgatggcatttgggactgcatgtcaagccaacagctggtggattttatccacgagcgtataaacacggagagcagcctgtctgccgtgtgcgagagagtgctggacagatgcctggctccatcaacgatcgctggagacgggtgcgacaacatgaccatgatcctggtgcagttcaaaaaacctgtcgatcggaacaagaaggccgaagcagcagggcaatctgccagcaatgtggacgaagccaagagtcgtgttgctgaggagtgaagcatggctggcactcaccagggcgcaaccatttgctttcataaggcaggtgaaaaaaaggaacgaagaaacctgcagtgtacgtatctcaactgtacgtggcatgccatgcaaatcctgcctaagttaccccggacaatggcattgcctagtgcagtggtggatcttcagatcacaacctttcttgtgccagctttcggtcatctccactctccagccctcggaaccatggctgagtctgtctattctttgtgtggtgtgtagcattcctcgtgttttcgttgtccaaaatggtgtcaaatccagttttttgttgcgagaatgaaccgtgacgttagtgtgttttgctggcggttaggtgcaaaatactcgaaacctgaattgcccgctcgctatttcgggttgtaagtatatgatgaatctgattttagttgcatggtgtacccatcttatctgaaaataatgaaagatctgtttgtggttgactaaaaaaaaaaaaaaaaaaaaaaaaaaaaaaaaaaaaaaaaaaaaaaatgggggggggggccccccccccgggccccccttaaaaaaatttaaataaaaaagggggttcntanaccnnnnnnnngagaattctttgcgtgctgctgtaactgtaaggggaacaaacaangccctgatgacccaacctntaatggtaaggaacacaacaagctcgagccatgagatatcgcaaggtttgctggctggcaacgatggccttctgctgtttcttgccccggtttgacgcgtcggatttgtaattgcccctgattgccattgtatatatttatacacacacggggtgcttttaagatccgttataccggcaacacccactttctactcttatagaacttccctctagtccgcctttaccgagttcattgccaatattattacaccccgctttgcctgcccctgaatctctccccacagtcgcgcttagcgccccctcctgggcctgaccaccgagtaggaatgcccccccccctatgccccccccatgctaaaatccttgcgataactcccccgcccgtttttaccccccgtcgccattaggcccccaactcatttccccctctccccaactccactctccgcccattccgntccataattccccccgcctccttagcccccgccctcgataacatttctttttacccctcccccccatccctatattccccaaccgcaaa

SEQ ID NO: 87122 - DNA, 1938 bp, Zea mays
  Clone ID: MRT4577_17945C.1
atggctagtaacaacaatgtgcacattgggaagccaccgcattttgatgggaataactacgactattggaaaataagaatgtcaatgcatcttagagcaatgggtggaaaaatttggccaattgtcaaggatgggtttgttgtgttgaaagaagatgaaccatcggttagtgataatgaaaacattcttacaaatgatcaagccatgaatgtattctatgacgctcttgatataaatgagttcaactgtatcaagaatctcacaaccgctcatgagatttggattaagctaatggaaattcatgatggaactacaattgtgaagagtgccaagctatatgtgtgcaaaggaaaatttgagcaattcattatgaaagaagatgaaagtgtatccgatatgttcaaccggttaaatgagatagtgaatgaactcaagggacttggttttaatgtaccggatgtggatttcactcataagttccttagatctctttcggagaagtatgagaccattgtgaccatgttagtaagaagtgatctatctacaacttctccaaccgaagtattgggggaaattcttactcaacatatattcaagaaatctcaagccgatgctataagtttggcaaagaaagtgaagaatgaatcaatcgttctcaaagctaaagcttctaaggcaattgaaaaaaagatagtgatgatgaagaaaatgaaatgcggggaacccagtcacattgccatgaattgccctaacaagaagaagaagggcaaagatggagatgataagaagaagaaattctacaacaagaagaaagatggcaaagcctacctagttgaatgggattcggatgatagctcggatgatgatgatgatgacgcctcatccaagcttaatgccggaattgccatcaaggaagctccttcacttttctcatcccctcattgtatcatggcaaagggagatgctaaggtaaaaatcatcaccgatttaaatgatataaatgatgatgatgatgatgatgttgatgatgatgactattcatatgacgatcttgttagaatgttaggtgaggccgatgactacatgcacaaagaaaaagaaaaatttaagaccttgaaggaattgtataaaaacctccaagtgtcttttgaggagctcaagacctctcacaacaatctaaaagagaattgtgagaagcttgcggaagctcaaaactcatcttttgtgcatgaagttgttttggtcaccgaggatgttggagtcacttgtgacttacttgatagtcctacaagtggaccactacctactaactctatttgtgataaatgcaaaatttctcttatgaatgacgatatggctcttgatgaatcacaaaacattgttgagaatgaagtgttagtagatagagtaaatgctctaactcatgatctagagaaggcatatggtggaaaggctaaattggatttcatattgggaagtcaacagtgctcacttaaccgtgagggtcttggatatgttcccaagaaaggaaagaatgcttttataaagcaaaagacattgtttgtgaaagaatgtgacaaagtgtgtcacaagaagggacatattaagaaaaattgtcctaagcttaagaatgtatcctccacttgttttgagcattattatgttctttttcataatgcaaaaggtgttcatgtgaactacaaggcgggagggaatcattgggtgttggatagtggatgcactcaacacatgaccagagatatgaaaatgttcacccaaatgagtgaggaagattgctcaaattatgatagtatcacatttggagataatggcaaaggaaagaaaagtagaaataatatcaaattacaaatgtaccttcggcttgaaagaagacaaaagtacatgcgtgacgcaaaagcaaatgtcaagtcagcgtga

SEQ ID NO: 87123 - DNA, 1882 bp, Zea mays
  Clone ID: MRT4577_179460C.1
gtcactcactcgtaggtggcttccacccatctccctcagcagtcagtcagcaggactcagcagcactatctcccacccccatccttcgctactctttcgttccttctgatcgccgctatcctcttcagccccgactgaggaggcggccggcgctccccaggcacgcacgagttgacgggtccagcagcggcctcgggatcttgccgccagctgcagcggcaatccggtccgtccgcccaggcttccgtggatatacatatactggtctgagttgtcaagtccttgacctgatcatatcagttttgcttataaggatgggggtttacctcagtactccaaaaactgacaagctatctgaaaatggagaaaatgatagacttaagtttggtctttcatctatgcaaggatggcgagcaaccatggaagatgctcattcagcattgctagatcttgatagcgagacagcattctttggtgtttttgatggtcatggaggaagagtcgttgccaaattctgtgcaaaatatctgcatggtcaagtcctcaaaagcgaagcctattcaactggtgacctaggcgctgctgtccatagagctttcttcagaatggatgaaatgatgcaaggacagagaggttggcgagaactatctgcacttggagacaaaataaacaagtttagtggtatgatagaaggattgatttggtctccaaggggcagtgattcaaataatcaacaagatgattgggcttcagaggagggacctcactctgactttgctgggccaacatgtgggagtacagcgtgtgtagcactaataagaaacacccaacttgttgtggcaaatgctggtgattcccgatgtgttatttcaaggggtgggaaggcatacaatttatcgagggaccacaaaccagagcttgcagctgagagagaaaggataatgaaagcagggggcttcatccatatgggacgagtaaatggaagtctaaacttgtcaagggcaattggagatgtggaattgaaacagaacaaattcctgcctcccgagaagcaaattgtgacggccaatcctgatatcaacgtcgtggagctctgcgacgatgacgactttgttgttgtagcatgtgatggcatttgggactgcatgtcaagccaacagctggtggatttcatccacgagcgtataaacacggagagcagcctgtctgccgtgtgcgagagagtgctggacagatgcctggctccatcaacgatcgctggagacgggtgcgacaacatgaccatgatcatagtgcagatcaaaaaacctgtcgatcggaacaagaaggccgaagcagcagggcaatctgccagcaatgcggacgaagccaagagtcgtgttgctgaggagttaagcatggctggcactcacaagggcgcaaccatttgctttcataaggcaggtgaaaaaaaatgaacgaagaaacctgcagtgtacgtatctcaactgtacgtggcatgccatgcaaatcctgcctaagttaccccggacaatggcattgcctagtgcagtggtggatcttcagatcacaacctttcttgtgccagctttcggtcatctccactctccagccctcggaaccatggctgagtctgtctattctttgtgtggtgtgtagcattcctcgtgttttcgttgtccaaaatggtgtcaaatccagttttttgttgcgagaatgaaccgtgacgttagtgtgttttgctggcggttaggtgcaaaatactcgaaacctgaattgcccgctcgctatttcgggttgtaagtatatgatgaatctgattttagttgcatggtgtacccatcttatctgaaaataatgaaagatctgtttgtggttgact

SEQ ID NO: 87124 - DNA, 301 bp, Zea mays
  Clone ID: MRT4577_179461C.1
ccttattgaggtgtgtctgcaataaacccacggaccaccaaaaaaaattggcttacggatcactatccgcgaactaacaagagcaagaacatcgacaccggactcttgggcatcttcaaggatacaagcaagtgcctagtgaagactcttgataagctcggggacgtagccctgacggatgcgggcgtgaccgacctgcacgtaggggttccaattcttatggaggccgtggtggggcgccttaagcttgaacggacccaggaagaaggtcctctccttgaagaccgggacaacggtccca

SEQ ID NO: 87125 - DNA, 1153 bp, Zea mays
  Clone ID: MRT4577_179462C.1
gtgcggcgctcgacgcgcccgcggcgggcggcctctccagcaacgagacaacaaatctcctcctcttcctctccgtatccgcatcagtccatcaccttcaatggcggcggcggcggctgctgccacctccttcaccaccctcgccgtcgcgcgttcggcggggcagcggtcccttcttgcctccaaggccgcaccttcgccgctcctctccctccgtggcgcccgcatcccctcgcaggccgtctccttctccgggggccttgcggcgtcgccctctcacagccgcgcgcgcttcgctacatccgccagcgccgagcccaaggaagcagatcttcagtctaaaatcaccaataaggtgtattttgacataagcattgggaaccctgtggggaagaatgttgggaggattgtcatcggcttgtatggggatgatgttccacaaacagcagagaactttcgtgctctttgcactggagagaaagggtttggatacaagggatccagtttccaccgtgtcatcagcgactttatgatccagggcggagattttgacaagggcaatggtaccggtgggaaaagcatatatggacgcactttcaaagatgagaacttcaaattggttcacactgggacctggagtggtcagcatggctaatgctggaccgaacaccaacggcagccagtttttcatttgcattgtcaagacgccttggttggatggaaggcatgtcgtgtttggccaggtcgtggaagggatggatattgtaaggctgatcgagtcacaggagactgacagaggtgaccgtccgaagaagaaagtagtcatcagcgagtgcggggagcttccagtggtctaagcgttactcatctgttgtccgtttcacttctgacggatgacgatatccccccccccccccccccatcccatgtgctaattatagagaatatttcgaattcaagtaaggtcccaaatctgaggcatactgttgctgccctgctggaataaatgtgctactttcccctgccttgttaagggaaagggttttgttcacgatgttaccttgtaaccttgtacttatgtttcatacttggaatgaaggttcatggaacaaaaatattctgctgcaaaaaatgcaaacccccttcgtcccta

SEQ ID NO: 87126 - DNA, 1144 bp, Zea mays
  Clone ID: MRT4577_179463C.1
tcgccagccaggccggggccttctccatcctaaaccctcctagtcctctccatccccatcccctccaatggcggcgactgccacgtccttcgccactctcgccgtcgcgcgctcggcggggcagcggtccctccttgcctccaaggccgccccctcgccgctcctctccctccgcggcgcccgcctcccctcgcagggcgtctccttatctgggggcctcgcggcgtcgccctctcatagccgcgcgcgcttcgccacatcagccagcgccgagcccaaggaagcagaccttcagtctaaaatcacaaacaaggtgtactttgacataagcattgggaaccctgtgggcaagaatgttgggaggatcgtcatcggcttgtacggggatgatgttccacagacaacagagaacttccgtgctctttgcactggagagaaagggtttggatacaagggatccagtttccatcgtgtcatcagcgactttatgattcagggcggagattttgacaagggcaatggtaccggtgggaagagcatatatggacgcaccttcaaagatgagaacttcaaattggttcacactggacctggagtggtcagcatggctaatgctgggccgaacaccaatggcagccagttttttatttgcactgtcaagacaccttggttggacggaaggcatgtcgtgtttggccaggtcctggaagggatggatgtcgtaagtctgatcgagtcgcaggagaccgacagaggtgaccgcccgaagaagaaagtagtcatcagcgagtgtggggagcttccagtggtctaagtgttactcatctgttgtcggtcttacctaacctcggatggatggcgatatttcccccacctgaacttgtcgtgctaccctccccccccccccccccccacccccaccctgctagttatagagaatatttcgaattgaagtaaggtcccaaatctgagggcatactgttgcttctctgctggaataaatgtgctccttgttcatggaacaaaaatattctgttgcattgcatatgcaagagctgttgatcgttcacttaacttactatgtcttatgtgtgcttcttattactatttaaaatttatatgggggcggcccttttaaaggttc

SEQ ID NO: 87127 - DNA, 122 bp, Zea mays
  Clone ID: MRT4577_179464C.1
ggctcctcaggtcggtggtatttccatacctttacctaatacatattgtatggtccgaagcctgagttgcttagctttggtcagagcctgtgtaatattgatcgaattttctgctttctaac

SEQ ID NO: 87128 - DNA, 346 bp, Zea mays
  Clone ID: MRT4577_179466C.1
gcgagagcagaaaccctatcgactatgggagtcgatggaagatggccatcttagacactactttgtgcaaagcagagagccttgtggacacaatcctactagagatagcacgcctaagctaaagcttaagtggcgatgatttagttctctacctaatcagtcacaataaatattcgcaattaccttgcagcaatgccaacactttgcgaccttcccagcagcagcagaccagatagtttgcgatcgtatggtattaatgcaaacaatgacgacctgagctacaagtttaatatattctgttctccacatgagaacgttattaaccttaaggataaatttaagataa

SEQ ID NO: 87129 - DNA, 139 bp, Zea mays
  Clone ID: MRT4577_179467C.1
ttttgtccttttcacttgacttggcttgggccaatcattctttaaaccttcttggcgcctttggcctttttttttcctttccaagaaaaacctttcttcttcttttgccaggggccttttggttctcctttccgggctt

SEQ ID NO: 87130 - DNA, 291 bp, Zea mays
  Clone ID: MRT4577_179468C.1
ggaccaacatagtatagatactatataaacattggcttacaggtccactggcaggaaaagcataggacccaccatgggtttcctggataatcaccacaagcacaagcgggggacctggcttaacaaaaaattaaaaggaaaacgaaggtggaaaacactccattcacgggacaaaagggagccggttagcacatggaaatggaatgcacatagtttttttaagaaagggccaggggccataaccagttggtaaagggtccaaatttcgccggcggggccgccaccaccacc

SEQ ID NO: 87131 - DNA, 294 bp, Zea mays
  Clone ID: MRT4577_179469C.1
ggcgcacggggcgaagatggcggcggacgacaggaggcgctgagggagttcgtgtcggtgacgggcgccgaggaagaccgggcccgcttcattctcgagtcggccggctgggacttgcagatcgcgctacaagcttttatggaggacggaggggatgaagacattgtgaccatttcgcaggcaacgcccagttcagtgtccagaggcacagcccccagtgataatagagtgacatccgtcagagacctcattcatgaccaagatgaagatgaggaggaagaggaaggccagagg

SEQ ID NO: 87132 - DNA, 6385 bp, Zea mays
  Clone ID: MRT4577_17946C.1
atggctagtaacaacaatgtgcacattgggaagccaccgcactttgatggaaacaattatgattattggaaaataagaatgtcaatgcatcttagagcaatgggtggaaaaatttggccaattgttagagatggattcgttgtattgaaggaagatgaaccatccgttagtgataatgagaatatcctcacaaatgatcaagccatgaatgtcttttatgatgctcttgatataaatgagttcaatcgtatcaagaatctcacaaccgctcatgagatttgggtaaaactaatggaaattcatgaaggaactacaattgtgaagagtgccaaactatatgtgtgcaaagggaagtttgagcaatttattatgaaagaagatgagagtgtatccgatatgttcaatcgattgaatgagattgtaaatgaactcaaaggacttggttttaatgtaccagatgtggatttcacacacaagttccttagatcacttccggagaaatatgagactattgtgacaatgctagtaaggagtgatctatctacaacctctccaaccgaagtattgggagaaattctcactcaagatatatttaagaagtcacaagccgatgctttaagtttggcaaagaaggtgaaaaatgaatctattgctctcaaagccaaggcctcaaaggcaattgaaaaggaagatagcaatgatgaagaaaatgaaagcgagagtgatggtgacatggctttatttgtaaggaaattcaataaattcatgaagatgaaaagaggtcaacctagaagaggtcaaacatctagaagaaatgctttcaatgatagaaaatgttttgagtgtggggaacccggtcacattgccatgaattgtccaagcaagaagaagaagggcaaagatgaaagtgacaagaagaaaaagaaatactataacaagaagaaagatggcaaagcctacttagttgaatgggactcggatgatagctcggatgatgatgatgatgacacctcatccaagcttaatgccggaattgccatcaaggaagctccctcactcttctcgtccccccattgtctcatggcaaagggagatgctaaggccttgaaggaattgtataaaaacctccaagtgtcttttgaggagctcaagacctctcacaatgacctcaaagaaaattgtgagaagcttgcggatgctcaaaaatcatctattgtgcatgaagttgaggtggtcactaaggatgttggagtcacttgtgacttacttgatagtcttacaagtgaaccactacctactaactctatttgtgataaatgcaaaatttctctcaatgataatattgctcttgatgaatcaaaaattattgttgagaatgaagtgttagtggatagaataagtactctaactcatgacctagaaaaggcatatggtggtaagaagaatttggatttcatattgggaagtcaacgatgctctcttaaccgtgaaggtcttggatatgttcccaagaaaggaaagaatgcttttgtaaagcaaaagacattgtttgtgaaagaatgtgacaaagtaaactacaaggcgggagggaatcattgggtgttggatagtggatgtactcaacacatgaccggggatatgaagatgtttacccaaatgagtgatgaagattgctcaaattatgatagtatcacatttggagataatcgtaaaggaaaggttaaaggtttgggtaaaattgctatttcaaatgatcattctatatcaaatgtgctattggttgagtctttgaattttaatttactttccgtagctcaattatgtgatttaggattttgttgcaatttcacggttgaagatgttattatctctagtgttgatggtagcaatcttaaatttaaaggttttagacatgaaaatctttatcttgttgatttctcatctaatgaggcaaagctcacaacttgcttattttcaaaagcttcactaggttggttatggcatagaagacttggtcatgttgggatgaagcaactcaatcggttaaccaagcatgacttagttcgaggcttaaaagatgtgaagtttgaaaagaacaaattgtgtagctcttgtcaagccggtaagcaagtggcaaatactcatccaaataaaagtcaaatgtccactcatcgacctttggaattacttcacatggatttatttgggcccacatcttttgtaagtattggtggtaattcttattgtcttgtgattgtggatgactattcaagatttacttgggtttattttctacgagacaaatccaatgtgtttgaaacattcaagtcatttgctatattggctcaaaatcaatttgatttcgacatcaaaaaggttagaagtgataatgggtcggaattcaaaaatgcaagaattgatcaatattgtgatgacaagggtatcaagcatgaattctcttccaaatataccccagaaacaaaacggtattgttgaaagaaagaatagaactcttattgatatggcaaggtctatgttagcggaatataatatatcggattcttattgggccgaggcaataaataccgcttgtcattcatcaaatagactatattgtcacaagctcttgaagaaaactccatatgaattgctcattggtagaaagccaaatatctcatattttagggtattcggttgcaaatgttatattttaagaaagggaagccgactttctaaatttgagaagaaatgtgatgagggttttcttcttggatattcatcaaatagtaaggcttatagagtcttcaacaaaactcatggtattattgaggaagcatatgatgttgaattcgatgaaacaaatgggtctcaagatgagagtgaaaatctcgatgatgttgggggaactcaattgataaatgcaatgaaaacaatggccattggtgaaataaaaccaaaagaagatgatgatgaaaatagtgtggttgtcattccctcatcttcaactataaatgaggaagatcaccaaagccaacaactcaatgaaaccattgatactcatgatcaaggtacttcaagacctccaattcctcctaatgcttcaacaagcaattatcaaacggtatcaagaattcatcattccattgtgaaggatcacccggttgatcaaattgtgggtgatattagtaagggtgttcaaactcgctctcgcatagcttcgttttgtgaacatttctcttttgtatcttgtgtggaacctaaccgtgtagatgaagctctacttgatgttgattgggtgaatgcaatgcatgaagaattaaataacttcgctcgaaatgaagtttgggagcttgttgagagaccaaagaaccacaatgttattggtacaaaatgggtatttcgcaacaagcacaatgaagatggtgtggtagtaagaaacaaggcaagattagttgcacaaggatatactcaaattgaaggattggattttggggagacatttgctcccgtagcaagattagaagcaatccggattctacttgcttatgcttgtgcacacaatatcaagctctaccaaatggatgtaaagagcgccttcctaaatggtaagattagtgaactagtgtatgttgaacaacctcccggttttgaggaccccaaaagacctaaccatgtgttcaagctttctaaagctctctatgggcttaagcaagctcctcgcgcttggtatgaaaggcttagggatttcttgttttccaaagacttcaaaattgggaaggttgacactactctattcactaaaagaattggcaaagatttatttgtttgtcaaatctatgttgatgatattatttttggatctactaatgaattattttgtgaggagttcggaaaaatgatgtcaaaagaatttgaaatgtctatgataggagaattgagcttctttcttggccttcaaatcaaacaattgaaagatggaatttttataagtcaatcaaaatatttgaaggacatgctcaagaagtttggtttagaaaatgctaagcctatcaagactccaatggcaacaaatggtcatctagacttagatgaaggaggtactatggttgatcaaaaactttatcgttcaataattggtagtttgctttatattaccgcatctaggcccgatgttatgtttagtgtatgcatgtgtgctcgatttcaagcttctcctagagagattcacttgaaggccgctaaaagaattctaagatatttgaagtatactcccaatattggtctatggtatcccaaaggtgctcaatttgaattaattggatattcggattcggactatgcgggatgcaaagttgatagaaaaagcacctccgggtgttgtcaatttcttggtagatctattgtttcatggtcttctaagaaacaaaattcggttgctctatctaccgccgaggcggaatatatatcggccggaaattgttgcgctcaactattatggatgaaacaaaccttattggactatggaattattttcaagaatgtgcctcttatgtgtgataatgagagtgcgaaagtggacagaagttggaaaaatgagtgtcaggccgcggaccgtccgcccatggaccgcggaccgtccgcggaatcaggaaatggacagtccgagcagcctcgcagaccgtctgagatcctcagggcgcggaccgtccgccgccccagcgcggaccgtccgcgacagggcagaaaaagggacaaagacgcagacttgccagttgtgctccctcgctctatctctcttgctctccactcgccatatactctcttgtgtcgagttggttttggtggtctccgcaagaaacttgcaggtcgctttaaatccaagcgccctcgtggcaatgatgatgactatacaccgaccactgattcagaggcccaatcctcagctgggggcactgaatccatggatgctgaagattttcttcatgttcaccctgattatcccattgatatccaaggatggacttaccccaagcggagattttctatggctgagtactgctctagacggactgtgaaccagtatgctctgccatcagatacaaatattcagtttttccacactcagctgcagtttgatgtcttttggggcaccctggtggataccaattttcataagcatcaggtgattgattggtccttcttgctcagtcaatcagtcatggagggtctcattcccaaatttgaaacatgtgggttatatcagtttatggggcagcgcactgatttcaatgaaatggcagttaagcaattcttggctacctcagagattgatattgcagaagaatctatcacatggatgactggctttaagcggtattctgcttcttttgctgactttgccgctgccaacagtctgaactatggcaccatttctgctggggtggatctttatactgaagataattttgaggattttgtgcagttttatgagcccgccaggctcggtatacccaggaggtttggagaaacagcaggactcagacatcatcctgctgtcatcaacaagattgccagagtcaccattcttcccaagagtggtgataagagcaaaattcgcgataagttctggaacataatccagcacatcatgaatggtgaagtcatgaacattgttcttttcatgatgaggcagcttaatgatttaaagatggacaagaatcaaaacttggcttatgctccctacattatggctctcataaaatccaagacaagatttgagggcccatgtgagattgttcacactccattcaggccttttaagaatgagatagggttcctcaccaggccactcactccattcccagatgatgaggaagaccctggctatgcgggtggagcagctcctaatgttgaggaacagcagatgcctcctcctccacctcctcctcagcctcagcactattgggagcctgctccaggatattttgatccttattttcacaatatgcagcaagggctggagactcatattgatgctcgctttgatggcctgatgtcacatgtggatcaccgccttgatgacatgcagtctcgctttgacagcaactgggatgcgctcaactctgaattttctgactttcgtgatcaaattcacactaatgtcactgatcccatcatgtcaaggctcaataatatgcaacaaagctttcaagataacatgagtgctctctccagtcagtttgacaatctttctacaactgacaacatgcatgatataagtcagaggcagcagcagctccagcaggactttggccagttctcctccctgtttgacaccttcagcactcattattacaacatgcatcctccgccgagtgatcagtaa

SEQ ID NO: 87133 - DNA, 284 bp, Zea mays
  Clone ID: MRT4577_179470C.1
ataacatactgttcttagtttcaccagcaaaggagcgtccgctgcttgtttagcttctctctcagatggtttgctagacgaccagtatagcgtcagctggaacttcgtcggcgagttcttgccccctgcaaactggattgtatgccacccatctatctcgctcttatcaccaggtaggactatcttctccgaatccactgaaaaagagcgcatgaagaaaagaaaaaatgtcagacgatgcggataggctacccagctaccgccatatgttactttcacgcttg

SEQ ID NO: 87134 - DNA, 319 bp, Zea mays
  Clone ID: MRT4577_179471C.1
ggtgacggtatacgaaataattggcggatctataaacatgccttctgttaacttgcataacaacattaccacatggattgagaccacatacatatgaccaacatgtcgatttacgtcaacccactgttactgaggttattggcgttcatgatctaccgcgacacaactggctgacctacgactactacacacgatattaacagacttgagcaacgccctgctaacattcactaacgatcccatcaagctcattatataacatctcctactgcgccatgcatgcattcgttgcaccataacgcgcacatgacgcctgact

SEQ ID NO: 87135 - DNA, 429 bp, Zea mays
  unsure (1)..(429): unsure at all n locations
  Clone ID: MRT4577_179472C.1
cccacgcgtccggtgagaacggtggggagtaagtccgagagaggccattctgaagactcacttatgtgtggcgaaggtctaggtctattcacagagttatccgatcgagagcttagtctttacacaagcatccttgcgaggcacttcaatgacgactagggaaagcttccgcgcttcttgatacctcattaaaaaaaatattggagtcgttgatcttgtcttgcgtctctatcttaatcatgcttccacgctttacttattatttaactagtttgtgtgtttatttttctagtttagatcgctaggctaagtgatatgattgatacataggttgtgtaaccactcctttgcggttgcggtagggatatgaacacacatataggtaagcctagtggttagtgatatntgcatacctcgaagtcttgagtg

SEQ ID NO: 87136 - DNA, 925 bp, Zea mays
  Clone ID: MRT4577_179473C.1
gggtacctcgaggccggccggcgacagatccaggtactcttcctttcgccgcggctgagaagcaactctccctctctgtcctcttcctgtcgccgcactcattttctcttgccgggtggaatagggaacggccatacaccatggcggatttctccaaggaatcttgcccttctgtgaagaacattttacttctggattctgaaggaaagcgtgttgctgtaaagtatttctcagatgattggccgactaatgcatcaaagttagcctacgaaaagtctgtttttactaaaactctaaagacaaatgcacggacagaagctgagataacattgtttgatggttatattgtcgtttacaagtttgtacatgaccttcacttttttgtcaccgctggagatgatgagaatgagctcatcttagcaagtgtactacatggtttttctgattctgttggtcttctactcaggggtgatgttgagaagcggactgcgcttgagaacttggatttgatacttctctgcattgatgaaattgtagatgggggaatcatcctggaaacagatgcaaacaccattgctggtaaggttgcaaccaatgctgttgatggttctgtgcccttttctgagcagacgatatctcaggcactagccacagctagggagcaccttgcaagatctctactgaaatgaacaaccagcaatatgtatgacatatatgtgtgttaaaggttgggctactgaatgttaagggtctttgtagtcgttattcatcccaaagtgctgctgtgacagagcctagttgaatatccgagggattggtcacatgctcgttattttttttgaaccagtgagtttgtagctgccatatttcaggtaaaacataaaataaagagttgtaattgggtgtaatataattttcaccatac

SEQ ID NO: 87137 - DNA, 220 bp, Zea mays
  unsure (1)..(220): unsure at all n locations
  Clone ID: MRT4577_179474C.1
acctcatacttctccagcagctgttttacggcccaaccaaaacacaaggagggganacaacatttggggaggatccaccacaccaccnncccctcacccaaaaacaaacgccaaaaccacacacatgccaagcccccactagacaaacgcaaagccacatacatccaacggtcaaatcccacaaccaaccgtcacagacaaagacggaccctcacagccc

SEQ ID NO: 87138 - DNA, 516 bp, Zea mays
  Clone ID: MRT4577_179475C.1
gctcgaaccactcgtccgagctcgccttcgtccccgatccagatccagggtggaatagggaacggccatacaccatggcggatttctccaagctgagataacattgtttgatggttatattgtcgtttacaagtttgtacatgaccttcacttttttgtcaccgctggagatgatgagaatgagctcatcttagcaagtgtactacatggtttttctgattctgttggtcttctactcaagggtgatgttgagaagcggactgcgcttgagaacttggatttgatacttctctgcattgatgaaattgtagatgggggaatcatcctggaaacagatgcaaacaccattgctggtaaggttgcaaccaatgctgttgatggttctgtgcccttttctgagcagacgatatctcaagcactagccacagctagggagcaccttgcaagatctttactgaaatgaacaaccagcaatatgtatgacatatatgtgtgttaaaggttgggctactgaat

SEQ ID NO: 87139 - DNA, 269 bp, Zea mays
  Clone ID: MRT4577_179476C.1
acggggttatttttttcttttaatagccggtccaaacatctaaccaggaataaaaaaaccaccttgtccttaataacaacccggaaagaaagattcatggggcaaaaaaaaccgggacaaagatataaccgggggagggggggcccaaacaagatgcccaaatttaagaaccagggggggaaaccccccaaccaggggtttgaaaaaggtggccccaaacctaccggtgaaaaacaagtttccgcaaaacgttgggccccccccttggt

SEQ ID NO: 87140 - DNA, 1375 bp, Zea mays
  Clone ID: MRT4577_179477C.1
ctcggctctcgcatcgatgaagaacgtagcaaaatgcgatacctggtgtgaatagcagaatcccgcgaaccatcgagtttttgaacgcaagttgcgcccgaagccttctggcggagggcacgtctgcctgggcagtgctacttgttttgtagtaccagaacagaaggggccaccgtcatgtttggagtactccaccttccacaatacctacaccaatgcggcaccaccatgaacactgctgcgtcttgctcgcatgatgtgggcttatcactgagtgttacctgctatatatgatatgataaatacttgccccatcactgctgcgcccgcgatggggccccggccgggcgacccacccgactctgttccaacgagccttccctcccaaacttgcacgctgcccccgcgctcgcctccgcccccgatccagatccagggtggaatagggaacggccatacaccatggcggatttctccaaggaatcttgcccttctgtgaagaacattttacttctggattctgaaggaaagcgtgttgctgtaaagtatttctcagatgattggccgactaatgcatcaaagttagcctacgaaaagtctgtttttactaaaactctaaagacaaatgcacggacagaagctgagataacattgtttgatggttatattgtcgtttacaagtttgtacatgaccttcacttttttgtcaccgctggagatgatgagaatgagctcatcttagcaagtgtactacatggtttttctgattctgttggtcttctactcaggggtgatgttgagaagcggactgcgcttgagaacttggatttgatacttctctgcattgatgaaattgtagatgggggaatcatcctggaaacagatgcaaacaccattgctggtaaggttgcaaccaatgctgttgatggttctgtgcccttttctgagcagacgatatctcaggcactagccacagctagggagcaccttgcaagatctttactgaaatgaacaaccagcaatatgtatgacatatatgtgtgttaaaggttgggctactgaatgttaagggtctttgtagtcgttattcatcccaaagtgctgctgtgacagagcctagttgaatatccgagggattggtcacatgctcgttatttttttttgaaccagtgagtttgtagctgccatatttcaggtaaaacataaaataaagagttgtaattgggtgtaatataattttcaccatacaaaaaaaaatcatctcaactatcaaaccatggtaaaaggttcaaaattatctatcaaatgattatccctccaggtcggaggaaaaatggatcctctgtcattgaaaaggtgcaataagaaaaagggg

SEQ ID NO: 87141 - DNA, 1328 bp, Zea mays
  unsure (1)..(1328): unsure at all n locations
  Clone ID: MRT4577_179478C.1
gcacgaggttccaacgagccttccctcccaaacttgcacgctgcccccgcgctcgcctccgcccccgatccagatccaggtactcttcctttcgccgcggctgagaagcaactctccctctctgtcctcttcctgtcgccgcactcattttctcttgccggtaaggagtggagatccgcgtccatcttctattgattaggataccgggtggaatagggaacggccatacaccatggcggatttctccaaggaatcttgcccttctgtgaagaacattttacttctggattctgaaggaaagcgtgttgctgtaaagtatttctcagatgattggccgactaatgcatcaaagttagcctacgaaaagtctgtttttactaaaactctaaagacaaatgcacggacagaagctgagataacattgtttgatggttatattgtcgtttacaagtttgtacatgaccttcacttttttgtcaccgctggagatgatgagaatgagctcatcttagcaagtgtactacatggtttttctgattctgttggtcttctactcaggggtgatgttgagaagcggactgcgcttgagaacttggatttgatacttctctgcattgatgaaattgtagatgggggaatcatcctggaaacagatgcaaacaccattgctggtaaggttgcaaccaatgctgttgatggttctgtgcccttttctgagcagacgatatctcaggcactagccacagctagggagcaccttgcaagatctctactgaaatgaacaaccagcaatatgtatgacatatatgtgtgttaaaggttgggctactgaatgttaagggtctttgtagtcgttattcatcccaaagtgctgctgtgacagagcctagttgaatatccgagggattggtcacatgctcgttatttttttttgaaccagtgagtttgtagctgccatatttcaggtaaaacataaaataaagagttgtaattgggtgtaaaaaaaaaaaaaaaaaaaaaaaactcttccccccactacccaaacccaacaggcggcgcagcagcatcgccaccaccgtccaaagatggtgaagttcctcaagcccggcaaggccgttatcctcctccagggccggttcgccggccggaaggccgtgatcgtgcgcgttttcgaggagggcacccgtgatcgtccctacgggcacggncctcgtcgcgggcctcgcaagtacccccagaaggtgatccgcaaggactcccgccagaagacggncaagaaagtccgcgtcaagtgcttcatcaagctcgtcaacttcacgcacctcatg

SEQ ID NO: 87142 - DNA, 191 bp, Zea mays
  Clone ID: MRT4577_179479C.1
caaagttctttcacatattatatgatcttcttgatgaaaaaaagtagatgctttattctgatatattcagtttcccactttaggcaaaagtggattaatagaatgatgaattcaaaggagatgaggaagatcaggcacagagaagtaaaggtagatacagacccaaattcacacaagataatgacatcacc

SEQ ID NO: 87143 - DNA, 5280 bp, Zea mays
  Clone ID: MRT4577_17947C.1
atggctagtaacaacaatgtgcacattgggaagccaccgcactttgatggaaacaattatgattattggaaaataagaatgtcaatgcatcttagagcaatgggtggaaaaatttggccaattgttagagatggattcgttgtattgaaggaagatgaaccatccgttagtgataatgagaatatcctcacaaatgatcaagccatgaatgtcttttatgatgctcttgatataaatgagttcaatcgtatcaagaatctcacaaccgctcatgagatttgggtaaaactaatggaaattcatgaaggaactacaattgtgaagagtgccaaactatatgtgtgcaaagggaagtttgagcaatttattatgaaagaagatgagagtgtatccgatatgttcaatcgattgaatgagattgtaaatgaactcaaaggacttggttttaatgtaccggatgtggatttcacacacaagttccttagatcacttccggagaaatatgagactattgtgacaatgctagtaaggagtgatctatctacaacctctccaaccgaagtattgggagaaattctcactcaagatatatttaagaagtcacaagccgatgctttaagtttggcaaagaaggtgaaaaatgaatctattgctctcaaagccaaggcctcaaaggcaattgaaaaggaagatagcaatgatgaagaaaatggaagtgagagtgatggtgacatggctttatttgtaaggaaattcaataaattcatgaagatgaaaaggggtcaacctagaagaggtcaaacatctagaagaaatgccttcaatgatagaaaatgttttgagtgtggggaacccggtcacattgccatgaattgtccaagcaagaagaagaagggcaaagatgaaagtgacaagaagaaaaagaaatactataacaagaagaaagatggcaaagcctacttagttgaatgggactcggatgatagctcggatgatgatgatgatgacacctcatccaagcttaatgccggaattgccatcaaggaagctccctcactcttctcatctccccattgtctcatggcaaagggagatgctaaggtaaaaatcatcaccgatttaaatgatgtaaatgatgatgatgatatcgatgatgttgatgatgatggctattcatatgatgatcttgttagaatgttaggtgaggccgatgactacatgcacaaagaaaaagaaaaatttaaggccttgaaggaattgtataaaaacctccaagtgtcttttgaggagctcaagacctctcacaatgacctcaaagaaaattgtgagaagcttgggaatgctcaaaaatcatctattgtgcatgaagttgaggtggtcactaaggatgttggagtcacttgtgacttacttgatagtcttacaagtgaaccactacctactaactctatttgtgataaatgcaaaatctctctcaatgataatattgctcttgatgaatcaaaaattattgttgagaatgaagtgttagtggatagaataagtactctaactcatgacctagaaaaggcatatggtggtcttggatatgttcccaagaaaggaaagaatgcttttgtaaagcaaaagacattgtttgtgaaagaatgtgacaaagtaaactacaaggcgggagggaatcattgggtgttggatagtggatgtactcaacacatgaccggggatatgaagatgtttacccaaatgagtgatgaagattgctcaaattatgatagtatcacatttggagataatcgtaaaggaaaggttaaaggtttgggtaaaattgctatttcaaatgatcattctatatcaaatgtgctattggttgagtctttaaattttaatttactttccgtagctcaattatgtgatttaggattttgttgcaattttacggttgaagatgttattatctctagtgttgatggtagcaatcttaaatttaaaggttttagacatgaaaatctttatcttgttgatttctcatctaatgaggcaaagctcacaacttgcttattttcaaaagcttcactaggttggttatggcatagaagacttggtcatgttgggatgaagcaactcaatcggttaaccaagcatgacttagttcgaggtttaaaagatgtgaagtttgaaaagaacaaattgtgtagctcttgtcaagccggtaagcaagtggcaaatactcatccaaataaaagtcaaatgtccactcatcgacctttggaattacttcacatggatttatttgggcccacatcttttgtaagtattggtggtaattcttattgtcttgtgattgtggatgactattcaagatttacttgggtttattttctacgagacaaatccaatgtgtttgaaacattcaagtcatttgctatattggctcaaaatcaatttgatttcgacatcaaaaaggttagaagtgacaatgggtcggaattcaaaaacgcaagaattgatcaatattgtgatgacaagggtatcaaacatgaattctcttccaaatataccccggaacaaaacggtattgttgaaagaaagaatagaactcttatcgatatggcaaggtctatgttagcggaatataatatatcggattcttattgggccgaggcaataaataccgcttgtcattcatcaaatagactatattgtcacaagctcttgaagaaaactccatatgaattgctcattggtagaaagccaaatatctcatattttagggtattcggttgcaaatgttatattttaagaaagggaagccggctttctaaatttgagaagaaatgtgatgagggttttcttcttggatattcatcaaatagtaaggcttatagagtcttcaacaaaactcatggtattattgaggaagcatatgatgttgaattcgatgaaacaaatgggtctcaagatgagagtgaaaatctcgatgatgttgggggaactcaattgataaatgcaatgaaaacaatggccattggtgaaataaaaccaaaagaagatgatgatgaaaatagtgtggttgtcattccctcatcttcaactataaatgaggaagatcaccaaagccaacaactcaatgaaaccattgatactcatgatcaaggtacttcaagacctccaattcctcctaatgcttcaacaagcaattatcaaacggtatcaagaattcatcattccattgtgaaggatcacccggttgatcaaattgtgggtgatattagtaagggtgttcaaactcgctctcgcatagcttcgttttgtgaacatttctcttttgtatcttgtgtggagcctaaccgtgtagatgaagctctacttgatgttgattgggtgaatgcaatgcatgaagaattaaataacttcgctcgaaatgaagtttgggagcttgttgagagaccaaagaaccacaatgttattggtacaaaatgggtatttcgcaacaagcacaatgaagatggtgtggtagtaagaaacaaggcaagattagttgcacaaggatatactcaaattgaaggattggattttggggagacatttgctcccgtagcaagattagaagcaatccggattctacttgcttatgcttgtgcacacaatatcaagctctaccaaatggatgtaaagagcgccttcctaaatggtaagattagtgaactagtgtatgttgaacaacctcccggttttgaggaccccaaaagacctaaccatgtgttcaagctttctaaagctctctatgggcttaagcaagctcctcgcgcttggtatgaaaggcttagggatttcttgctttccaaagacttcaaaattgggaaggttgacactactctattcactaaaagaattggcaaagatttatttgtctgtcaaatctatgttgatgatattatttttggatctactaatgaattattttgtgaggagttcggaaaaatgatgtcaaaagaatttgagatgtctatgataggagaattgagcttctttcttggccttcaaatcaaacaattgaaagatggaatttttataagtcaatcaaaatatttgaaggacatgctcaagaagtttggtttagaaaatgctaagcctatcaagactccaatggcaacaaatggtcatctagacttagatgaaggaggtactatagttgatcaaaaactttatcgttcaataattggtagtttgctttatattaccgcatctaggcccgatgttatgtttagtgtatgcatgtgtgctcgatttcaagcttctcctagagagattcacttgaaggccgctaaaagaattctaagatatttgaagtatactcccaatattggtctatggtatcccaaaggtgctcaatttgaattaattggatattcggattcggactatgcggggtgcaaagttgatagaaaaagcacctccggttgttgtcaatttcttggtagatctcttgtttcatggtcttctaagaaacaaaattcggttgctctatctaccgccgaggcggaatatatatcggccggaaattgttgtgctcaactattatggatgaaacaaaccttattggactatggaattattttcaagaacgtgcctctcatgtgtgataatgagagtgcggtaaaattggctaccaatccggtccaacactcaagaaccaagcatattgatatacggcatcacttcttaagagatcatgttggcaagggagatatctctatttattccattggcaccgatgatcaattagcggacatttttacaaaaccattggatgaaacaagattttgttctctaagaagtgaaatgaatgtgattgatatctctaataaagtgggcagagattggcaaaatgagtatcaggccgcggaccgtccgcccatggaccgcggaccgtccgcagcatcaggcaatggacagtccgagcagcctcgcagactgtctgagtctcgctttgacagcaactgggatgcgctgaactctgaattttctgactttcgtgatcaaattcacactaatgtcactgatcccatcatgtcaaggctgaataatatgcaacaaagttttcaagataacatgggtgctctctccagtcagtttgacaatctttctacaactgacaacctgcatgatataagtcagaggcagcagcagctccagcaggactttggccagttctcctccttgtttgacaccttcagcactcattattacaacatgcatcccccgccaagtgatcagtaa

SEQ ID NO: 87144 - DNA, 360 bp, Zea mays
  Clone ID: MRT4577_179480C.1
ctgtccccgtccactccgccgccgccgccgcgaattccgccggcgtccgcccccgcgcgcgtgctctgcgcccacgcggactccagcgcctccggatcggagcccctgaacatggcggccgccgcgctcagggttcagctcgaggcgctcctcgagaacatgttcgccacgggtatggtggacgagcagttccggcagctgcagtcgctgcaggaggggggcagcgcgtcgggcttcgtcgccgaggtcgccaccctcttcatcgacgacgccgaccggatcatcgccgacatcgggagcctgctggaccagcccgtggtggatttcgacaaggtggacgcccacgtgcaccagctcaag

SEQ ID NO: 87145 - DNA, 2099 bp, Zea mays
  Clone ID: MRT4577_179481C.1
gggggctcggtaagacgctccaagcatctgctattgtagcaagtgacattgcagaagcacgtgcacggaatgatgaaaaaattctgacatctttgattatctgcccttctacattagtggcccactgggaatatgaaatagagaagtacatagacagctctatcttgaaacctcttcagtacgttggttcttctcaggacagagtgacactccgtagtcagtttgataaggttaatgttatcataacatcatatgatattatacggaaggatattgattttcttggaaatatcacttggaactattgtgttctggatgaagggcatataataaaaaactcaaggtctaaaataacgtttgctgtgaaacagctgaaagcgcaacaccgtcttatcttgagtggcacacctattcagaataatgtgttggagttatggtctttatttgacttccttatgcctgggtttcttggaacagaaaaacaattccaagctgcatatggaaaacccttgctagctgccaaagattctaaatgttcagcaaaggatgctgaagctggtattcttgcaatggaggcactgcataagcaggtcatgccgtttctactgagaagaacaaaggatgaagttttatctgatcttccagagaagataatccaggatagatattgtgatctcagtctattgcagctcaaactttatgacaaattttccagctccaatgcaaaagacgagatttcaactatagtaaaagcaaatgaactggaggaatctgcacctcaaccaaaggcaactcggcatgtgtttcaggcattgcagtacctattaaaactatgcagccatcccttgcttgtaactggggagaaccccccaaatcatcttgtggatcttctgaatgaaataggtctgggatctggcagtgagcttcatgagcttcaccactcacctaagcttgttgctcttcaagaaatacttcaagaatgtggtatagggtcagaaatatctagtcctgatgcttctacagctgttgggcaacacagagttttgatttttgctcagcataaggcttttcttgacatcatagagaaggacctgtttcaatctcatatgagaagtgtcacatatttgcggctggatggctctgttgatccagagaagagatttgaaatcgttaaagcattcaattcagacccaaccattgatgtacttctgctaacaacccatgtcggtgggcttggcttgaacttgacatctgccgacacattggtgttcgtggaacatgattggaacccaatgaaggaccttcaggctatggacagagcacatcgattgggtcaaaggaaagtggtgaatgttcaccgtctcatcatgcgtggcacccttgaggagaaggtgatgtctctccagaggttcaaggtgtcagtcgccaatgctgtcatcaatgctgagaactcgagcttgaagaccatgaacactgaccagctgcttgatctgttcacatcaacccctgcttcaagaaaagcaagcgacgagcagagtaagaggaaatctggtggcaaaggcttgaagtccattcttaatggtctggatgagctttgggatcagtcgcagtatgccgatgagtatgatctgaaccagttcctggcgaagctgaacggctgagccaccaccggctggctcgtgtacagtgtataaagcaatttggggcaggttaattttgttgttgctgttgtttgatagaggaaggaaaagattagatgctaacagatataggtggtggttggggttacgatctcaatttttttggtttccatcttcctcaatttttgttttgaggagttgtatatactctgctcacctataatcaaagctgcagctcttatcagaaaaaaaaaaaaaaaaaaaaaaaaaaaaaaaaaaaaaaaaaaaaaaaaaaaaaaaaaaaaaaaaaaaaaaaaaaaaaaaaaaaaaaaaaaaaaaaaaaaaaaaaaaaaaaaaaaaaaaaaaggaaaaaaaaaaaaaaaaaaagggccctttttaaaaaaacaaatttttacccccggggttgggaaaataattttttttttttggggcccccaa

SEQ ID NO: 87146 - DNA, 263 bp, Zea mays
  Clone ID: MRT4577_179482C.1
aattcggcacgaggcgactgaggtctgacgaggcgaaaacctcgctgactcgccccgccgacgccccgccccgcccgcgcgtgctgcgccgacgagcacggaaggttttcgcctgagggcatgtggatctgctaggtgacctgctggaagcaagtataggtacaggggggaccaggggagaaggatgaatgcttactggggtaggatgttggggccctgctcagggtgcctggtagtgcggaagaagagaaagggctcaagga

SEQ ID NO: 87147 - DNA, 211 bp, Zea mays
  unsure (1)..(211): unsure at all n locations
  Clone ID: MRT4577_179483C.1
agcagtggtaacaacgcagagtacgcgggacaagagtcagatatttttaactttgattatatatacatataatattaagttgaaattacgataatgccctgttttagtgtgtaactatagatttatctctgttttttagacttcgtgtgtttgtcgatgtttttcaaaacaaggtgggtgtatgctcctactctgcgntgntaccactggt

SEQ ID NO: 87148 - DNA, 468 bp, Zea mays
  Clone ID: MRT4577_179484C.1
actttcgaccccatcaggctggcatctctcccgacgagcagccgcgcccaggtctagggttccccctttcttcttctccacgcgaatcagctagatactagcaccagcatcgatggcggcggcagcgccggcggacgcgaaggcggaggccgccaagatggacctcctcgaggacgacgacgagttcgaggagttcgagatcgaccaagaatgggatgacaaggaagatggcaacgaagctgtccagcaatgggaggatgactgggatgatgacgacgtgaacgatgatttctcactgcagctgaggaaagagctggagggaggcaacactcagaagagctgaactatttccccatccatatcaaagctgtagtaaactttatcttcgatcaggcactgtgtggccgttgctctctgaacctgcgatacttccctagcaatatcaagctctgatacttatcttcgtta

SEQ ID NO: 87149 - DNA, 1399 bp, Zea mays
  Clone ID: MRT4577_179485C.1
cgggacggctcccccacgcagaggctcgtcgcttttattaaatcagcgctcgtcgccacgcaccctcgcctccccagcgtaacaagtgtccttcctccatcttcctcctccactccactcccaagtccccaccacccccaaccccgtctctccactgcggcgcaggcttcgcttcggctccgctcggctcgagcagaagaaaatgcaacgggcagtgcaggccgtcaggtcacacggcaatgttcttaaatatgctgttctacaacacatcagcgctcccaagccagcaatgcttcctgctgccttttctcgtttcatgtcagtttcatctgctcgcctagaggatcgtggatttgaaactgccactgtagcagatgtcttgaagtctaaagggaagagtgctgatggatcttggctctggtgcaccacagaggatagcgtctatgacgctgtcaaatctatgactcagcacaacgtgggagctttggtggttgtcaaacctggacagaataaatcaatcgctggcattgtcactgagagagattatctccggaaaatcatagtgcagggaaggtcttccaagtcaactaaggttggcgacatcatgactgaagagaacaaactgatcacagtgaatcccgacaccaaggtcctgcaggcaatgcagctcatgacagaaaaccgcgtcagacacatcccggtgatcgacggcacggggatgctggggatggtctcccatcggcgacgtcgtgcgcgcggtggtggccgagcacagggaggagctgaaccggctcaatgactacatccagggaggctactaggacggcgtgtgcagcgacgaccccctccgatcccgccagtcagtgaagtccgcctttgaaatccaataactcggaacaatgatgatgacgaaataggccgtgttttcttggacaatgatgttaagttcggcaaggttttcctttctctttttttattctactgcgtggtctatgtgtatattgccaaaggcatgcgtgagccatgcgcccggtgctggggcgcagagaccatctgatggtggaaacaccggaaataagagcgtgccgctgtgtgtttcctttgaaggaataaaaatggtgttcgtgttgtgcattgcttaaaaaaaaaaaaaaaaaaaaaaaaaaaattttgtgtatattaattctcttcttcgcaccttctcagtacctccagtgcatgttcccatgtctcattagagcataggtatttcagtgtcactgtgtcgtcgtcagcgagtcatgtacattattatcctgaaactgtaaactatatatcacctatgtcaactgtaatcaaataatgacagccctaccttgggaaagaatgtgatttgttgcaaattgcaacggatgggggg

SEQ ID NO: 87150 - DNA, 1006 bp, Zea mays
  Clone ID: MRT4577_179486C.1
gaccctcgggcttttcgggctacatgtttctcctataaatacccatactcggctttctaaaccatcccatctcacggctagctagcacaagcatagtgcaggggcttgccacctaagtaaggcccgcctgagagccatggcatccaaggccgtcctcttcttggctctcaacctcctgttcttcacggtggccaacgcctgcggcaactgcccgaccccaacgcccccggtcgagccaccgccgccgcctcctgctgctaccccacccccttcgtccagcggcaagtgcccgctgaacgcgctcaagttcggcgtgtgcgccgatgtgctcggcctcgtcaaaggcgaggttggcaaggtgcctgccgagccatgctgtaccctcatcaaaggccttgcggacttcgaggccgccgtctgcctctgcacggccatcaaggccaacgtgctcggcgtcgtcgtcgatgtccccatcaagctcagcgcgctcgtcaactactgtggcaagtgcgtgcccaagggctacatgtgcgcgtaagcagctccgggcggttacacgctcgtagctgttcacgtacgagattatatatgcacgcaccctgcatggcacgaatgcatgcattgtgtccgctgatatatctctcctgtctcagttgtgcacctagctttcggttctacaaaacctagaaccattccagccaaatacttgtcagttcaattcgcatgtattgtctcttgttgaattcccattatttttcttttgtatttggtcatttcctcgtaagagtccgacaccttctcgaaggaaaaaaaagaggggtgttgcttctagttttttatatctacgaatcatgtaatttgttgagagtcatttgatgtgtatgtataaccaaacacttgaacttgtagtgccttattcgatttgttatttgttcctgtctttcggagtgagaataaaaccatttggtcaaaaaaaaaaaaaaagggcggccgccaccgcggtgga

SEQ ID NO: 87151 - DNA, 545 bp, Zea mays
  Clone ID: MRT4577_179487C.1
ctacccttcaccgcggacgaatctcgccgaaccctacgtagggggcccgcctgaggggccgcccactccgacgaactcgaagccaacgtttgatgacgactctgacgcaccgagagcactccttcgacggtcatatttcatacgacttcgcatctgacatagttgctactcgacatccaaagacgattgaaagaatgtccgccctcttgccagctatcagatctcatcttcgccgggaaacacatttgggacgagacaacccgtggccatgactccattcagaatgaaaccaccctccgcctggtgctccaacttggcggcgactgcaagaaccgtcacatatgtacgtaacccaagatgcgcaatatcaagatcaacctctagaaggagtatatctccgagctgtagctctataaggtagcaatattcactaacaactggacccatctccgctcctctcgccccttctcacagagtactccgcttccttgcatgaggaccgaattctgccgccactattgcgagaaatatttgctctcatatga

SEQ ID NO: 87152 - DNA, 840 bp, Zea mays
  Clone ID: MRT4577_179488C.1
ggcatctcacggctagctagcacaagcatagtgcaggggcttggcatccaaggcctgagagccatggcatccaaggccgtcctcttcttggctctcaacctcctgttcttcacggtggccaacgcctgcggcaactgcccgaccccaacgcccccggtcgagccaccgccgccgcctcctgctgctaccccaccccccttcgtccagcggcaagtgcccgctgaacgcgctcaagttcggcgtgtgcgccgatgtgctcggcctcgtcaaaggcgaggttggcaaggtgcctgccgagccatgctgtaccctcatcaaaggccttgcggacttcgaggccgccgtctgcctctgcacggccatcaaggccaacgtgctcggcgtcgtcatcgatgtccccatcaagctcagcgccctcgtcaactactgtggcaagtgcgtgcccaagggctacttgtgcgcgtaagcagccccgcgcggtcacacgctcgtagctgttcacgtacgagattatatatgcacgcaccctgcatggcacgaatgcatgcattgtgtctgctgatatatctctcctgtctcagttgttgtgcaccttcggttctacaaaacctagaaccattccagccaaatacttacttgtcagttcaattcgcatgtattgtctcttgttgaattcccatttttcttttgtatttggtcatttcctcgtaagagtccgacaccttctcgaagggaaaaaaaagaggggtgttgcttctagttttttttatatctacgaatcatgtaatttgttgagagtcatttgatgtgtatgtaaaaccaaacacttgaacttgcagt

SEQ ID NO: 87153 - DNA, 224 bp, Zea mays
  Clone ID: MRT4577_179489C.1
gttaactcggggacacgattagcatagcattttgtccctggggctgctttccatgtcaggtgaaaacaatacaaaagctatcgtgtacagatgcaatgtattttcgttctgattttgtagcgcttaaaaaaaaaaaaaaaaaaaaaaaaaaaaaaaaaaaaaaaaaaaaaaaaaaaaaaaaaaaaaaaaaaaaaaaaaaaaaaaaaagggcgtccattttacaa

SEQ ID NO: 87154 - DNA, 1791 bp, Zea mays
  unsure (1)..(1791): unsure at all n locations
  Clone ID: MRT4577_17948C.1
cccacgcgttcgcccgatctcaaaccccaacgctaatagggtattcgggtgagccggcagcggcgtcggctgggtattcgggggagccggcagcggcgtcggctcggctccggctggggggtgcggcggcagcggcgtcggccttcgcgggagacgcggcggcggccgggcgagcttcgggcttcgggcgtggcctcacgcccgcgccttggcggcctcgccacggcagcaacgcgtcagggcgtcggcctttgcgggagacgcgggcacgcggcgggcgggcttcggccgtgggcctcgcgcccgcgcttaggtggcctcgctgcggtagcaacgcgggcatcagctttcgcggaagaggcggcagcggccggccgggcttcggcggagggcatcgcgcccgcgccaggcgtcggcattcgcgagcttcggtacaggctgtctcttctagaatgctaggagtggagaattgatgccggagaaatgcaagtttgaggacagaagacctcttcaggactagcagttcttgacatctacacggttcaacacctgtttcttctggggaagaaagcacagcaattcattatgaagagcagcgacggaaaccaaatcaagttacaaccaatgtggagaaaagttgcctatgggggaaggcagtcaggatatgatgataactacactgacgagtccttccttgaggagatggttatgaatgccaatgtcgtcaagagggaccttctgaaagtgatgatcgactctgtatccatatcacagtatctttgcatcgtcgctcttgtggtttctacatggaccctaacgctgaacttggacattgatgaatctactctcctcaaactagatgttggtcttctccttgttgggttctgggtcctcttgctcacaacttgtccgttctcgctgaagcttctgacaaagtatgtcctcaatatatcattcttcataagcggtctttatgttctcgcaccaatttatcataccctcaccaggtccatcagttcagattcaatatgggcccttgctgtatctcttctgctggttcatctatttttacacgattactctggttcaaccataaggcctccaggcgcattgaacaacccaaaattaactagcaacatctccttgaatgcatcgatagtagcctctgtccttgtggcttcgcggctgccatcaaggctgcacgtcttcgcaatcatgttgttctccttgcaagtcttcctctttgcacccctcattactttctgtgtgaagaaataccattttaggcttcatctgctattctccttcacgctaatggctgtggccctgagtgtcacataccagttgcatcgaatgttcttcactgttctattggcgctacttgtttttgtctcaatcgtttgcccttactggcttataaggattcaggaatacaagtttgagatcaatggcccctgggatgaagcaaaactctgctttgatataactgaatagcagtgctaagttttctttaggaatgatttgcattgaagattggtttggttgtatatactggcatataggctcgctgcgagccttcatggcataggtgttttcatgtgaatgtatatgctatttaatggatttattgtgttaccgagactaattcttggcatgctttgacatgcctaatgatcactaattctggtgtcactggcaaaaaaaaatgccccaaagctactttgtaaggaaagatctacatnctgtcttttgctgactgacatatttgggaggtgaaaagctattgcatat

SEQ ID NO: 87155 - DNA, 954 bp, Zea mays
  Clone ID: MRT4577_179490C.1
ggtagcacaagcatagckcgtctcttcttgtctgcttcagttattgtccacgagctagtkcaggggcttgccacctaagtaaggcctgagagccatggcatccaaggccgttctcttcttggctctcaacctcctgttcttcacggtggccaacgcctgcggcagctgcccgaccccaacgcccccggtcgagccaccgccgccgcctcctgctaccccacccccttcgtccagcggcaagtgcccgctgaacgcgctcaagttcggcgtgtgcgccgatgtgctcggcctcgtcaaaggcgaggctggcaaggtgcctgccgagccatgctgtaccctcatcaaaggccttgcggacttcgaggccgccgtctgcctctgcacggccatcaaggccaacgtgctcggcgtcgtcatcgatgtccccatcaagctcagcgccctcgtcaactactgttgcaagttcgttcccaagggctacttgtgcgcgtaacagctccgcgcggkcacacgctcgtagctgtwcacgtacgagattacatatgcacgcaccctgcatggcacgaattcatgcattgtgtccgctgatatatctctcctgtctcagtgtgccctagctttcggttctacaaaacctagaaccattccagccaaatacttgtcagttcaattcgcatgtattgtctcttgttgaattcccattatttttcttttgtatttggtcatttcctcgtaagagtccgacaccttctcgaaggaaaaaaaagaggggtgttgcttctagttttttatatctacgaatcatgtaatttgttgagagtcatttgatgtgtatgtataaccaaacacttgaacttgtagtgccaaaaaaaaaaaaaaaaaaaaaaaaaaaaaaaaaaaaaaaaaaaaaaaaaaaaaaaaaaaaaaaaaaaaaaaaggggggggcgcgtttaa

SEQ ID NO: 87156 - DNA, 911 bp, Zea mays
  unsure (1)..(911): unsure at all n locations
  Clone ID: MRT4577_179491C.1
cattgggtacctcgaggccggccgggattgtcctccagctagtgcaggggcttgccacctaagtaaggcctgagagccatggcatccaaggccgttctcttcttggctctcaacctcctgttcttcacggtggccaacgcctgcggcaactgcccgaccccaacgcccccggtcgagccaccgccgccgcctcctgctaccccgcccccttcgtccagcggcaagtgcccgctgaacgcgctcaagttcggcgtgtgcgccgatgtgctcggcctcgtcaaaggcgaggctggcaaggtgcctgccgagccatgctgtaccctcatcaaaggccttgcggacttcgaggccgccgtctgcctctgcacggccatcaaggccaacgtgctcggcgtcgtcatcgatgtccccatcaagctcagcgccctcgtcaactactgtggcaagtgcgtgcccaagggctacttgtgcgcgtaagcagctccgcgcggtcacacgctcgtagctgttcacgtacgagattacatatatgatatatgcacgcaccctgcatggcacgaatgcatgcattgtgtctgctgatatatctctcctgtctcagttgttgtgcaccttcggttctacaaaacctagaaccattccagccaaatacttacttgtcagttcaattcgcatgtattgtctcttgttgaattcccatttttcttttgtatttgatcatttcctcgtaagagtccgacaccttctccaaggaaaaaagggaagtgttgagagtcattgttgtgtatgtaaaaccagacacttgaacttgtagtaccttattcgatttgttatttgttcctgtcttttggagtgagaataaagccatttgtttaatcaaaccgnnannanaaaaaaaaaaaaaaaaaata

SEQ ID NO: 87157 - DNA, 244 bp, Zea mays
  Clone ID: MRT4577_179492C.1
atggggagaatgttttattttttgtctattattcttttgatgcattcaggggggaagggcccacttatagtcctttcaaccttggctgcataatatacacccctccacctgtcatttggctgaaacaatggttaattttataccaccctaagaaggtggctctggcgaaaccattaaaatgctaaaacctcgtaaagggcttccctgaagccatactcaaatggtcttggaacctggttagcat

SEQ ID NO: 87158 - DNA, 259 bp, Zea mays
  Clone ID: MRT4577_179493C.1
cctatactttttttatcaaccagagactatcatttcctccgggggggtttttttaggaacacaatccaattttcccccacaccaaaaaattaaccgcaggcacctagagcaccaaaacaccggtattctcctctcctgaatggccgagcaccaaagggggcccaagggggatgggggcacccccactgctgagcctcaaggggggagccctcccgaataaggtctcggccacgcccgggaggcccccaaaccaaggggc

SEQ ID NO: 87159 - DNA, 944 bp, Zea mays
  Clone ID: MRT4577_179494C.1
cggacgcgtggggctagcacaagcatagtgcaggggcttggcacctaagtaaggcccgcctgagagccatggcatccaaggccgtcctcttcttggctctcaacctcctgttcttcacggtggccaacgcctgcggcagctgcccgaccccaacgcccccggtcgagccaccgccgccgcctcctgctgctaccccacccccttcgtccagcggcaagtgcccgctgaacgcgctcaagttcggcgtgtgcgccgatgtgctcggcctcgtcaaaggcgaggctggcaaggtgcctgccgagccatgctgtaccctcatcaaaggccttgcggacttcgaggccgccgtctgcctctgcacggccatcaaggccaacgtgctcggcgtcgtcatcgatgtccccatcaagctcagcgccctcgtcaactactgtggcaagtgcgtgcccaagggctacttgtgcgcgtaagcagcttccgcgcggtcacacgctcgtagctgttcacgtacgagattacatatgcacgcaccctgcatggcacgaatgcatgcattgtgtctgctgatatatctctcctgtctcagttgcattgtgcacctttcggttctacaaaacctagaaccattccagccaaatacttgtcagttcaattcgcatgtattgtctcttgttgaattcccatttttttttgtatttggtcatttcctcgtaagagtccgacaccttctccaaggaaaaagggcagtgttgagagtcattgttgtgtatgtaaaaccaaacacttgagcttgtagtaccttattcgatttcttatttattcctgtctttcggagtgagaataaagccatctggtcaatctctcgtgatctacttttattaggattctaggacttctataacaagcaaattttttttccttttccgaaaaaaaaaaaaaaaaaa

SEQ ID NO: 87160 - DNA, 266 bp, Zea mays
  Clone ID: MRT4577_179495C.1
attggtctccctcaacaacctcgctacagaaccattatcccacagtgctcacatgcttatatagcttcaattcttacaacgtacctctcacctcagattgctccaacatgagaaaacccaattcttgaaccctacaggatccaacatgcaattacatcacgcatcttaccactatcacccttgtttctccaacaaacatcatacctatggacagcaaatacctatggagcatctattgtcacagaacatcatgatacaacaacttg

SEQ ID NO: 87161 - DNA, 546 bp, Zea mays
  Clone ID: MRT4577_179496C.1
ccggacgcatcatttatggtatccaatttttggtctggggacaaaagaagccgaatttcagacatattatctgagtatgacatgacagtaatggactacccacaacagtatgaagggtgtccattgcttcagcttgagatgatccaccatttcttgaaatcatgtgaaaattggctatcggtggaaggtcagcataatatgcttttgatgcattgtgagagagggggttggccagttcttgcattcatgttggctggactgcttttgtatcgcaaaacatacactggtgagcagaagacactagaaatggtctataagcaggctcgaagggactttatacaacagttttttcccttgaatcctcagccttcacatttgaggtacatttttcggaccctgattcattcaaacctgctgctaccgtcgaggagatagctgatgatggagatgagactgatgttgcttcggtagacacaggagaggagttttatgaagcagaggaggattggcatgatgctagaaagaccaagaaactcgatcaactga

SEQ ID NO: 87162 - DNA, 396 bp, Zea mays
  Clone ID: MRT4577_179497C.1
gcggtgtgggggggtttttttttaattttttttttttttttttttttttttttttttttttttttttttttttttttttttttttttttttttttttttttttttttttttttttttggaaaaaaggttttttttttttgggacccccaatttgtggggggggggggaaacccccccccaatttttttttctttatatggggaaagggggggggaacagggcccccccaaatcctaaatgtcaaatggttttttccccaaaccccgggggcaacaaggtttggggggccaaaattttcccccggccaaaatgcccaaagggggaacagtcgaaaatgccatcttccaggttcacccccccccgggtaaacccggccccgaacttaagaaacggggc

SEQ ID NO: 87163 - DNA, 296 bp, Zea mays
  Clone ID: MRT4577_179498C.1
aatggctctttggttttaaattttgctcgcctaaggttttgattcggagccctggactccttttttttcggcccaactggtttgcctggggcctggggccccgattgctggccatggcgcgtttgtttccttcccctggtttcgccccttctggtccgggggggcggggccgcattcaggccctctttcccctgttgcggggcccgagctggatgtcctttggcctggtggtgacccttttggcctgggtggggccgaggttggggtccttttttggacccaccaggtacgcctca

SEQ ID NO: 87164 - DNA, 808 bp, Zea mays
  Clone ID: MRT4577_179499C.1
actccgtcgccctatcgttctcgcatctccctactaacccacctaccggaagagacgagggtggccgccgccttctcccgctctgcctctcttcatgggccaggtcgagagccaggctacccgtccgtcggaggagccttctccacccgtcgtggagccgtcgccgccgtcttctgccccgcctccgtcctcccttgaggcgcttgccgcaggtatgtgtacatgggaagcccgaagtgtggtttcctccactttactcggaactagttgagttgcagttgcgctgggtcttcccgttgcttggatttggatggagcgttggttgaagggtgaacctcttgaactggttacattcggtttcgaagatatttttttagctagttgaattgcagatcgctcttctgacattgatgatttagaacatgtactgagcgcgatatcttcttaggctctttattgtagtctgttgctgaaattgcaatagtatttactgttaatttcgccttagtgatgttgtatgttaataagcaggggcatggtccgtacttatgaggagaaagcgtaccttaggttagtctggtagcagatcaatgtctgtccagaatgactagcttgactaatcgagcacataggtctctagattactgcttatactttgcctgtcaccatgcaccaaggctcaagaggtctgacacgcatctgaagccaatcaatgctgctttggcagaactgtacgtagttcaggggctcatctgatggtgtcatagttcagaggcaaatgttgctgcagaagttctccatgcagctt

SEQ ID NO: 87165 - DNA, 5313 bp, Zea mays
  Clone ID: MRT4577_17949C.1
atggctagtaacaacaatgtgcacattgggaagccaccacattttgatgggaataactacgactattggaaaataagaatgtcaatgcatcttagagcaatgggtggaaaaaattggccaattgtcaaggatgggtttgttgtgctgaaagaagatgaaccatcggttagtgacaatgaaaacattcttacaaatgatcaagccatgaatgtattatatgatgctcttgatataaatgagttcaaccgtatcaagaatctcacaaccgctcatgagatttggattaagctaatggaaattcatgaaggaactacaattgtgaagagtgccaagctatatgtgtgcaaaggaaaatttgagcaattcattatggaagaagatgcaagtgtatccgatatgttcaaccggttaaatgagatagtgaatgaactcaagggacttggttttaatgtaccggatgtgggtttcactcataagttccttagatctcttccggagaagtatgagaccattgtgaccatgttagtaagaagtgatctatctacaacttctccaaccgaagtattgggggaaattcttactcaagatatattcaagaaatctcaagccgatgctataagtttggcaaagaaagtgaagaatgaatcaatcgctctcaaagataaagcttctaaagcaattgaaaaagaagatagtgatgatgaagaaaatgaaagtgagagtgatggagatatggctctatttttaaagaaattcaacaaattcataaagatgaagagaggtcaacttagaagaggccaaacatcaagaaggaatgctttcaatgatagaaaatgttttgagtgcggggaacccagtcacattgccatgaattgccctaacaagaagaagaagggcaaagatggagatgataagaagaagaagaaattttacaacaagaagaaagatggcaaagcctacctagttgaatgggattcggatgatagctcggatgatgatgatgatgacacctcatccaagcttaatgctggaattgccatcaaggaagctccctcacttttctcatcccctcattgtctcatggaaaagggagatgctaatgccgatgactacatgcacaaagaaaaagaaaaatttaagaccttgaaggaatcgtataaaaacgtccaagtgtcttttgaggagctcaagacctctaacaacaatctaaaagagaattgtgagaagcttgtggaagctcaaaactcatctattgtgcatgaagttgtggtggtcaccgaggatgttggagtcacttgtgacttacttgatagtcctacaagtgaaccactacctactaactctatttgtgataaatgcaaaatttctcttatgaatgataatattgctcttgatgaatcacaaatcattgttgagaatgaagtgttagtagatagagtaaatgctctaactcatgatctagagaaggcatatggtggaaaggctaaattggatttcatattgggaagtcaacggtgctcacttaatcgtgagggtcttggatatgttcccaagaaaggaaagaatgcttttataaagcaaaagacattgtttgtgaaagaatgtggcaaagtgtgtcacaagaagggacatattaagaaaatttgtcctaagctcaagaatgtatcctacacttgttttgagcattgttatgttctttctcataatgcaaaaggtgttcatgctaaatttgttagtacttcaattgttggcaacaagaaagctatttgggtgccaaagaccttggtcactaacatccaaggacccaagcaagtttgggtgaactacaaggcgggagggaatcattgggtgttggatagtggatgcactcaacacatgactagagatatgaaaatgttcacccaaatgagtgaggaagattgctcaaattatgatagtatcacatttggagataatcgcaaaggaaaggttaaaggcttgggtaaaattgctattttgaatgatcattccatatcaaatgtgctcttggttgagtctttgaattttaatttactattcgtagctcaattacgtgatttaggatttagttgcaatttcactgttgatgatgttattatctctattgttgatggtagcaatcttaagtttaaaggttttagatatgaaaatctttaccttgttgatttctcatctagtgagccaaagctcacaacttgcttattctcaaaggcttcactaggttggttatggcatagaagacttggtcatgttggaatgaagcaactcaatcgttcaaccaaacatgatttagtccgtggtttgaaagatgtgaaatttgagaagaacaaattgtgtagctcttgtcaagccgggaagcaagtggcaaatactcatccaaataaaagtcaaatgtctactcatcgacctttggaattacttcacatggatttatttgggccaacatcgtttgtgagtattggcggtaattcctattatcttgtgattgtggatgattattatagattcacttgggtttactttcttcgggataaatctaatgtgtttgaaacattcaagtcatttgctatattggctcaaaaccaatttgattttgatatcaagaaagttagaagtgataatgggtcggaattcaaaaatacaagaattgatgaatattgtgatgacaagggtattaaacatgaattatcttccaaatatactccggaacaaaatggtattgttgaaagaaagaataggactctcattgatatggctaggtctatgttagcggaatataatgtgtcggattcttattgggccaaagcaataaacactgcatgtcactcatcaaataggctatattgtcacaagcttttgaagaaaactccctatgaattgctcattggtagaaagccaaatatctcatattttagagtattcggttgcaaatgctatattttgagaaagggaagccggctctctaaatttgagaagaaatgtgatgagggttttctacttggatattcatcaaatagtaaggcttatagagttttcaacaaaactcatggtattattgaagaagcatatcatgttgagtttgatgaaactaatgggtctcaagatgaaagttataatcttgatgatgttagtggcactcaattgaaaaatgctatgaaaacaatggccattagtgaaataaagccaaagaaagatgatgatgagaatagtgtggttgtcattccatcctcttcaaccctaaatgaagaaaatcaccaaagccaaaataatgatgaaattatggatactcatgatcaagatacttcaagtcattcggttcctcctcatgcttcaactagcaattatcaaacagtatcaagaattcatcattctattgtgaaggatcacccggttgatcaaattgtggttgatattaatgaagctctacttgatgttgattgggtgaatgcaatgcatgaagaattaaataacttcactcgaaatgaagtttgggagcttgttgagagaccaaagaaccacaatgttattggtacaaaatgggtgtttcgcaacaagcacaatgaagatggattagtagtaaggaacaaggcaagattagttgctcaagggtatactcgaatagagggattggattttggtgagagatttgctcccgtggcaaggttggaagcaatccggatccttcttgcttatgcttgtgctcacaatatcaaactctaccaaatggatgtaaagagtgcctttctaaatggtaagattagtgaactagtgtatgttgaacaaccccccgattttgaggaccccaaaagacctatccacgtgttcaagctttctaaagctctctatgggcttaagcaagctccacgcgcttggtacgaaaggcttagggatttcttgctttccaaagactttagaattgggaaggttgacactaccctattcactaaaataattggcaaagatttgtttgtttgtcaaatttatgttgatgatattatttttggatctactaatgaattattttgtgaggaatttggaaaaatgatgtcaaaagaatttgaaatgtctatgataggagaattgagcttcttccttggtcttcaaatcaaacaattgaaagatggaatctttataagtcaatcaaaatatttgaaggatatgctcaagaagtttggcttagagaatgcgaagcctatcaagactcctatggcaacaaatggtcatctagacttagatgagggagcttcacctagagagattcacttgaaggccgcaaaaagaattctaagatatttgaagtatactcccaatattggtctatgtggtctaggtggtcttcggaagaagcttgccggtcgtttcaaatcaaagcgccctcgtgtagacgatgcagactataatccaaccacagactcagaggcccaatctttagctgggggtagtgtctctatggacacagaagatgttccacatgctcatcctgactatccgattgagatcacgggatggccttatccaaagaggaggaccgatttcagtgagatggctgtaaaacaattgttagccactgctgagattgatatcgatgaggaatccatcacatggatgactagtttcaagaggtattatgcaacatttgctgaatttgctactccaaacagtctggattatgatacaatttcagctgggattgatttgtacactgaagataactttgaagaatttgtgcaattttatgagccagcaaggctgggaattcctaggaggtttggtgagactgtagaactgaggcatcatcctgctgtgattaacaaaatttctagagttacaattcttcccaagagtggagacaagagcaaaattagagacaagttctggaacattatccaccatgtcatgaatggtgaggtaatgaatgttgtgctattcatgatgagacaattaaatgacctcaaaatggacaaaaaccagaacttagcctatgctccatacattatggttctcattaaagccaagactaaatttgaggggcactgtgagatagttcacacaccttttaggcccttgaagaatgagattgggttcctcaccaggcctcttactcccttcccagatgatgaggaagaagctggtgatgatgcaggagaagctcctgaagctgatgcagagcagatgcctcctcctctacctcctcctcagcctcagcagtactggcagcctggtccaggctattttgacccttactttcagaacatgcaacaagggctccagacccacatggatggccgcttctag

SEQ ID NO: 87166 - DNA, 133 bp, Zea mays
  Clone ID: MRT4577_1794C.1
cacagatacgcgtctactctagttgctgcgcgtcatttcgcagaggtagttctctatcagtgaggatgccagcgaggagcgcactgaagccagcacgcgatgagtcgcctcctatggcggcagaaccttgccg

SEQ ID NO: 87167 - DNA, 349 bp, Zea mays
  Clone ID: MRT4577_179500C.1
ttctcgcgtgcgcccactcgtccgggcggtgtgaacaatgatcctgccgcgaccgacgaggctccggggcatcctagcaggatcgtgggacatcaagcgatccccagcagatgcccgggcagagaacgacactctctgtgatatagaacccaccgcgggctccagcggccgaggtccgtgccgatacgactcggcacgctctagccatctataggtagcgtgctccttagccgccactatcctgccgcccgggcttgcatggcggatgatgattactagagagccacggcggccggagcacacttcctgctcctgaccccgatgctgcccgtccatcagagcgggcggg

SEQ ID NO: 87168 - DNA, 660 bp, Zea mays
  Clone ID: MRT4577_179501C.1
cctcgaggccggccgaacgctgccctgcaccttccatcctccgggaaaccacgcatgccgcagccgcgattcccgtgacgctctgcttccatccccgcgctctcccatctgcgtccatgctcatcctccgggcagccacagactggattcccgccgccccgccgggctcacctaccagcccgctcgtggatccctgatgatgcatctgggagctgaagctgaacatctcgcggatgcggatgctgctgacagagctggatcggctatacgggctaatgaagcatcaggggaggatgcgcggtggggacggcggcgtgcggcgagcacaaccgcgccttccttgcgtcgctctcgaggggcatcggcagacactcaccatgttcggcgggcccgcggcggccgacagacagcgcgagaagtgtggcggccggagctcccagtgctccgacgcgaaggcccgcatgcggcataatgcatccttccctatgactgatgcttcgctgctagcgtcaacggcgttaggcgcggcaggcggagatcgcggatggatgcggtctcagcctctgtaggatcggtcggagctaagcagggacgatgaggtgctgacagctgagagatacgtgtattgtctagacagatcagcccatagatggctcatag

SEQ ID NO: 87169 - DNA, 364 bp, Zea mays
  Clone ID: MRT4577_179502C.1
ggggtactctgaaacggggcctgggacccagtgagcttcttttctcaaatgacttgggaatcaaacttcctgcgaagggccaccacacaattgggggctcttgcctcaattacaagggggtgtttgatctcaaaaaagaatgcgaaagaaaaaaacctatccaagcgcaagagctcaaatgaaccctacaaatccctctttttagtaactggggcttttaatggagtcgggagaggagttgatctcttttggcgtgctttacaatgaatgctacctcttcgatagggggggggagctggaaaacttgggggcttgtatagggggggtgaactaaatctacttgaacagaagcatctatggcaat

SEQ ID NO: 87170 - DNA, 595 bp, Zea mays
  Clone ID: MRT4577_179503C.1
ccacgcgtccgggagtcgtccgccaacggcttcaccctggtcgggctcagaaccatcgacatcgccaagtccaccgtagagggcatgtgccccggcaaggtctcgtgcgcagacatcctggccttcgcggcgcgcgacgccgccgtggccgcgggcctcccgagatacgaggtcgcggcggggcgccgcgacagcatgcgctcgaacatggacgacctcccgggcaacttccccgtgccgggccaccacgtgccgcgcactccatcggcggcgcgcactgcttcatgttctccaaccggatctacaacttctcccaggaggccgacgtggacccgacgctgctcccggagtacgccaagtggctgcgccagatgtgcccgccgcggcagcccggcgacgaccccgagcaagcgcccaaggtgaagttcgacgctcagactgaggagcggctcgacgtctcctgctactccgagctgctcgcccgccgcggcctgctcacctcggacaacgcccttatcgaggacccgcagacgatggctatggaggagaacttcgcccggaacgagccactgttgcaacagaagttttccccagc

SEQ ID NO: 87171 - DNA, 1929 bp, Zea mays
  unsure (1)..(1929): unsure at all n locations
  Clone ID: MRT4577_179504C.1
actcctatgggcgattgggtctctcgaggccggccgggagctaataaacacacgcagtcaactcgttgctgggggtgggatcccggccgagcaccatgcgaggaaataacatgccgcggcacacgtcgccgttcctttttgccttgttggcgtcggcggcgaccctgctcagcgtcggcgacgcgttggtcgtcgacggcctgcaggtggggttctatggcaagacgtgcccggcggccgaaggcgtcatcagcgacatcgtcaacaacgaaatcgctatggaccggggcatctcccctggcctcattcgcctcttctttcacgactgcttcatcacgggttgcgacgcttccattctcctggacgagtcgcccgccggcgacgtcccagagaaggagtcgtccgccaacggcttcaccctggtcgggctcagaaccatcgacatcgccaagtccaccgtagagggcatgtgccccggcaaggtctcgtgcgcagacatcctggccttcgcggcgcgcgacgccgccgtggccgcgggcctcccgagatacgaggtcgcggcggggcgccgcgacggcatgcgctcgaacatggacgacctcccgggcaacttccccgtgccgggccaccacgtgccgcgcctcaccgagctcttcagccagcgggggctctcccaggaggacctcgtcctgctctccggcgcgcactccatcggcggcgcgcactgcttcatgttctccaaccgcatctacaacttctcccaggacgccgacgtcgaccccacgctggacccggagtacgccaagtggctgcgccagatgtgcccgccgcggcagcccggcgacgaccccgagcaagcgcccaaggtgaagttcgacgcgcagacgggggagcggctcgacgtcgcgtactactccgagctgctcgcccgccgcggcctgctcacctcggacaacgccctcatcgaggacccgcagacgagggcgatggtggagaacttcgcccggaacgagccactgtggcagcagaagttttcccaggcgatgcagaaggtcgggatgcttgacgtgctcatcggcgagggcaagggccaggtaaggaagcagtgccgcctggtgaacgggcaggagaaggaggagaagcagcagcagccgcaggaggagcaggaggagcagcagccaccggagctggaggaggaggagcagcagcagccgcatcagccacagcttccatggttcctgcagaggcagcgcccgcccgttcttcttccatggctccggccccatccacggccgcgtcgaccgttccggaaacatccggtggccgacctggttaacggatttttccgtggttttcactgaaggcgagcactatgctcgggacgtagacctccaaaatatgcaatgctacggtacatatcaatggacgtaaaccggtgtatccatgagcttaattaacatgaacaatcctgctttgcttaaacctttgttttagaaaaaaaaaagttggtgccatcgtatgaagaacatatgctacgacatgtcatacatgcctgtttttattttctttggcaaggtacagtatcctttcggttgctgaaatccatgcacatatcgaaagtttggncgaacccccttgccttcaagccgnttccgggcggaaaccgccggtttggggtccgggttccaaaaaaggggggccccctttggggaaaaaaaagatgtgttggggggggggggaaggggggcccccccccaaaaaaaagggggggggggggaaaaaaaaaaaaaaaaaaaaaagcggggggggggggggccccccccccccccccccccccctntggggngggggggggggggggnntggngccccccccccccccccccccccccaaaaaaaaaaaaaaaaaaaagaggggggggggggggg

SEQ ID NO: 87172 - DNA, 889 bp, Zea mays
  Clone ID: MRT4577_179505C.1
cagaacaggatgcccagaacatttttcagaacaggaggtttctgtgaataaagactaaatgatttgacatctaaaaccggatagcatgaatcatcatacaatagtttcgctttgatgagtaaagtgttccagcttgttcatgtcagacgcacatactaaaaaaagattgggaaagtaacgtaatagacctgagcacatgaattttcgcactaatgttacagcgcatcaaatcaaaagaaagaagatcggagcatggcaactgacaaccccaaactatgattttttttcaaagatggaacaccaaacaatgtgattgcatcttgagaaaccatgctgatccgcgcggcaaaaagaaatcctagaaacaagttgaaatcctcatcttttaagtgcgttcatcctgtccctcaggtaatacagcttagctctcctgactttcttcctgtccaagaccttgatttctttgatgtttggtgagtaaagtggaaagacagactcgactcccacgccagccactaatctacgcaatctgaaggttgtattgatccccagcgttgcgccttcctatgacaatccctttcagtgtcgactcgcgccgtttgttctcaggaacttgcaatctcatctgaatgatacatccaggctgcacatcaggaatcgccctctccgagcggaccttttcgaccgcctctttgttcaggataataataatgtgtctagcggtcttgtcaggcctcttgaacttgatgcgcggggggtgctcaaccgcaggagaggtggaatcgtccgaatcagaggcaacctcagcagcatttcccgccgtcgacagacccctcgtcgcaacgagaactttcgcgcagagaccgaatccggaggcggcagccggaac

SEQ ID NO: 87173 - DNA, 388 bp, Zea mays
  Clone ID: MRT4577_179506C.1
acggagcttaatgctaagccatctaggggcgtgccggagcccgtggtacggaccctaccgagtgctgtacctgggcccagtgagcggcaagccaccgagctacctgacggccgagttcccgggcaactattttctgggacactgcggggctgtcggcatacccggagacgttcgccaagaactgagagctggaggtgatgcactccagctgggccatgctgggcgcgcttggctgcattttctctagagctgctctaccgaaatggcgtcaagatcggcgaggcttatctggttcaaggccgactcccagatcttcatctaaggcagggtggactacctcggcaacccgagcctcatccacgctcagaggatccttgctatcttgggc

SEQ ID NO: 87174 - DNA, 334 bp, Zea mays
  Clone ID: MRT4577_179507C.1
gagggaaaaaaaaggaccaaaacaaaaaaacgggggccaaaaaaaaaatgggtacagcaaaagcaaacgggtcaaccaaaaagcggggggacacacctccgtccatgagcacaaagacgggccccaaaaatgcgggggggggaggcaaaccgaaaaaccctggttttttttttttcaaacacaccaaacaaaacccatttatgggaaccagcccggccccccttattattggtcaacccccaccccaagctagaaggaaaaaaaacaaatccctgggcgcccgacccacgtaaacaaaaactgcagggggcccacttgcaattgccacccaaac

SEQ ID NO: 87175 - DNA, 282 bp, Zea mays
  unsure (1)..(282): unsure at all n locations
  Clone ID: MRT4577_179508C.1
tccgccttatcgtccgcggnagcgtgggcggacgcgtggggcaagttgagaattcgtgaaggtgcctgcgggcgttccagcttttggtttattgtgttcgctttatcattttctgctcancacctctgtgtgcaggtgtgcagctttcttctcttttttttttctttgctncgcccggggggggggggggggggaattttttttttcctctttttttctttttttncttgcccgtgttttttttttttttttagtctgtttttttttgtttctttttttttt

SEQ ID NO: 87176 - DNA, 711 bp, Zea mays
  Clone ID: MRT4577_179509C.1
gcgaattaattcggcacgaagcagccgcgcgctctagaagaaaacaacggcaatggtcgcccgcgtctcgagtcacggcggatttcaggcggagatttgttctcctcaccaccgctccccttccaccgacaccgtttctccaatccagcaggttttggagcaactggatctgttgtctgtgtggggaaatattcctatttcagctcccttttgtcctcacctcgtgcagtatctcatctggtaagtcaactggacataacatgtttgtataaacagctcacttttgtcctcatctcgttcagcatattatgtttagcacttacacttcacttcttttacaacttgtgataagcatcatcaactcattacttttgccgttgattttatataggaactttaatcaaggtttacacttgaaaacagaccacactaaccattctgttcctgagggggtagtttgtaacagttggacaaacttattggtgtttgtgatcttactgtcgtttgtgatcttactgttgtttgtaagtatgagagggggtagtctgcaagtatgagagttatcaacattgagaaaactagcagatagtgaacgatccatagatcagacaagttaaacttactgatgtttgtgtttgtgatcttactgctgtttgttcagatgtcgtatgcctttgcatttttacacttgtgcatgaactaccaaagctg

SEQ ID NO: 87177 - DNA, 296 bp, Zea mays
  Clone ID: MRT4577_17950C.1
aactcaaacataatttactgggtttgtttatattttaacgatgaatactactcaacttcataaaagggattacatttctggaactgtatgaagttcacattattaactgaatttttcacccataacagcatacggacgcaccctttttatcttgttcctctaccctaaaacgctccttgctgcaataaaaaaaagagttattcgaacatagttcatgccagaagatccggcaggagttgcctttttccagcacctggcttaacacaaagaggatggaagagatgcttgtatggaac

SEQ ID NO: 87178 - DNA, 276 bp, Zea mays
  Clone ID: MRT4577_179510C.1
atgggtgttgactctctggtctgcaaatagataatctagatctgaagaccgtaccttaccgtctttataaaggttttcgagctcttactcgggcaggggaatttgaagtcaggtcataattttgtatttaacattgagtgatcttagacttgtaatgattctggacatgaaattttgttgcatgtacacggctagtttcatttgtaaagagttgatagtgttctcttctgattacaaattatcttctttttaggattgaaaactgcagatcaaata

SEQ ID NO: 87179 - DNA, 388 bp, Zea mays
  unsure (1)..(388): unsure at all n locations
  Clone ID: MRT4577_179511C.1
catatttacaaggaatttgttactgtttagcagttgggagggcatttttgaatatgttgcctcacaaaatgaaaataacaaatagttacgaactgaaatcaactgacacaaatatcatctgttcccaagttgagtggacgaaatattaacatgtgtatgtcattttcatttattttatttaattctagttgttaggctttgttctttgtagaagcaaaatccaaccacttatttgtatagtgtatttaatatggctttcggttttattgtctggctacttttccttctaattttatattattcagactatattctattgtttcatcactatatgttttcatcagttttttccttataagtaggcagcacatgacgcttntgttgagag

SEQ ID NO: 87180 - DNA, 165 bp, Zea mays
  Clone ID: MRT4577_179512C.1
atcgttcgagttaaatcttcgtcgctctcacgatctcatccctcccaatatttcgtcgtccacctcaaatagccgaactgaatcccagattactcagaaatttccaccgaaaagggaacagaacgagccagccctcgccaaaatgccaaacgaacctgctcccct

SEQ ID NO: 87181 - DNA, 522 bp, Zea mays
  Clone ID: MRT4577_179513C.1
ggcatgggcgacctgatgggggcaagctcgttgcttaccaacggaaggaagcgccgcgccaccgacacacccgatgttcgtaaggcccaccatgctctagactagggtggccatcaacatgccatagagctcagtcctagtgcgacaagtactacggggccaaggttattatgaatgagcgggctcccaaaatccaacagcccaacgagttgagcttgtcccagctactggaattttcgagtcggctcattctgggaggatctgaacagcctcgacgtgtggatgtgcaggttatccctgacctctacggggataacaacacgcaggcctcttcacgtactggacatgtgatgcgaaccaggcgacagggtgctacaacatgctgagctcatggttcatccaaatcaacaaccagatcgacatgggcgccaacatatgccctagctcaaactactcaggcttccaagctgatatcagcatactgatctgtgaggactccattgagggctactggtggatgca

SEQ ID NO: 87182 - DNA, 326 bp, Zea mays
  unsure (1)..(326): unsure at all n locations
  Clone ID: MRT4577_179514C.1
ctggtgttggtgggggggtctcaaaaatttttttttgggggcaattcttcacattaacgaacaaaagggccacaacattgcacgcaagggccagccccgcccataacactgttagtccatactgtcagcgcctatttaactaaaaccttcaaccctaggatagcaggagcaaattttttttntcaacccccaaaaaaaaaccnacaaaccacaaaacaaaccgnacccaaacccaccaaccccggcaccaganaaacaaaaaccccaagaccngagggggcgancacaaaaaaaaaaaaggcgaccaggcccccagggggaggacc

SEQ ID NO: 87183 - DNA, 672 bp, Zea mays
  Clone ID: MRT4577_179515C.1
cgcgagccgccgcctcttccgtctctctcatctccgtcctcctgcaatctcacccctccctctaaacccgcaggccgcagtagcgccgctacggtttgctcaggattcgaaccccaccttctgattgctccgaatccgaggcggcggttgcgcagaagtttgcggcatggcggggtacccggaggacaaccagcacgcgttgaacgggtacgacgatgaggaggtcgacgaggaggggcaccccgggcggcggggaggtcgggatggggcgtctgggtacggcgatgctggcggagaggatgtgaggggggcgggcggcgactcatcggggaagatttttgtcggaggcgttgcttgggagacaactgaaggtggaagtcaagaggacagttccgagggaagagatgaataccaaagatggccctaagacaagaaagatcttcatcggtgggctacctgcatctcttactgaaggttgaaataaagaaggctgaaccaaagaaacatggatctgataacatcggtaatgggagatcaagccaagggggtggaggttaccgcagtacttaccgtggtggtggtggagctggtagtggcagcagcggcagcggtgggggtggttatgggtttggtgatgcttatcgatctgctgcagcgagttatggatatgat

SEQ ID NO: 87184 - DNA, 361 bp, Zea mays
  unsure (1)..(361): unsure at all n locations
  Clone ID: MRT4577_179516C.1
agctatagncgctttgcgccagaaggcctttgtagggaggagccatgactgaggagaagcaccatcaccacatgtttcacccccgcaaggcagaggaggagggcgcctccggcgaggccgactacaaggagaaggagaagcaccagaagcacatgaagaagctcggcgagctcggagccatcgnngccggagcgtacgcactgcacgagaagcgcgaggccaagaaggacccagataacgagcacgggcaccgggttaaggaggaggtggccgccgtcgccgtcgtgggctccgacggnttcgctttccacgagcactatttttaagaagggaccctgagaagtacggccgacaactgatc

SEQ ID NO: 87185 - DNA, 626 bp, Zea mays
  Clone ID: MRT4577_179517C.1
ggccgccgcctcttccgtctctctcatctccgtcctcctgcaatctcacccctccctctaaacccgcaggccgcagtagcgccgctacggtttgctcaggattcgaaccccaccttctgattgctccgaatccgaggcggcggttgcgcagaagtttgcggcatggcggggtacccggaggacaaccagcacgcgttgaacgggtacgacgatgaggaggtcgacgaggaggggcaccccgggcggcggggaggtcgggatggggcgtctgggtacggcgatgctggcggagaggatgtgaggggggcgggcggcgactcatcggggaagatttttgtcggaggcgttgcttgggagacaactgaagaatcattctccaagcattttgagaagtatggggcaataactgattctgtaattatgaagaacaagccctaaacaggggcattggagcatagttgggttgaacacgtcaccactggaacaactgtgtaattgcagctgctgagcctttgcttgctgtacaagctacacatgaaacctgtgttgtattctttagttcggtatgcagagtttagaaccctgagaaacaagcattttatggtagggacagtatttggcccggt

SEQ ID NO: 87186 - DNA, 1834 bp, Zea mays
  unsure (1)..(1834): unsure at all n locations
  Clone ID: MRT4577_179518C.1
acctggaatcctttaaagtcaaccaacccgtccggccgccgccgactccttttccggctctctcgggctataatctactccctggctccttccttctaaacccgcacccgcaacaaccgcccgttggggtttgcttcagcccccgaaacccaccccttggagttggttcgatctcaggcggggccgaagtttgcagtatggcggggtacccggaggacaaccagcacgagttgaacgggtacgacgaggaggtcgacgaagaggagggacaccccgggaggcggggaggtcgggatggggcgtctgggtacggcgatgctggcggagaggatgtgaggggggcgggcggcgactcatcggggtgagcgatctgggccctaggatttctgaacattaatgatgtaggtcaaaaggagatatattatttttgctttctgcaggaagatttttgtcggaggcgttgcttgggagacaactgaagaatcattctccaagcattttgagaagtatggggcaataactgattctgtaattatgaaggacaagcatactaagatgcctcgtggatttggattcgttacattttctgatccatctgttatagacaaggttttggaggatgaacacgttatagatggcagaacggtggaagtcaagataacagttccgagggaagagatgaataccaaagatggccctaagacaagaaagatcttcatcggtgggctacctccatctcttactgaaggttggtgtttgctatcaacaaacaaatgttgaattcattttgtttatgatactgagaaggcacaaaatttcatatgagttgaaggatcacttttcattgtatggtaaggtgcttgaacatcagataatgcttgatcatagcactgggcgttctagagggtttggttttgtcacttttgaaagtgaagattctgctgaaagagtcatatcagaggggagaatgcgtgatcttggtgggaagcaggttagatttttaatttttttggtgtaaacttatgtttcacttactagtgaagtagaacaagaaagctaaatgaaatagacttagaaatgttcataactttgtatgctactggagtgaaggatatttaaattctagaatacgacttaggttttgatatgtgacctctattttggctatataatgggtgattcgaaattccaaatggagctctatagctcttctacgaggaaaatcagcatttttctttcccttctaaattcacatttattggtattgctctcacctgatcttaaccaccttatgtttcacgtatggtatttaatcatttttcggatgagtcagagaattgaaacttttggtccaagatggttctgctgatcaacagaagagtgtttgttttggtctaatttgaagtggtttttctgtcgtttcagttgtatatgtttgtcatgtcagttatttttttttctgtgtggtctgttttcagtgcgaaataaagagagaaaaaccatgtagacatggatctgatcacaggattgcagccgcagcaagccgaagcgancnagctgtaagctncaagttcgatcaaattttctgggtctcgggagtttctctggtcctcctagttcagttttcatgccatgtccacctaaacaggggcattggagcatagttgggttgaacacgtcaccactggaacaactgtataactgcagctgctgagcctttgcttgctgtacaagctacacatgaaacctgtgttgtattctttagttcggtatgcagagtttagaaccctgagaaacaagcattttatggtagggacagtatttggtccggtag

SEQ ID NO: 87187 - DNA, 533 bp, Zea mays
  unsure (1)..(533): unsure at all n locations
  Clone ID: MRT4577_179519C.1
ctcgctcccggcttccgaccccgtcccgctcatctcccttgtcgcatgggcgcgcctccagccgtggttcgtcccctccgacgacctctcctcgctcctcgccgcgcgtctcccgccggcaactcactcctccgaactcctcgcgctcttcgacgacaccctcgggctctccgacctcgccaccttccccaagaccttcaacgccgtcgtctccgcgctcgccacccacggncttctcgagccggccttctactgcttcaagcgcctccgcgacgtcagcttcaggggcctcgagacgcccgcctacaacgccctcctctctctgttgctcaccagggggcttgcattcaaggccttcgaagtgctcgacgaaatggcgacctcgggctgcgccctcgacgagggcacataccagctcgcggtgcctgcgctggcgcgcgccgggaggatcgacgcccccccccngatgtttcgtgaantggagcccccgggggcaattgggcgggccgccgggggggccggttttctctgtt

SEQ ID NO: 87188 - DNA, 4698 bp, Zea mays
  Clone ID: MRT4577_17951C.1
atggcaaagggagatgctaaggtaaaaatcatcaccgatttaaatgatataaaagatgatgatgatatcgatgatgttgatgatgatggctattcatatgatgatcttgttagaatgttaggtgaggccgatgactacatgcataaagaaaaagaaaaatttaagaccttgaaggaattgtataaaaacctccaagtgtcttttgaggagctcaagacctctcacaatgacctcaaagaaaattgtgagaagcttgcggatgctcaaaaattatctattgtgcatgaagttgaggtggtcactaaggatgttggagtcacttgtgacttacttgatagtcttacaagtgaaccactacctactaactttatttgtgataaatgcaaaatttctctcaatgataacattgctcttgatgaatcaaaaactattgttgagaatgaagtgttagtagatagaataaatactctaactcatgacttagaaaaggcatatggtggtgttcatgctaaatttgttggtacttcaattgttggaaacaaaaagaaagctatttgggtaccaaagaccttggtcactaacatccaaggacccaagcaagtttgggtaaactacaaggcgggagggaatcattgggtgttggatagtggatgtactcaacacatgaccggggatatgaaaatgtttacccaaatgagtgaggaagattgctcaaattatgatagtatcacatttggagataatcgtaaaggaaaggttaaaggtttgggtaaaattgctatctcaaatgatcattctatatcaaatgtgctattggttgagtctttgaattttaatttacttttcgtagctcaattatgtgatttaggattttgttgcaatttcacggttgaagatgttattatctctagtgttgatggtagcaatcttaagtttaaaggttttagacatgaaaatctttatcttgttgatttctcatctaatgaggcaaagctcacaacttgcttattttcaaaagcttcactaggttggttatggcatagaagacttggtcatgttgggatgaagcaactcaatcggttaaccaagcatgacttagttcgaggcttaaaagatgtgaagtttgaaaagaacaaattgtgtagctcttgtcaagccgacaaatccaatgtgtttgaaacattcaagtcatttgctatattggctcaaaatcaatttgatttcgacatcaaaaaggttagaagtgataatgggtcggaattcaaaaatgcaagaattgatcaatattgtgatgacaagggtatcaaacatgaattctcttcaaaatataccccggaacaaaatggtattgttgaaagaaagaatagaactcttattgatatggcaaggtctatgttagcggaatataatatatcggattcttattgggccgaagcaataaataccgcttgtcattcatcaaatagactatattgtcacaagctcttgaagaaaactccatatgaattgctcattggtagaaagccaaatatctcatattttagggtgttcggttgcaaatgttatattttgagaaaggggagccgactttctaaatttgagaagaaatgtgatgagggttttcttcttggatattcatcaaatagtaaggcttatagagtcttcaacaaaactcatggtattattgaggaagcatatgatgttgagttcgatgaaacaaatgggtctcaagatgagagtgataatctcgatgatgttggggggactcaattgataaatgcaatgaaatcaatggccattggtgaaataaaaccaaaggaagatgatgatgaagatagtgtggttgtcattccttcatcctcaactataaatgaggaagatcaccaaggccaacaacttaatgaaactatggatactcatgatcaaggtacttcaagaccttcggttcctctcaatgcttcaacaagcaattatcaaacggtatcaagaattcatcattccattgtgaagaatcacccggttgatcaaattgtgggtgatattagtaagggtgttcaaactcgctctcgaatagcttcgttttgtgaacatttctcttttgtatcttgtatggaacctaaccgtgtagatgaagctctacttgatgttgattgggtgaatgcaatgcatgaagaattaaataacttcgctcgaaatgaagtttgggagcttgttgagagaccaaagaaccacaatgttattggtacaaaatgggtgtttcgcaacaagcacaatgaagatggtgtggtagtaagaaacaaggcaagattagttgcacaaggatatactcaaattgaaggattggattttggagagacatttgctcccgtagcaagattagaagcaatccggattctacttgcttatgcttgtgcacataatatcaagctctaccaaatggatgtaaagagtgccttcctaaatggtaagattagtgaactagtgtatgttgaacaacctcccggttttgaggaccccaaaagacctaatcatgtgttcaagctttctaaagctctctatgggcttaagcaagctccacgcgcttggtatgaaaggcttagggatttcttgctttccaaagacttcaaaattgggaaggttgacactactctattcactaaaagaattggcaaagacttatttgtttgtcaaatctacgttgatgatactatttttggatctactaatgaattattttgtgaggagttcggaaaaatgatgtcaaaagaatttgaaatgtctatgataggagaattgagcttctttcttggccttcaaatcaaacaattgaaagatggaatttttataagtcaatcaaaatatttgaaggaaatgctcaagaagtttggtttagaaaatgctaagcctatcaagactccaatggcaacaaatggtcatctagacttagatgaaggaggtactatggttgatcaaaaactttatcgttcaataattggtagtttgctttatattaccgcatctaggcccgatgttatgtttagtgtatgcatgtgtgctcgatttcaagcttctcctagagaggttcacttgaaggccgctaaaagaattctaagatatttgaagtatactcccaatattggtctatgtggttttggtggtctccgcaagaaacttgcaggtcgctttaaatccaagcgccctcgtggaaatgatgatgactatacaccaaccactgattcagaggcccaatcctcagctgggggcactgaatccatggatgctgaagattttcctcatgttcatcccgattatcccattgatacccaaggctggacttatcccaagcggagattttctatggctgagtactgctctagacggactgtgaaccagtatactctgccatctgatacaaatatccagttttttcacactcagctgcagtttgatgttttttggggcaccctggtggataccaattttcataagcatcaggtgattgattggtccttcttgctcggtcaatctgtcatggagggtctgatccctaaatttgaaacatgtggactatatcagtttatggggcaacgcacagatttcaatgaaatggctgttaaacaatttctggctacctcagagattgacattgaagaagaatctatcacctggatgactggcttcaagcgctattctgcttcctttgctgactttgccgctgcaaacagtctgaactatggcaccatttctgctgggctggatctttatactgaagataattttgaggattttgtgcagttttatgagccagccaggcttggtatacccaggaggtttggagagacagcaggactcagacatcatcctgctgtaatcaacaagattgccagagtcaccattcttcccaagagtggtgataagagtaaaatacgggataagttctggaacatcatccaacacatcatgaatggtgaagtcatgaatattgttcttttcatgatgaggcagcttaatgatttgaaaatggacaaaaatcaaaatttagcatatgctccttacattatggctctcatcaaatccaagacaagatttgagggcccatgtgagattgttcacacaccattcatgcctttcaagaatgagatagggtttctcaccaggccactcactccctttccagatgatgaggaagaccctggctatgagggtggagcagctcctaatgttgagggacagcagatgcctcctcctccacctcctcctcagcctcagcactattgggagcctgctccaggatactttgatccttattttcacactatgcagcaagggcttgagactcatattgatactcgctttgagggcctgatgacacatgtggatcaccgcctcgatgacatgcagtctcgctttgacaataactgggatgcgctcaactctgaattttctgactttcgtgatcaaattcacactaatgtcactgatcccatcatgaccaggctgaataatatgcaacagagttttcaagataatatgggtgctctctccagtcaatttgacaatctttctacaaatgacaacatgcatgatataagtcagaggcagcagcagcttcagcaggattttagccagttctcctccctatttgacaccttcagcactcattattacaacatgcatccgccgccgagtgaccagtga

SEQ ID NO: 87189 - DNA, 270 bp, Zea mays
  Clone ID: MRT4577_179520C.1
aaccccaagctaaaaatttcaattaaaaaagctttttaataagggtaaaaaaattggacccaccaaaaattgaaaaatttacacactttaaatgataaaaaatttaatttttcaaatgcgaaagataaaaaaccccagcctttaaaaaaatgttttaatttattttaaaaaaattaaaatggcatccaaacttggtaatttttttcaaaaggaggtgggccctaaagttccaaaaagtttttacctgaatttccaaggtggggttttttt

SEQ ID NO: 87190 - DNA, 512 bp, Zea mays
  Clone ID: MRT4577_179521C.1
aaaaaggggaccgccaaactttaattacccttcttggttttggggggggggggggggggggtttaaaactaaaaagccctggcccgaacctgccattttgaccacttggccacgggactgattaaactaggatacccttttgggagcatacatgatcacacacacctccctgggtccctccctttgtttgaacgcctacatgcatgctggtggctccatttttatcattcagctcctccaaaggagaaaggagcatttgtttcgggcaagggacatttcccaaacagttacaaacgcttggttccccccccccccataggactacttggggaacttggactcttcgatggtgaccccctccctgggggggcccttgcccccggacttttccggggggttaaaacccccctttttccccatttgggtgaacccctggtgccccaagtttttcctgggagtttggccttcgcgggtggccccttggggggggggcttctggggctcaacccttt

SEQ ID NO: 87191 - DNA, 406 bp, Zea mays
  Clone ID: MRT4577_179522C.1
ttagaggaggaccaaaccggggggtcctgagcgttaatgagttcacaagagagggtacttgtgatggacatagaactttaaaactcgaaatacaaaaaaccccttatgcattatcgaaggtcagcagatcaccagatgatactaaacacgtggttcgaaatgacatgcaaaacaacacggactactcaataccaaacatagactcctatgatcaagctgccccactagggagttgcacagatggtgcacatgtaagcgtgaaccaagaacgaggtggtatctactgtgatatatgatcgaaccaagagactgacagtgtttcgcataactttggtcaaacatacaatacatacgataggcaacatgagccacatcattatgctgcaaatgtcattggttttagcga

SEQ ID NO: 87192 - DNA, 535 bp, Zea mays
  Clone ID: MRT4577_179523C.1
ccctaggcgaacgaagcgaatactttttttaaaacccttccagtcaagtatggaagaacactggagtgatttgcttacagcagcggtataacagggacgtggcgtctcagaggaatcagccgagcgcaagagcgatcgatgtccagctccggcaggtcttgaacaagggggacgaggacttggtcttttcgtcggaggcggaaactagatgtcgaggtgggcccgtgcttgccgttcctcgctggttgccagggccgcccaatcggcatctcgatctcgaccccttcccctttggggcctccgatgcgcagcggcatgcatcagcagcaggtatataggccagcacacgccgcctgcgcatcgaatcccacgcaaccgacccttttatcctgggagatcgagaattcaatgcagtgttagatttcgagggattaattgatgttaaggctattcacaatggaggtttcatggggtgtttcatgtattaattagcctgccacatcagctattttgatgacatgaaaaaaaaaaaaaa

SEQ ID NO: 87193 - DNA, 239 bp, Zea mays
  Clone ID: MRT4577_179524C.1
ggggcacccctctttgaaggaaaaggccaatctcatatttgagaatttgcttgttgtaaaggcctaacaactgttttcaagaagctgcattagtcttaaaagggtggggtttcccgacataattcccttgggtgaccctacaaccgtgaaatgccatgactaaaaaaaggacaaaccgatatattttgtatagatcatcaaccgcccccttaaccaccaagtgatagtgttttttcgga

SEQ ID NO: 87194 - DNA, 527 bp, Zea mays
  Clone ID: MRT4577_179525C.1
gggtacacggccccccccctcgagtttttttttttttttttttttttttttttttttttttttttttttttttttttttttctgtgtgttttttttttttgtgactttgggcaaaagaaggggggggaacaacggccagggaaaacgaacgcgagcctttttgcccaccccccgggggggaggaacccatgggttttttgtgttaacacgggacgcgggtggctccggatcaccgggggccctccaccaagggttgtttccggaccttgaataggccttcacccaggggaccaagagggccttgaagggggccaccccccccgggaaccaaaggacaccttcagaggggccggtccagggacaaccttgccctgggatgaaggcccgggatccagggaccacccagaccgaacttgttttcaggggccccccacggggggaaaaaaaccttgtgaatacacacggtccagatcccaaaagaggccaggggattgccccgctccccaccccgtacggggggccaccct

SEQ ID NO: 87195 - DNA, 517 bp, Zea mays
  unsure (1)..(517): unsure at all n locations
  Clone ID: MRT4577_179526C.1
tttcggaaagaaatggactaccttggagcacaatggtgttattttccctcccccatacaagcctcatggtgtcaaaatgctttacaatgggaaacctgtcgatctgacaccagaacaagaggaggttgcaacaatgtttgctgttatgaaagacacagactatgcggccaagccaacattcattgataactttttcactgattggagaaaagttcttggtaaaaatcatattattaagaactttgagctttgtgatttcacaccaatatatgaatggcacctcagagagaaggagagaatttagtagctttgcaccagatgccatttgcttctgtaaatcacacattatctgcttccgtgtgtagaatggtaataactcgtcccagctccatgtacttttgacagtgtgctcgacttgcgtggtaaaaacagagaaaagaacaatttgtgttcattctgagctacgagttcccttcatttgcactattcacactccaaaattactgaagganaaaaa

SEQ ID NO: 87196 - DNA, 271 bp, Zea mays
  unsure (1)..(271): unsure at all n locations
  Clone ID: MRT4577_179527C.1
tgcttgntcccgctcctggcccgcnnnggcttcgcccnnccgacccggctttcttgncccttcgcgctccctggtgtgntgggcctccttcccgnnncnntctccngcngnccccctccgnttgcgtngccgtcnttctttttcgttgcctccccgtgtgnnnnnttctccggcgccctgtccccnnnngtcccggtggtgtcngtccttgttnggtggggggtcgnngcccgccctcgctttgctttcccgnnntcgcngngccgtgccc

SEQ ID NO: 87197 - DNA, 2286 bp, Zea mays
  Clone ID: MRT4577_179528C.1
gagaattctttggatgatcaatatgtggataaggtgaagttaggagagccaggatacagggagcgttattatgctgataagtttaaagaagaggcagaatcaaaacccattgttcaagttcggagagatgttgtccagaaatacgtggaaggtctttgttgggttatgagatactactatcaaggtgtttgttcatggcagtggttttatccctatcattatgcgcctttcgcatctgatctaaaaggcttggctgaattggaaataaccttttttttgggtcaacctttcaagccatttgatcaactaatgggaaccctaccagctgcaagctccaatgcactgccaaaatactatggggatttgatgagtgatccagattcaccgttgaagtctttctacccaaaagattttgagatagacatgaatgggaaacgttttgcatggcagggtgttgcaaaattgccttttattgatgaaaggcgtctgcttgcggaaacaagaaaacttgaagatactttgacagaagaagagaaattcaggaataggactatgcttgacataatttacgttagagatactcatccattgatcactcagattatcttcctgtatcagaactattaccatctatcaagaacagacccttatgttattcccattgagcctgctgctagtggtggaatgaatggattcctatgtttatctgaaaggaactggtatagtgtcactgtcacttctccagttaaggggttcaatggcattgctcagaacagagttttgaatgctgcctatctcaatcctcagtatcacaaacacatcccagagcctccagcgggggtcatcatacctgcgaagatactgaagcctagtgatttcaaaccctttcctgtgttgtggcatcaagataatagtcgtcgacaagtaagagaaaggcctcaggtttctggagccctgtccggttctctcttaggagaagctgcacaccgactggtgaaaaactccctccagatcagatctggcaatgctgctgggttactttatatgccatacagaggtgcaccctatggccctggaaacagaccaaggcctgctgggccattggggtatgagaggggttttgtggataatccataccatgcacacatgtctagaagtgttccaaaccctcacgctcaattctttggtgattctcaagctaacagacagcccatgcggatactagaacggccagactcccgaagtcatgatgctggtatccgtgcatcaatgtctaaactgacaatccaagaagggccaaggcctcatcaaaataacaggatgcagaattccgggtactggcccaatcaaccacatcctactcactttactggacccccagcccagcggcctatgcagaacatcagttttacacctcagcgacctttccaaaccgggggatttccgcagcagagacctgtaaatggggctccaccaccattacctcccagtaactggattggtaagcaaccaagtggatgccacatgagtgtatcacctgcaaaactcgatccaaggacagctccagacagacagcccaagcaggataacccaagatctcaacaggataagaggcagcaggcgaccaaggtataccgtgtcaaaactcaagctactaatgttaatggtttgtcagagccaggtaaacaggaagaacctgaagggtaactgggttgctgcaaatccacacgccaagtttaatgtgcgtggagagaatacgctggctcttggtgatagcagcagagggtttccatgtatccctcccacaatttacctttcgatgttgaattgtttgttgtattacccggaaaggagtcggctaaattttaggtcaggggatttagacacagcttttgtttagttgataggacatggtatgggcattcactgcttgttgtaaagctgttagttggatagctgaaactgttttgtgctggctgactgctgcatattcaacatagacccgtgcggaggctggctcaactgccctgctcctgctctatctcatggaagttgggggcagatgtgcttgtggtcttcaaactgagcagtttgtgtctctgagaaaggaggaagcattccgaatttttcattgtaccgttgaaccaagttgagtctttaacactgaaaagaacatgttcctctcgagcttaacgagtgccataattaggacatggaataatatatatatttttcttttctgggatgcaaaaaaaaaaaaaaaaaaaaaagaaaaaaaaaactcga

SEQ ID NO: 87198 - DNA, 107 bp, Zea mays
  Clone ID: MRT4577_179529C.1
tgtctttctgcctaattgtgcgttaggttgatggtgttgtgctctgctgctttggcgttattcatgtgtattgtatttgcttggcttattgtgacttggtcttaggt

SEQ ID NO: 87199 - DNA, 301 bp, Zea mays
  Clone ID: MRT4577_17952C.1
gaagaaactatttttttttttaaaaccaaataaacaatgccgcttggttaacatatggctcttacacgattcttgtattgcaataaggcgaaatagctagaaggttccaaatacaatagataaaagggcacaggctaacaggggttacacagttcacacaataacagctacgtccacaaacaaaaattgtaatgatgaaaactgggtattgctaatttttgggcaggatcgcatcataagtattatgtattagccttggccaccttggttcctgatgggtgcatcttcttcatactctgga

SEQ ID NO: 87200 - DNA, 450 bp, Zea mays
  Clone ID: MRT4577_179530C.1
gcctcgccagatactaggaggcggccgttctactagccgggtgtgacaagctccgctagagaaaagtgatcatactggagaccgatctcaatgatccaaaacaccaaagggagctgcttaggattatataaaagttgacaccaacttcttgagctattcattacaggacgcacagaaatatccattttttgcaggggtgggtgcatactcgaatattgcaccccaaccgtacgccttctagaccttgtctagtagcatactatggatacacaagacattggatctataccatctgccaggagctgttctagataataaagcgcaggcatgcatttgtacgacctattgggaagatgtgggttctttcaaatcattatttgatgcaaacttgggcctcactgatcttccttgcaagtatgatttttaggagaccataatgcttttgttcac

SEQ ID NO: 87201 - DNA, 329 bp, Zea mays
  Clone ID: MRT4577_179531C.1
gagacacgtgtgcggacgcgtttgcaggtgatagccgtaaaagctgcacatactgtggttgagccttctgtaatgcggttgctgatgatgcacatgaatgcttacacggccagggtcatgaaggcgtacaactatttgaggagctatatctgtgacctgacaagtgcaatcgagcccactacgtctaagacgaagactctgtaagtaataatactcatggattacaaactgtctggagcttgacaacgtggagaatctgacggtgttgcagagatagaaacactgagtatcttgacggacccattcggaagtacttctgatactgtgac

SEQ ID NO: 87202 - DNA, 231 bp, Zea mays
  Clone ID: MRT4577_179532C.1
gggggttgttacaaacacccccaaaaaaccccacaccggaagaaaaacccaaaagcaaccccaaaagagggcaccaccaacgaagggcagcaggaagaacgcagacgggaaagccaaagcaagacggcagaacggcacccacagacgcaacggaacgagggagccagccaaaggcgccaccagccgggagaacggcaaccaaccgccgccgagacaagaaagcaacagggc

SEQ ID NO: 87203 - DNA, 459 bp, Zea mays
  Clone ID: MRT4577_179533C.1
gagcttcccccaaacgattagatgacaatgagagaatcaccaacctctcagcacttgtattatattcctccacctctacttctgaactaggatcaccaaccaagtaaggaaccaagcacagcagcgagctcaaacgatgaatcgctctgtaaatttgtaatccgtcatgccaagaagctggaaaaaaaaaaggaagcttactccttcgcggtctagaagccggctttgcggccccagaggccgactcctgcggcaggggaggggtcgagggagtggaaacggagccggtggcagaggcagcctgcgactcctcggccgcggagagcttgcggaggcgttcctgaagaccgcggacgcggtcctcggtgcggcggagcttgcgccagcgccaggcgaggtaggcgccgaggccgccgtagacgaggatgtaggagccccacacgtacgggtaggtctgcg

SEQ ID NO: 87204 - DNA, 173 bp, Zea mays
  Clone ID: MRT4577_179534C.1
ccactcgtccgcgcaacggccgcctttttttagatccgtgtaatcacccgcttaggtggggatttttgccacagtggaggctatattttcgacactttttattgcaaaacgctatcgaaactcaaacgtcaaatcagcggtgtgaaaaccttttgaaaatgaagatccagcag

SEQ ID NO: 87205 - DNA, 265 bp, Zea mays
  Clone ID: MRT4577_179535C.1
ctgcggacatcagaattcacttggtcgctcggccgcatgcgagctgtaccagaggccgacgccaccagcgagcatcacgaagactttcccccgtatgagctcaggctgatctaccagcccagacagcgctatggaggtcgtagccttaccgaatacaacctcgaagcatggtctggagatcaccatgaagttgatagttactgccgaggctctgctgatcaccaacagaccatgttacagcgcgaggacctttagattgacctat

SEQ ID NO: 87206 - DNA, 378 bp, Zea mays
  Clone ID: MRT4577_179536C.1
acccttcccgcgatgacccggcacaccagcatcgcccttggagtggtttcctcatccagtccggcgccagcctccgcagcgggcacggcgtcgtgcgcgcggccgctcgtggccatggtcagcaccccgccgctgctgaagccgtcgcggatgatgccgcacgctgcgcaggtccccgcggcgtcgcagaggtgcgtggcgccgttgaggccgagcgagcaggccagggtggcgcagtggaaccggagcagctcgttgccgtcggcggagcagcgcgggtgcctgatgctgttggccgccgctaccgccagctgctcggcgcccgccctggccttgacagcgtcgcggtactcctcgaagcgggccagcgttctgggc

SEQ ID NO: 87207 - DNA, 291 bp, Zea mays
  unsure (1)..(291): unsure at all n locations
  Clone ID: MRT4577_179537C.1
aaaaaagagaaaactggaggggctcatcccgttcatctacaaggccatcaaggagcggcgggcccggagctacagctactactactcgcggtgcatttccaccggctcgtcgcgcggccggctcggggcccgcgaggaggacagaaaaaaacctttggagnagatgcagagggagnccgncgacggtggcaaggcagccgcccccggcggcggcggagcgggagacccgcatgcgcaccgccgccaccgntccctcgacgagctggcgggggaggagggcgcctcgcccgg

SEQ ID NO: 87208 - DNA, 431 bp, Zea mays
  Clone ID: MRT4577_179538C.1
ctcaaccgcaagcaaccccaggggggccccggggaacttaactggggggggggggggggattacattaacattggcacaggggggggggcccaagtaaaatttaaaagggggggggcctatgggggattaacttttgtttttggggcgggccaaaaaaagcgggaaggggcctagcaaaaacccaaaaacttttgaggggcgaaattatgggtggggggacccagctgtttggccttgcaattaaggggggctcccagggtcattcttgaaattggtgggttcatcgagggccattgcactggcatttgcaggagcttgtttggagaaaccaaagttttctgccaggggggccagccctttatgttaaaatgcaaccctgccaccatcctggtcttgggggggtttttaacaaaattttttcttgtttttt

SEQ ID NO: 87209 - DNA, 102 bp, Zea mays
  Clone ID: MRT4577_179539C.1
aggcgtgatgtgcccggctatcgacatcgatctcccgacgacgtagtccccgagtccaggtgtggtatctcaagcgtgttcgagatgattgccaacgaccag

SEQ ID NO: 87210 - DNA, 4683 bp, Zea mays
  Clone ID: MRT4577_17953C.1
atggctagtaacaacaatgtgcacattgggaagccaccgcactttgatggaaacaattatgattattggaaaataagaatgtcaatgcatcttagagcaatgggtggaaaaatttggccaattgttagagatggattcgttgtattgaaggaagatgaaccatccgttagtgataatgagaatatcctcacaaatgatcaagccatgaatgtcttttatgatgctcttgatataaatgagttcaatcgtatcaagaatctcacaaccgctcatgagatttgggtaaaactaatggaaattcatgaaggaactacaattgtgaagagtgccaaactatatgtgtgcaaagggaagtttgagcaatttattatgaaagaagatgagagtgtatccgatatgttcaatcgattgaatgagattgtaaatgaactcaaaggacttggttttaatgtaccagatgtggatttcacacacaagttccttagatcacttccggagaaatatgagactattgtgacaatgctagtaaggagtgatctatctacaacctctccaaccgaagtattgggagaaattctcactcaagatatatttaagaagtcacaagccgatgctttaagtttggcaaagaaggtgaaaaatgaatctattgctctcaaagccaaggcctcaaaggcaattgaaaaggaagatagcaatgatgaagaaaatgaaagcgagagtgatggtgacatggctttatttgtaaggaaattcaataaattcatgaagatgaaaagaggtcaacctagaagaggtcaaacatctagaagaaatgctttcaatgatagaaaatgttttgagtgtggggaacccggtcacattgccatgaattgtccaagcaagaagaagaagggcaaagatgaaagtgacaagaagaaaaagaaatactataacaagaagaaagatggcaaagcctacttagttgaatgggactcggatgatagctcggatgatgatgatgatgacacctcatccaagcttaatgccggaattgccatcaaggaagctccctcactcttctcgtccccccattgtctcatggcaaagggagatgctaaggccttgaaggaattgtataaaaacctccaagtgtcttttgaggagctcaagacctctcacaatgacctcaaagaaaattgtgagaagcttgcggatgctcaaaaatcatctattgtgcatgaagttgaggtggtcactaaggatgttggagtcacttgtgacttacttgatagtcttacaagtgaaccactacctactaactctatttgtgataaatgcaaaatttctctcaatgataatattgctcttgatgaatcaaaaattattgttgagaatgaagtgttagtggatagaataagtactctaactcatgacctagaaaaggcatatggtggtaagaagaatttggatttcatattgggaagtcaacgatgctctcttaaccgtgaaggtcttggatatgttcccaagaaaggaaagaatgcttttgtaaagcaaaagacattgtttgtgaaagaatgtgacaaagtaaactacaaggcgggagggaatcattgggtgttggatagtggatgtactcaatacatgaccggggatatgaagatgtttacccaaatgagtgatgaagattgctcaaattatgatagtatcacatttggagataatcgtaaaggaaaggttaaaggattttgttgcaatttcacggttgaagatgttattatctctagtgttgatggtagcaatcttaaatttaaaggttttagacatgaaaatctttatcttgttgatttctcatctaatgaggcaaagctcacaacttgcttattttcaaaagcttcactaggttggttatggcatagaagacttggtcatgttgggatgaagcaactcaatcggttaaccaagcatgacttagttcgaggcttaaaagatgtgaagtttgaaaagaacaaattgtgtagctcttgtcaagccggtaagcaagtggcaaatactcatccaaataaaagtcaaatgtccactcatcgacctttggaattacttcacatggatttatttgggcccacatcttttgtaagtattggtggtaattcttattgtcttgtgattgtggatgactattcaagatttacttgggtttattttctacgagacaaatccaatgtgtttgaaacattcaagtcatttgctatattggctcaaaatcaatttgatttcgacatcaaaaaggttagaagtgataatgggtcggaattcaaaaatgcaagaattgatcaatattgtgatgacaagggtatcaaacatgaattctcttccaaatataccccgaaacaaaacggtattgttgaaagaaagaatagaactcttattgatatgacaaggtctatgttagcggaatataatatatcggattcttattgggccgaggcaataaataccgcttgtcattcatcaaatagactatattgtcacaagctcttgaagaaaactccatatgaattgctcattggtagaaagccaaatatctcatattttagggtattcggttgcaaatgttatattttaagaaagggaagccgactttctaaatttgagaagaaatgtgatgagggttttcttcttggatattcatcaaatagtaaggcttatagagtcttcaacaaaactcatggtattattgaggaagcatatgatgttgaattcgatgaaacaaatgggtctcaagatgagagtgaaaatctcgatgatgttgggggaactcaattgataaatgcaatgaaaacaatggccattggtgaaataaaaccaaaagaagatgatgatgaaaatagtgtggttgtcattccctcatcttcaactataaatgaggaagatcaccaaagccaacaactcaatgaaaccattgatactcatgatcaaggtacttcaagacctccaattcctcctaatgcttcaacaagcaattatcaaacggtatcaagaattcatcattccattgtgaaggatcacccggttgatcaaattgtgggtgatattagtaagggtgttcaaactcgctctcgcatagcttcgttttgtgaacatttctcttttgtatcttgtgtggaacctaaccgtgtagatgaagctctacttgatgttgattgggtgaatgcaatgcatgaagaattaaataacttcgctcgaaatgaagtttgggagcttgttgagagaccaaagaaccacaatgttattggtacaaaatgggtatttcgcaacaagcacaatgaagatggtgtggtagtaagaaacaaggcaagattagttgcacaaggatatactcaaattgaaggattggattttggggagacatttgctcccgtagcaagattagaagcaatccggattctacttgcttatgcttgtgcacacaatatcaagctctaccaaatggatgtaaagagcgccttcctaaatggtaagattagtgaactagtgtatgttgaacaacctcccggttttgaggaccccaaaagacctaaccatgtgttcaagctttctaaagctctctatgggcttaagcaagctcctcgcgcttggtatgaaaggcttagggatttcttgttttccaaagacttcaaaattgggaaggttgacactactctattcactaaaagaattggcaaagatttatttgtttgtcaaatctatgttgatgatattatttttggatctactaatgaattattttgtgaggagttcggaaaaatgatgtcaaaagaatttgaaatgtctatgataggagaattgagcttctttcttggccttcaaatcaaacaattgaaagatggaatttttataagtcaatcaaaatatttgaaggacatgctcaagaagtttggtttagaaaatgctaagcctatcaagactccaatggcaacaaatggtcatctagacttagatgaaggaggtactatggttgatcaaaaactttatcgttcaataattggtagtttgctttatattaccgcatctaggcccgatgttatgtttagtgtatgcatgtgtgctcgatttcaagcttctcctagagagattcacttgaaggccgctaaaagaattctaagatatttgaagtatactcccaatattggtctatggtatcccaaaggtgctcaatttgaattaattggatattcggattcggactatgcgggatgcaaagttgatagaaaaagcacctccgggtgttgtcaatttcttggtagatctattgtttcatggtcttctaagaaacaaaattcggttgctctatctaccgccgaggcggaatatatatcggccggaaattgttgcgctcaactattatggatgaaacaaaccttattggactatggaattattttcaagaatgtgcctcttatgtgtgataatgagagtgcggtaaaattagctaccaatccggtccaacactcaagaaccaagcatattgatatacgacatcactttttaagggatcatgttggcaagggagacatctctatttattccattggcaccgatgatcaattagcagacatttttacaaaacctttggatgaaacaagattttgttctctaagaagtgaaatgaatgtgatcgatatctcaaatgtggcttga

SEQ ID NO: 87211 - DNA, 221 bp, Zea mays
  Clone ID: MRT4577_179540C.1
aataaatccccggccccaaagttaaggcggagttcaagcaatttcggaacgggaagctccaaccctccaaccaccgggttgaccgccggaaccgcaacttcaacattcaaccccaaggccagccacaaggaggaaaccgccaaggtggccttgcggaaaaccccccccaaggactgcaacaagttcaaggcggacaggaacccccccggcttctggctcac

SEQ ID NO: 87212 - DNA, 661 bp, Zea mays
  Clone ID: MRT4577_179541C.1
actccgccgccgccgggtaccaccccctcttccagatgtcgaagcgagggcgcggaggttctgctggaaacaagttccggatgtcgctgggtctgccggtggcagccactgtcaactgtgctgacaacactggtgccaagaacctgtacatcatctccgtcaagggaatcaaggggcgcctcaacaggcttccttccgcctgtgttggtgacatggttatggccactgtcaagaagggaaagcctgacctgaggaagaaggtcatgccggctgtcatcgtcaggcagcgcaagccatggcgccgaaaggacggtgtcttcatgtactttgaagacaatgctggagtcattgtgaacccaaagggagagatgaaaggttctgccatcactggaccgatcgggaaggagtgcgccgacctgtggcccaggattgccagcgccgcgaatgccatcgtctgatctgatcgccggagcagctagatgatcaaagctttgatagcatgtccctcttttcttctagtttacttgtggcccttgaggatgagtttcctggattatgtaatgctgctggattattgtctgttaggtttaagattttgcactgtggtttggctgctaagatttgttcagtttgaacctgaaagagcttttgatcggattgc

SEQ ID NO: 87213 - DNA, 569 bp, Zea mays
  Clone ID: MRT4577_179542C.1
cacagacgagggttctatgaggggttccatacagcgtattattagaagcaagggttagcctaaggatgagcttgggacaggacaggttacatgagttaggtctttgggaaatgggagaggatgtggctctgggtatggactgttgaagaggataatctataccaaagagttgttctattaaatgctgtcttcttgggcaagaacttgtgggaccaccttccggatgcatttcctaataaatctagtcatgaacttggtagctactatgttaacgtttatatgctcaggaaaatggctaagaaaaacacgtatgacatgatggctgaggacagtgatgatgataaactgcatggtgaacctctagctgaacctgtggaaggggatcctgcaggtgattcctctacacatgaacattctgataaccattctgtgaccatggatgatgaccatgatgagttcgaaggagcacaggttggtgaatatttgggtgaaaagtcaggatacaatgcagtctactgcacacatctaccaaatcatatgcctgctgatttaactgcggagaacactgc

SEQ ID NO: 87214 - DNA, 557 bp, Zea mays
  Clone ID: MRT4577_179543C.1
gacccaacaactagcaactccaatctgcttataaaaaatactgtatctgcaatgatatagcagcacaaactggcaaaccactaactgaatgctggcaagttatatcagcaagcgcaaggctaggcatcgacttacaagggacaatagcaggtagattgtaacacaagatggtaagaaacataacaatgggcaaactctcctaatgaacaacaccaaatctcaggtattcagcggcggcggcggcagcagcagacagttgttagctggagtctatacccgaagaaattaagcagccgcaacatgcaattgttaaccggagcctatacccacatcttctttgtggcttccatccgctcaagcaagccctggatctcggtctgcatccgcagcttcatcttgtggtagtcgtagtgcgagttctcgagcaccttcagctcttcgactttcttcctcctcttctcctccgtctcctggaagcacagcttcgcgaccttcgcggcgtactcctcctccagtttatgggtcttggcgcccaccatctgccggtagctgtctac

SEQ ID NO: 87215 - DNA, 679 bp, Zea mays
  Clone ID: MRT4577_179544C.1
gccggccgtttcaatcaccaggtctccggcgaagtctcctcccgaccgccctccgcatctcgtcgacgacgaaaggaaaacctcacaaatcctctggatgcggggtctagccgcctccgccctgtagcaccagtcggatcgaagaagcacaagcgcttcgggtcggcgcgcacctctccctcatggtggcggcgcgaggggcccgatctgggggctcggttgcggcggcggcgctggtctcggttcttctcgtgggttgcctcgtcgcgggcggccagggggcggagatccgtcgccagaaaaacgtgcaggctgcgctccgggccaagtgggctggcacgccgctgctgctcgaagccagtgaattgctttcgacagaatggaaggatctattttgggattttattgacctctggaaggatctagagaaaggctctgaatgtttaacagcaaaatgctgtgcccagaagattgttgaggatgcccacacactactcaatgaaccgctctcttcaatttttgagttttctcttacccttcgatcagcatcaccaaaattagtgctttaccggcaacttgcaaaggagtcattatcttcgtttcctattgatgattcaccagagaacatttctggtcatggcactggaaaaacttttgatggggctgtggatcctggctc

SEQ ID NO: 87216 - DNA, 263 bp, Zea mays
  Clone ID: MRT4577_179545C.1
aatgccaaggctaagtgagtgacacaggcatttgtgcagacataccattttcagttctgctgtcacttggaagttcaggctcagcatgaatttttggcaggtagctctaatacctggagttttctttgttttttttcttttttttagttgaagtttatgagggaaataccagtgttcagttttgaactataatagtttgtatattcaacatttgaagtatattctattttgttgtactcttgtttcaaagtgtattcaagtag

SEQ ID NO: 87217 - DNA, 525 bp, Zea mays
  Clone ID: MRT4577_179546C.1
tccacatagatgtttcgcccatgctccctgttcttcaactacggcggtaccttaattataccaccactgtcaacacgacccaaacgtcctccccgctcgatgtatttaccggactgcggggatctgggatgcatcggactgctatgcataagtacacagcggacagcttgacacccttacctaggcaacgagatgaccttctacgaatgatacatcctgacacacaaagtgacctgggaagtattagggtcacatgcctgcgatcgggatagtgtatccaatactgccatgaatagtatcttgactgagaggatgaagacgccaaatcatgatccaactgacctgtccactcttcctgctggacagagctatgctctagaaaagttcgataagaattctgacaagatactagaaggagaagttctattgcctgtgtcccatctaattgaaagatagtcaacacttgctgaacgtttcacaatggaccattgcagaacagaagatgcacacgcgatttgtggatta

SEQ ID NO: 87218 - DNA, 772 bp, Zea mays
  Clone ID: MRT4577_179547C.1
ctcgggcatcacttcgttcagttgatgggacaggtcacttcaaggagattttgcatgagataaggtgaattttttgtgcccagttttaggaactcttgacacacaaaaagggaaaaacgttacacactaccacttctttcagaaagtattggactagagattttcgtaacaccccctaggattgagaaatctgcacctctctttcaaattataagacatttctctcttttctagatacattgttttaaatatgtttttagaaatattgtatagctatgttatagaaaaaatctacgtttgtagaaaaatccaaaatgtcttataatttgaaaagcatggactatttgcttggttgtcaattagtaagtaacagttttctaaaatattgtaagcagcttgctagctcattgcttggtgcttaagtagtaagttagtgcttgagttctatgtgagttcctttatatttagattaagagtgattcacgtactactgaacttaaatactgaatatttacttaaaggagtcaacaatgaccatgaactatttgttctttctagaatcacacctttcgctacctaaaacaagtctaccatatgagatacaaacaacacccatgtttgcatgtactaaaatggttgccggcagcagctgcacctacggttaggctagctgattgctagcagcattagctgcagcatagtcactgaaataaactgaaatgccacattggaacctacggctagcaagcaccgacagcaacggaattcgagc

SEQ ID NO: 87219 - DNA, 780 bp, Zea mays
  Clone ID: MRT4577_179548C.1
gcacgagcttccttgtctctgtctcaacacggcgccgccgcttctgccgccgggagccgagcccaagcctaagcgaaagccatggcgattggttctctgatcgcctctactttcgccagatctagccatgccctccccgctgccgccgcttcggccatctctcaggctcccagatcccagcacaccgcatctcctctactctccggccttggagcagcggctcgtgctttcagctcaagggctctatggaagggagcattcgttgacgctttcctgtctagaattaagaagaacagagaaaatatgaatggcaagaagatttggtctcgtagatcctctattttgccggaatttgttggttcctctgtgctcatttacaatgggaaaactcatgtccggtgcaagatcactgaagggaaggttggccataaatttggagagtttgcttttacacggagacgaaggccccatcgaacaatgacaggaaagggaaatcaaggaaaggcaagaaagtaaaaggagaaatgtgcatgaaaggtggttttaaggatagcatgatgaggcagtagttgacgaacaagaacatgaataaccagaaattatgatctggactgctttactgctttttcttagaccaataattgcaggagaatgttagttcatcttacttaaagattcgtccgtgtactttgttcctatctacttcctgcttacttttggtgtcatgagtgaacattaaactgatcgtaagttatgctttaaaaaaaaaaaaaaaaaaaa

SEQ ID NO: 87220 - DNA, 462 bp, Zea mays
  Clone ID: MRT4577_179549C.1
gtccggaccgactcgaccaccaacgacgccgtcaacatgccgagccacaagtctttccgaaccaagcagaagcttgccaaggcccagaagcagaaccgccctgtgcctcaatggattcgcctccgaactggcaacaccatccgctacaacgctaagcgaaggcattggcgcaagacccgcatcggtatctaagctgatagtccagctgttacctgcccccaaagcccagcaaccgatttttctctctcttgggcatggtatcgcgatgattgacgtgaacggaaaaggggaggaacgatattgttgtggcgtaaactgaactaagaggccgtgtctgcactgcactgcgcgtgcgcacgggggcgatgggccggttgcctggtttatcgattattgccggttactgcatgtcacggacggtcataggggaaaaaaaaaggaatgcaaagactttgatgcccc

SEQ ID NO: 87221 - DNA, 561 bp, Zea mays
  Clone ID: MRT4577_17954C.1
atgcctccacttcatagcggtgatagctcatcgatggcaccgccgctggtggggcgcggtgggggcgccacctccagtgcgatggtcaggtcgagtgccgctttaccttcaagtagggctagccggtctggtggggcaggctgctcaaattatgaattgggcttatcaaaaacttcttggcgcagagtgaaagaaatggagccactgggctattttcctattgggtctagccgggctgcgggagcagagaccactcctaagccggaaggcgaagcccttgtttttgaaagcctttttgctgctagccttcggctaccttgccatggcttattagttgatgtgctcgatagatccaagccaatattgagccctacatatgtggtggatctgggtgatcgcttgagggatactttcactgtagagatcgaaaaagaggcagaggagcttgttggtctagttacagagcatgaggttgggaggagtgtggaattgctcggaggcaatatgcgtctgaatcgtgtgttcagccaaatggggctcaactatgatgaatttttataa

SEQ ID NO: 87222 - DNA, 668 bp, Zea mays
  Clone ID: MRT4577_179550C.1
agtttagcagctctcgatttgatagatatatacagatgcactgtctacgtgcatatatatgcatatgtccaaagagcaaatttacacagtctacgtgcatgctctgccttcctggcagggcggccatcaccttcccgatccaagatgaaaaggagagagaaatccaacggaggtaaaaccaaaaaaaaaaaaatcgaaagcaaaataccttgttcgtttacaatatatgtacaactgctagcttggcgaagtatagtaaactaccgcgcgaacagaacagaacaaaccatgcatgcatgcgcggcgcggaggtacgggggcacagcacgcatggatctccctgggccctgggctggctagtagttctccggtatgatggagagccgcgggctccacgcgcctcggcacgggctcatcgtgacgccgccgccgtcgagttcgatgctgctgccgacctccgcctccaccccggcgccgcgctgccgctccagcctcgccaccagctgcgcgatgtccttcctcttcatcacgatcctcaccagcaccccgccgtcctcgccggggccggcggcggccggcgcctccacgcggcactcgggccacgcctcccgctcccgctcccagccgctgtcgccgtcgccgtcctccggcgcgtccacgaccggcac

SEQ ID NO: 87223 - DNA, 258 bp, Zea mays
  unsure (1)..(258): unsure at all n locations
  Clone ID: MRT4577_179551C.1
agagtgcactagctgctctatanctgtaggttatgcagactaggcgctagcagcagactacacagttcaaaaactacctgagaaactggagttccaacaaggagctgccataggcattcaatatattactgtctctcgagatctgatccacagtgcatgtgtgaaaactggccagagtgatctagtgcatagggcaagtggacagctggattatcagcatgccacattgccagagcctatggcctaaagaatttgggc

SEQ ID NO: 87224 - DNA, 559 bp, Zea mays
  Clone ID: MRT4577_179552C.1
ctatgactagaccagacaagggtatgtgaaaagctaacacttcaaggctacaaaatgcatgatgctatgcataggattgcatgttacacattcaatatggttgaagatctaacaattatacaatacttataatttaatttacgtaaggtatatctaaaaacacaaaacaataggagatagcaactattaaagcaaaatctaccaaatattaatacattgaatataagaaaaggagcataattgaattaaaataaactagcttcaattgactctgtattgtatttactgcaataacatctatattttactcggttacctgattaatatggctaataattgcttacattcaaccaagtgcgatcaatcaatattgctagttatataaaaaaggaaaaattagtaccattcaatcacatggctggtcggagcactatgtatcttatatgtacaattacagcctatagccgagtctacacatacacactactgctaacgcgttttacaatgttacaactgcaaaaatgctgccattcaacaaattaatcttttataaacacat

SEQ ID NO: 87225 - DNA, 827 bp, Zea mays
  unsure (1)..(827): unsure at all n locations
  Clone ID: MRT4577_179553C.1
atcaaaatctctctcgggcgctcgctcgctctcctggctccagctagactgtcctgctctgcttcggtgctactcagtgtgcagtgtgcacaggcagccatgcttcagcagagtccggctcggctgtcggctgcgagtcctgctcctgcaggaatggacaggcctgcgcaggcgcccacgcagctgccgccggggttccggttccaccctaccgacgaggagctggtcgtgctgtacctccgccggaaggccctggctcgcccgctgccggccgccgtcatccccgtcgtccacgacgtcgccaggctcgatccgtgggacgtcactggggcgtactacgccgtgcgcgtgatttgcggatcgatccagagtttccctgattgcttggtgtaactaaaccgcgcaggggcgagcgaaggggagggctacttcttcagcctgcggcgagcgccggcgaccggccgcaggaggagggctgggagcgggtactggaaggccacggggaaggagaagccggtgttcctgcagtgcggcggcgagcagaggcagctgctcgtgggcgtcaagacggcgctcgccttccaccgccgtgagccgccgccgccgtcgtcgcggacaggctgggtcatgcatgagtaccggctcgccgtgccccgcggcgtggccgaccagaggaagaagaatgcgagacatggctacgttgctgaaccgggagaagtgggtcgtgtgccgggtcttcctgaaagacaggncgaaccgggacgccggcagcaaaactttgcgacacggcgcctccgctccgcggcggcggcggcagcagcagcccg

SEQ ID NO: 87226 - DNA, 725 bp, Zea mays
  Clone ID: MRT4577_179554C.1
aggccagtgttccaagctgccggtcgggtacgtgcagctgccggtgggcgtcgccgggccgttgttgctcgacggccggaggttctacctgcccatggccaccaccgagggctgcctcgtcgccagcaccaaccgaggctgcaaggccatcgccgagtcgggcggcgccaccagcgtcgtgctgcgggacgcgatgacgcgcgcccccgtcgcccgcttccccaccgcgcgccgcgcagccgagctcaaggcattcctggaggaccctgctaattttgacacgctttccgtcgtcttcaacaggtcgagcaggttcgcgaggctgcagggggtgcagtgcgcgatggcggggaggaacctgtacatgagattcagctgcagcacaggggacgccatggggatgaacatggtctcaaagggcgtgcagaacgtgctggattttcttcaggatgacttccatgacatggatgtcattagcatatctggttcatcttgctctctcggtttttggcaacttctgctccgacaagaagccgtccgccgtgaactggatcgaggggcgcgggaagtccgtggtgtgcgaggccgtgatcggggaggaagtggtgaagaaggtcctgaagaccgacgtgcaatcgctggtcgagctgaacacgatcaagaacctcgccggctcggccgtcgctcgcgcgctgagggggttcaacgcccacgcgagcaacatc

SEQ ID NO: 87227 - DNA, 355 bp, Zea mays
  Clone ID: MRT4577_179555C.1
gccacgcgtccgtcgtacgctcccggcatggtcccctattccccggctcgcgggtcgacgcccacgcggcttcgattgatcttatttcagtgctggtggcatgcggaccgatcgtgtccttgctaggccggccacatcaggcatggacgactgagacctggacttctgcaacccggtcacgtacctgtgccctggactcgtcactgaccctgccagcagctgctacatggacagatacttcaacgagatcctcaaagacactgagcagcacgcactgctagcacacgcacagctggcatcctgcgttgcacgagctatcgcacacactcacctgcgtccacgtggacaccaagat

SEQ ID NO: 87228 - DNA, 1423 bp, Zea mays
  Clone ID: MRT4577_179556C.1
cggcggcccctcctctttttcgctcgcgtgccggcggccccaccacgtcgagcaggcccgcggggctccgcgcgccgccgtccgcgataaaaactagaaagaacatttcaagtagaaacatcagtgcttcttttacacaagcaacaaggccagtgcttttacaaaaaacaaaaaaaaaagcatggaatatttgactgtactattaaacacctggttacatcagagtaatcatgttagattacaagaaacagtatttcaaggcggcgagttgctgccacttgcccactactctgtttactcaagttagtagctttggtgttccatgaaaatgtcttcggtgactctttctgaacctggtcaaaaccgatcccatcagcataattttgtgcatcgaatgactgtacaactggagacgcaagatcctacagcaacgtattctgtacatacattcctgcaactttcccaagctaaccagcatctccgcctcctgaaaccaggcaacttctgctccgacaagaagccgtccgccgtgaactggatcgaggggcgcgggaagtccgtggtgtgcgaggccgtgatcggggaggaagtggtgaagaaggtcctgaagaccgacgtgcaatcgctggtcgagctgaacacgatcaagaacctcgccggctcggccgtcgccggcgcgctgggggggttcaacgcccacgcgagcaacatcgttacagccatcttcatcgccaccggccaggaccccgcgcagaacgtggagagctcccactgcatcacgatgctggagcccgtcaacgcagggagagatctccacatttccgtcaccatgccttctatcgaggtgggcacagtcgggggcgggactcagctggcgtcgcagtccgcctgcctggacctcctgggcgtgaggggcgcgagccgggaccgtcccgggtcgaacgcgaggctgctggccaccgtggtcgccggcggggtcctcgccggcgagctctccctgctgtcggcgctcgccgcggggcagctcgtgaagagccacatgaagtacaacaggtcgagcaaggacgtctcgtccacgacggccaccgagaagacgcgtcaacgtgaagtggacgtgtgaacagcagggattttagtttttgttcttccttttggtgtgttcataagaaagagagctctcgccgtctaggcgcagaaagaagtgttgtttgcaggtcgtggttggtagattagatctctctctctctctctcctttgttgttctttcggcttggttgatctctctccttccctctttgcgtcaggaagcagcagcttgcaaacctggtctcagcactgtaattatttcttctgttctaccacatcttttgtttgttgttcaaaaaaaaaaaaaaaaaaaaaaaataaaataatattgacaacg

SEQ ID NO: 87229 - DNA, 563 bp, Zea mays
  Clone ID: MRT4577_179557C.1
aacgatcagaccctctgtggtggattggcgcgtgcatcgcatactgcctggtgaaccacctactccgggctttgccgaacacaaatgggcctggatactgacctacatggggttcaaaagtaatgatgtgcttatgaatgtcgacgctagaggattctcttgggctgtgaaaaacatttattaccaacctcggtcacctatatatacttgactactgctgctacaatccttgctgtttaaaaataaaaaaagctatgtgcgctcagcacaatgttcaccttgttactgtgcctaccaccaaaactcttggataagtgggctcagctttgcaagatcccctctaaaggccaagttacgaaaggagtgggctgctcctaagttttcttgatcgactaccgctaagaatttgaaggccttaacatatatcatgagctcttaaaatcttactacatacaggttgttggtatactctaagccgtgagccacactcacattttgaacctttttacaaacatgaccttggtccttgcgctgtagttggagcacaagaacatttttcaagt

SEQ ID NO: 87230 - DNA, 834 bp, Zea mays
  Clone ID: MRT4577_179558C.1
gtataatgtaaatggtaatctgtctcattctgtagttacaaatgactcagactcagatgaagttaatgggatagtcaatggctgcaacggtgtgggaaaagaaatagatgaagttagcgctgctattggacaggactggaccaggaaaagcatggataagtgcactattgcgtacacaaagaaggaactaaggattagtattgagcgtggagtgaaacccaaaatcagatggttatcaagaggcccgctaggtgaagcagctgtctcaaatggctttcttgtcacaaagatacagatgaagaagtgtaaactcactggagaaataacagtgtttgaggaattctcaatcaccataccgccaaaatctgctttgctatttccgtgccagcgggcgatcagcattgatgcttcaggttgtcaggtacagcatttgattgtgttggatggcacttgggcaaaagcacagaggatgtaccatgagaatccatggctgcaacttctgccacacgtgaagctggagtcagatagggttagcttgtatagtgaggtgaggcatgagccaaaggctgggtgcttgtctaccattgagagtatagttgttgccatgaggaaactgggagaggattcgaagggactggatgatctcttggatgtttttgagtcgatgattgctgatcagcgacgatgcaaggatgagaatgtgaagcaaaagctcaactcctaatcataataaggtcttatcatcatcagtctgttacctaacttcatgatgacctctggatgcatttttcagtccagatgacatatatatgttaaaacatactcagatttttt

SEQ ID NO: 87231 - DNA, 104 bp, Zea mays
  Clone ID: MRT4577_179559C.1
cccaaactgacactcgtctgcaatttattttccagactgacacgaactacccaacaccagacacgagaagctgcagtcctcagaaagcatagggctacaaacca

SEQ ID NO: 87232 - DNA, 404 bp, Zea mays
  Clone ID: MRT4577_17955C.1
atatcaagggtgcccaccttttatttatgacataattgacacaggaagtattaccacaacaaactaagggggggttgggtgtaaaaagactaatttttaaggccaaggaaccaaacagcacctaaacccgtgaaactaaactacacaagcacagacagaggaccatccgggggcttattgaccggaaacattaattaaagaccaactccaaagaaaggacgaaacccaaactagcactgtacctgtgatcctgaacgggtgcaagcgcgcaagccatcgtatctctatggcatgcaaacatgcaactaaaaaccctgtccaagatgtcctgtacgcttaaggactgctgatgtgctggaaggagccggaaatccttttaagcctccagatctgaaggctcaaaa

SEQ ID NO: 87233 - DNA, 589 bp, Zea mays
  Clone ID: MRT4577_179560C.1
tttttttttttttttttttttttttttttttttttttttttttttttttttttttttttttttttttttttttttttttttttttttttttgggagagaggcattttttttttaagggaaaaaaaaagttttggtttaagaccatagaccgacaaaacatcccgtttttaaaccgtggggaaaaacccttttttttaaacggtaaaaacatgcccccgaccccatgcaaaaccagccgggggggataatgcacccaatttgggaggttggaacaagatgcatttttgggagccccagtttttgggcccataaagcacttgagcttttgccagaatagggacatgccaatcgtttccgggttaattttttaaaaacacggcccgttgaagggggacccaaaaaaaaataaaaagctttaggggaattttttttaaaactggtaatggttgaaaaatgatttggggggtgattccttgaattgaaaaattgggaagccctgaggcttttccactgttcatggaatggaaaaaaaaatcccaagttcagcattgaaatttccaaaattttgcagaaactgctgttgttgagc

SEQ ID NO: 87234 - DNA, 391 bp, Zea mays
  Clone ID: MRT4577_179561C.1
cagcgatgacgaggctcataattccactcatcgagccatcgagcatcaggtggcccatacaagggagctggttctagagtggaagacctgtgtaaggaacagcgatccaccatgccaccacacccgaataaggcgcacatgactatttatatacacaggaaagcttgtgactatatgcagactcggctgctatgtacacacatgtgccgagagaggaatttcattatctaccggcacttgtaataagtcgatgtcatctcacacataatacagcgaactctgatatatctatcttcacatgcagagagcttggccgtaaccatatgtagcaagctcagggaccatgatcactgcttatagcaaatctacagaggcacgagcaccatttgcg

SEQ ID NO: 87235 - DNA, 310 bp, Zea mays
  Clone ID: MRT4577_179562C.1
aaaaaaaaaaacattacaacaccactcaatccacgattggtccctcgagccgggcgggaagaacgtctcagaggactcgcagaaaacactatttcctcgccgcgggagtccaaccgaaactcctagcctgatagcgcgagcacagggtttattccacaagaaagcttgctttgtgctcaccggcggcacggaccccctgcgatggaaggcgccgcacgcactcctgcccccgtggcgaagacccaccaagaacaagctgacctgacctcaaggacccgttccccgccgccgcaaacgggggcaccaacgc

SEQ ID NO: 87236 - DNA, 471 bp, Zea mays
  Clone ID: MRT4577_179563C.1
gaaaacaaaatttccgggggccaaacggcaaaccctttggggaaagaggcccattccccccccgccaacaccggaaacacacccaaaaacccgcggcacgaagggggccccaagaggggaaccaaaacaaaaccccccaaggcacaacgggacaacccccacagggaccaacaaaaaagggccccaaaaggcaaccaaggacccacaaccttcaagaccaaaacccgaagaaaccaaccggggccccccaaaaaatctcaaagggcccaaagaagggggccacgattgccaaaaaaaaaaaaaaaaaaaccccggaacccccccccccataaaaaagccaggaaggcagggccccaggcacacaccaacaaaagcccgggggggggaacgaaccccccaaaaaaaacggcaggggggggggggggggggcggaaaccaccaaagggggggccgggggggggaaaaaaacaa

SEQ ID NO: 87237 - DNA, 413 bp, Zea mays
  Clone ID: MRT4577_179564C.1
acagtagaaacatgcatggccgggggacggggcctcacatcccttctagggctgctgcgcgcccacttatgcatgctctgaatactggtgcgtaggttatgtttaaaggggcttaccctcgaagggcgactagcccactcgggtaaggagatcaagggtgcaatggctatgaaaggcggctcatgcaactatgccagctcactgttcctaaccaagattaaatataatccattgaacaaatggaattctggaattaaagctattgtacatgcttgctagacacgcccgtggattgctactttcataaacgtcttactaggttcataagacgtaccagtgcaataagctattacacgaaacacctgttcacgctggttgatcagctgttactaactatttctagtcttacctgg

SEQ ID NO: 87238 - DNA, 273 bp, Zea mays
  Clone ID: MRT4577_179565C.1
atgattaagatacgagattattcttgaggacagagcatcgattattattagtggctgctagagcatatgtttagtggttccatctagctagaacacacaattatgagccaggctcccacaaaccgggccagaggcgagataagaccactcggcggacgctcaccggacggacctgatgaccatcacacgtcacccgcttaactagcaaagccataaccccaagtcccgctgcgacttcaccatcctgctctcccacatcgtccttctatgcaa

SEQ ID NO: 87239 - DNA, 282 bp, Zea mays
  Clone ID: MRT4577_179566C.1
cgccggctccgcggacgccggtacttctcgaaactcgggtcattccgggtcgccaagatgacgaatctcaccacgaagggtggaattgttgggaaacatggaaccaggtatggtgctagcttggcttagccaaacaagaagaaggggggatctgagactttcaaggacctttgggagctctgggggaagtttgctgcctacaggaaagcagacgggatttgggggcgccaggactgaaggaaggggaaggctgggggcgcttacaccctgaacaccgctagg

SEQ ID NO: 87240 - DNA, 217 bp, Zea mays
  Clone ID: MRT4577_179567C.1
ttccgaagtcataactacggtatcttatcgcgtctattaaattcactgaccatcttatcacaccacagtgactactaaaacactgactatactcaactcaatcgattatcagcacattcctctatatccacctaacatagtagctcctactaacgcaccgatcatcgatccatacatactcaaaacctgaattcattaatttaactcactctgtatt

SEQ ID NO: 87241 - DNA, 861 bp, Zea mays
  unsure (1)..(861): unsure at all n locations
  Clone ID: MRT4577_179568C.1
cactgcactctcggcaacggatatctcggctctcgcatcgatgaagaacgtagcgaaatgcgatacctggtgtgaattgcagaatcccgcgaaccatcgagtctttgaacgcaagttgcgcccgaggccactcggccgagggcacgcctgcctgggcgtcacgcacatccattccctcctctccggcggccgcaatgccgctgccgctggcgcaggtgcaggagctgcgggaccgcctctccgaccgcttccgcccgtggagacgctccgcgcagttctgggtccgcgccgtcgacatctacggcagctacaaggtgtgccagctgcgaacggggttcgtcaaggatgaggaggagcggcaggccatgtgggagcagcagcacgagatcggcgcccagaagatgtactccctctgctccgagctcggcggcctcttcctcaaggctgctcaaattctggggaagcccgatttggcgccgacggcctgggtgaagaggcttgttacattgtgcgacaaggctccgtccacgccgatcgaagttgtcagagatgttgtggagaaacagttctgcaagagctttgatgagatattcgatttctttgaagttgagcctgttgggtctgcttctattgcacaggtgcatcgagcgaggcttaaatcatccaagacagatgttgctgtcaaggttcaacatccaggagctgaacaattgatgatggttgatatccggaacatgcaagcatttgccttgttcttacagaaatatgacatcaactttgatctgttctccgcccacaaagagatggaaaagcagatatgctatgnagtntgattttgtgcgagaagcgagagcaatggaa

SEQ ID NO: 87242 - DNA, 637 bp, Zea mays
  unsure (1)..(637): unsure at all n locations
  Clone ID: MRT4577_179569C.1
ctattgaggggcgatttcttagcgggggctggatggagctcaggaaagcgcccagtggcagagcacccctagtgccacgtcctatccagcaaaagagactgactcgggccaagtgatctcgatgggtcaaaggaaagacttcggcatgtattttaccagggcgggatctcgaccctctgggggcgaacctctgatagtgtttgaccgctacccacacggcgctcgaggttgccgacggtgaggtggccgctctccgtgccctcccggtggaggcggaccgccgtgtcacggaactggaggtcgtgggccttcgcgaggacgtggacgaggtggtcgcttttgtccgagtccatggcaccgatcgaggggagcacctactcaacatcaccaaccaggtgcacctagccgtccgttgtggcactcgccgtggtgttgctggggctctagcctttgcgcagttccggttaggctttgagcttggtactggcgaccagtcgaaggatgcgactgttggcgccctagaggactttgaggtttacttcggcatggctgccgaggttgtggttgacatcctcccgctggtggacgtaatcaatgaatctncttagctaggtcgttgtcgtaggctgctntgctc

SEQ ID NO: 87243 - DNA, 256 bp, Zea mays
  Clone ID: MRT4577_17956C.1
tcggtacgggcactgggccaacgagaaggtgcagctctacaacgactgcatccactggtgcctccccggacccatcgacatctggaacgacatgctcttccagatgctcctcgcctagtagcaaggataatcgatcgatcgaaccagctcaacaaatccgtcgccggtaaccgtgcacagattcgtttttttttttgtttttgtttttgcctttggttcgttttctttttaaagaaaaaaagggtacaattttgac

SEQ ID NO: 87244 - DNA, 226 bp, Zea mays
  Clone ID: MRT4577_179570C.1
gcgtgctgcgcaactccacgtccacccgcgcggcgaacgagctcctcgccgcgttctgcagcgtccggcgccggcagatccagggcggcgggcgaggggactcggcgcctaatcctcaacacaactcgggcaccaagggcggcgcctccagcttcggcgtcgatgcccagtccccgtcgtccgagaccaacaaggcgccctcgtagccgtcctccgccgatgggtt

SEQ ID NO: 87245 - DNA, 258 bp, Zea mays
  Clone ID: MRT4577_179571C.1
cgaaaggaaacaaggtgaacgtgggagtgaagtacgcagagaagcaggagcggaaattcgagccggggaagctaagagaagggcggaacatcattgggctgcagatgggcaccaccaagtttgccagccagcagggcatgacggcctatggcacccggcgccacctctacgaccccaagctgggcacagaccagcctctggaccaggcgaccatcagcctgcagatgggcaccaacaaaggagccagccaggctggca

SEQ ID NO: 87246 - DNA, 313 bp, Zea mays
  Clone ID: MRT4577_179572C.1
aatattgaaaataaaagcatttaatatctcttaaagggcatccacatctgctttatccctagcggaagagtgagggggcttcacacgtgcactcacactgtggagagagttggatttcccagacccctgagggcacctgtcagggtcatccccattggtgctgcttgaggctactggggactgtggcactggacgtggctggagcaggtggtgtcacctgagtacattctttgctagcagacagtggatgaggccccttcctcttcctcaccaagcctgggctgtgccagcctgtcttaggccagggccttgc

SEQ ID NO: 87247 - DNA, 643 bp, Zea mays
  Clone ID: MRT4577_179573C.1
ggggggttttgatcaagagaaacagaattagtagttatagaccaactagcgggggggtagcgttcaagagaaaactgtgaataactaaataatatgtactaattgatgtctacctaccacggttaaaataatcccagtctaaacacaactaatgtacgatggcgacgttggcatcgcaacctgtgtccgcgtcctcctactagtatttggcgaccgcttcacccgacttgtccacggccttggctattgcctcaccaaccttctgtgacttggtgttatcggtgttattggcttactttaccttggcacccgctgtcttgccaccctatccttcaaccacaaccataccctttagcctggtggccgctgcactggcggtagcctaggcacaggtacccgccttgttgttgtctgtgcgttattccacaccaacataatactacctatactactacccatccgttgtgccacccgatccatccgcgatgccctcagtattgtaccgcgtattggtggacacgtccacttaccacgtattagcggccctggtaccacccgatttgttaccaccatagccgctgtcggcacacttggcgactacctactaaccatgcgtgtacgcatcgaaactctactcagtaag

SEQ ID NO: 87248 - DNA, 906 bp, Zea mays
  Clone ID: MRT4577_179574C.1
tactccccgcgtcggattccctgtgtgctcccctgcgtgctccatcgcgccgccacccagagtccttccccaacgccgccctctccctctcggcgccctgctggccggcgctccctccagcccctccccatggccgagcgcatctccatggtggtcaggagcttgtcccatggctgagctccctctccatggtcgcgctcctcccctgctccatccatggctgccgtcgagtctccctggacgggctcaagtgccatacgcccgtctaactatgttcactccgctgcagcaccatcgtcatctgccagctccatcatcggtcgttcctagtattttccccaacaccgagcctctctgacctcgctgctcgtcggtgcaatttatctgtgttcatgaagaaagtgaagcccgtgtacatagctcgcaaggtgttctgttgaaagcttcacctgatgcttgtcgtcattcttgcggattcaagtatgattagtatggtacctttggactcggatcagaaccacagtgtgaagaaccacaaagaatacgaaggttggcgcagagccgaagctatgcacaggggagcttcggtatgatagcaaaaaagggaaccgacttaaaagggaaaaggctatttagacctcgatggatcactatagagtcattagcaaatgtaaagggcatgagtgtaattttacatgggttgcgtcccgtgcctataaatagatgaacagtgctcccgtactgttcacgctaacttggcatttgcttttgcatcacgttcgtacctttgctgtctatcaagtcgaaggtaccaagtgtaattcaatattgtttttattttctcatgataatataatgaagacgagttgataatgctaaaaaaaaaaaaaaaaccccccccaaccc

SEQ ID NO: 87249 - DNA, 284 bp, Zea mays
  Clone ID: MRT4577_179575C.1
attcgtgagcagctatgtgtatgcatgttgtctacttacaaacttatatctggtttgaggtccatggggatcaactaatgggtctgggaatttatattatgatgttgacgataaaaataaaaaattactattaaaatataattaaataaaaaaaataaaatataaaaaataataatataactaatttataattaaaatataataacaaaaatacaaataaaatttaaaaataataatatattaattatttaatttaaattataataatttaaaacttttatttt

SEQ ID NO: 87250 - DNA, 365 bp, Zea mays
  Clone ID: MRT4577_179576C.1
acggcgtctgcgtggacgccacggaggacgagctcttccgcctcaacaccaaggaggggaagcacaccgtgaagcgctagagcgttaagattcagacacagcgcttatccctcgtggggccgttcgtgccggacaccgtgccgatgttggacatgctgcgtgcgctctagtccaacagggagatgatccgtgctctgcaggagtctctcgcgagcgagctcgcagcccggatgagcgccatgatcagctccaccgagctcagccatcgagcacctgcaagaaccccgagaacgcctacgtgctgaaggaccaggccaagatgatcggcgacacgctcgagattctcgacggtgtcaacaccatca

SEQ ID NO: 87251 - DNA, 284 bp, Zea mays
  Clone ID: MRT4577_179577C.1
aagagccaaaaggcatcaccgccgcgactacgatggcagcctcgctccaagccgctgtcaccctgatgcagccggccaagatcggcggccgggcgccctttgcctcgctgccgtcccgcccgtcgtcgcaactcgcctgcagggcgttcggcgctaccccctgcgccaacagaatcacgtactcaatgcacaaccttttcggaaggttgccccgtgagcggctacttcggctgcctccatgaacagtatcttgcactcgctgatttacagctttgtggctatat

SEQ ID NO: 87252 - DNA, 335 bp, Zea mays
  unsure (1)..(335): unsure at all n locations
  Clone ID: MRT4577_179578C.1
ggggggggggggcgccttctcntcctccctcctggggctgctcccggccgccgccttggctggcctgagcgcctgcgccgcgcccttcaccatcaccaacaactgcgggttcaccgtgtgtttctttcttccacccccctcttccctggcggggggggggggccctcctntacntcccccttcaacgtgcctcctctcaccagctcccgccgcctgtggggccgcaccggctggtccttcaacggtgaccgtgggagctgccagccgggcctctgcctcggccccctggcctgcccgctttctgggcaccctcctttggctctggcctttttcac

SEQ ID NO: 87253 - DNA, 664 bp, Zea mays
  Clone ID: MRT4577_179579C.1
ttttcaattaacaataatataatgtcttgacatgaacataaataaataacataataactggaacatagaggtaataaatgattatcccaaaaccatataaagcaatagcaaactacccaagtgattcaggggtaaacaaggtaagagataaacaatctagggtgacctattgggtcccatcaaaattaacctatgcatggtaaatgattataaagaacattattgggtaacaaaagtgaatcaagggcacaacttgcctggcacttgagattccaggtaccaacttgcttttcagatgacacgcatcctcgcgctagtcgtagcaatacagacaaacatggcatagataaaattaacatcacaccaaacataataacaaactgaatgataatgatctacgcgctgctatgagactaacgcaacttgaacgagtcaaatcggagttaaaacgaaggagttatgaatttatgaagttttaagtgttggataacagattaaataggatattaattttaatatggctttcatgttaaaacagtgctaccaagggataaaaataattaatacaaaattatgggaactagaatgggttaatttggaccgcatataattttctaggaataaaatgagtttctggaattatttatatactagaaatcacccg

SEQ ID NO: 87254 - DNA, 461 bp, Zea mays
  unsure (1)..(461): unsure at all n locations
  Clone ID: MRT4577_17957C.1
cggaannncccgggtccgacccacgccgtnctcggatgaagcannatgtcaatggagggaaagaagggttgtctgctgctcaaagtatcagggtgccatgatgaagagcgtagcgcagatgaactcnttgttgacgccagcaattgganttcgaagnnnatatcagaaaaggtcggctggggcagggacgccatggcctcnntatgaagannagctgggcntnnttgctcggtagaattaaatcctcccttgcattttcaaccgaagggacnntctgcctgcgccttgggtatctcgctgtgcagcaagtcttgccctcttcatttagttaagcgaatggaagttgcttgcagttaaagaggaatgtgtnttgtttctgaccttgtttggagtggttncgagccttttgttcttcttatttgtttccagcatcgacaaagaaaaatgaaattaagtagcac

SEQ ID NO: 87255 - DNA, 1325 bp, Zea mays
  Clone ID: MRT4577_179580C.1
gccgcaagaacagaacgccgccgcctcgcacttcttccagagggtccgggcgaccaacgccacggtgctcagcttcgggggccatggcggcgcgcctcctgctgcccgcttggacctggacctcgccgagcagctgagccaccagctggccccggtcaggagcgccggcgacgcgggccgcccttgcagcgaaggatcgagcagcagggacggcaacggcagcaggtcttctgtagacgaagctgcagcaaacgcagacgacgggtcagtgcagcagcacccaggcccagcaagcatgaacagcagcggggcaaccgtgtggccgccgtacagctgcgccccagctccggcggcgtacttcccccagggcatcgcgattccgatctacccggccgcaccggcctactggggctgcatggttcccggagcttggagcctgccatggccggtgcagcacccgtcgtcgtcgtcgtcgcccaccaccaccagtgctccttcagtcgtctcgtcatccggggcagctgacgactcatcatcccacgcgctgggcaagcgcccccgggaccgggagggtgacgatgggagaaacggcggcaacgccaaggtgtgggcgcccaagagcatccggatagacgacgtggacgaggtggccaggagctcaatctggtccctcgtcgggatcaaaggcgaccagacgaagcagcaggacgcagcagacgaccacgccggtgggcacagcaagcagctcgggacggtgttcgagcccaagcgcggcgaggccaccaagaaggccatgatgacaagctcgccgctccttcacgcgaaccccgttgcgctcacgcgctccgtggccttccaggaggggtcttgattcttcttcaagtacatccatcagcagcagcaggaatttcctcatgcagcgttccttctcatctgaacttctgaactgaacatgagctgatcagcctgacagtacgtactgaattttgtttttatataaatcatcataggattgtattatctatctatatgctgagtgggaaacttagctagcgtatgtgtaagtggacttgtaatataggcggcacgcaggatgtacatagaattaattagctatatgggtttgagaaataaagaccaggagatcaataagaggtccctgggtgtagataaataacattaggggaaggaatgtattgcttcaggtatttcactcttcagcaacttgttgtcaaagtcgattctataacaaagtattctattttttgtttaaaaaaaaaaaaaaaaaaaaaaaaaaaaagtactctgcgttgttaccactgctt

SEQ ID NO: 87256 - DNA, 272 bp, Zea mays
  Clone ID: MRT4577_179581C.1
caggtcaatcgtgcgcagctaccgtgaaccgaagtcgagagcggcacttcagaagggagcattttagattaagtacatcactcggtgaagccagctgtgacagcggtgtcagacagcacttcggcatgagcgagacgcgaagctgaaaaacctagatccgcagatgcagtagagcatcaggcccagatggtcatgtggttagctccatggtatgctgggaatcggcaatcagcacagaggtgcaagccacggaagcatgatcaccccgagga

SEQ ID NO: 87257 - DNA, 378 bp, Zea mays
  Clone ID: MRT4577_179582C.1
taaggattaattcagaagagtgtttaaatagttagttaagttgtttcgatccatacttcgattttggtgtcccaaaattatgattctaagtaattagtctttcggtgttcgctttagtcaaagagaaatgtggaactcatatgatctattcttttcctaatgactgagctaggtccttttaaacagaaagcaagtgatgtatgagctacctccgaataggctggaaaggtgtaattattataattaattatatatcgctagttagtatttgcttaatgctttattataagtgtttcatccactttggtgtagattatctatcttatactatttatactcgtgctacatgtgcatcatgcatctcatgaggtacgctag

SEQ ID NO: 87258 - DNA, 262 bp, Zea mays
  Clone ID: MRT4577_179583C.1
ccgccaaaaacaccagactagggttttacaacaacccgaagggggcccgaaggagatggcaagacccacacaaaagggggggggcacgcaacgaccgccgccggcaagcctacaacagggacgactaaaaacaaaaacaagagaacttggctccttgagagtacccaaagctaacagccatgggcccagacacactgaatttgccttaaatctagcgatggccctgcagtagtgcaaaaagcctccttttttgaaccccggc

SEQ ID NO: 87259 - DNA, 355 bp, Zea mays
  Clone ID: MRT4577_179584C.1
attccaactgagacgccgatttaaaacacgattgagaattcccgcttgtttcacgttcgggctggagtcagtgcaatagagtgaatgaaattcccatagggtacatgttagggctgatgctaatacactttatactgtacctggatgaatgttcttccgtgttgaattcacgaaaacaaaattgggtcagcgtacgtgagaaaaacattaattgttctggctgctcaagtggaattatggaagggatatcctgattacttcagttagacctcagaccaccgactttaaactctaacagctgctgcgatgttaagtggggggcaaaaagtccaaaaggccagatcacagaaaggtc

SEQ ID NO: 87260 - DNA, 520 bp, Zea mays
  Clone ID: MRT4577_179585C.1
actctgctctccatgccgcgtgaggcaacacctagcaatgcaccacagtagacaggggcctactgactgaccagatgctaatgctgtacaaaaaatatatcggtgagcaccttacagtttgagtagctgtgctactgcaggtatgagcagtgctaggccccagcgcggcgcagcagaccatggactgcggaccagaagctgtgtctattgtctaccggtacagtgaacacacagacgagacggcaccgctcacacacctgctgcattcaggtaaatgacgaccctaatagtgatgctaagtgtctgtgggggctccacgacacgcacgacaaggacagcacttctcaccaaagacaacgacgccctcgacctcgtcaagcgctgcgaactgaaggactctactcgtcgactgctaggctgttaaagctacccactttcgtagagggtgaccataaatagaaggctgtgcgagctactgcatgtaccatcctttacaacgccaatactgcatgaggagcgg

SEQ ID NO: 87261 - DNA, 432 bp, Zea mays
  Clone ID: MRT4577_179586C.1
aatatcaaaccatttagcttgtgggattttatattatggtattgtgtgtatatgtacaggagcaagtttcttgtatttttttttgccaacagggaaggaaacaatgacacttctgcaactagaaacgtcgccaaaaaaacagggtgggaaatggctcacaaaaatgctagcatagccaatacaatcctttacctgagggctaaaaaagctactttgttacccccaacctcaaaaaagagacatacgatagaggaatggtcatggccaagctagcttgattgaaatgatagcaaaggggcttcaatcatgtgaaaagaacggatggcccttggtggaagctctagctgaaagcacctgctttatttgacgaaccaaacatcttatccttagaagttgttctttctataacctgctcaaaaaaaaatgggtggt

SEQ ID NO: 87262 - DNA, 320 bp, Zea mays
  Clone ID: MRT4577_179587C.1
gccttaccagctggatggcctgatatggaggaaggcatggaacatgttagtggggaagttcttgtttatgctaccaacgtactctgtcaacgacagcaaatcacaccaggactactcgatgggtttcaacatcataatgaatagaatgaaggatccctagatgaccatatgtgaataggctgtcattgatgtggtaatactcatatggtaactgctaaggcaaaaagacctgacttggtgctataatgccataaacaggttttacagatacatgctctttgacgtgatcatctatcacttgaaggttaccggcaccatac

SEQ ID NO: 87263 - DNA, 1113 bp, Zea mays
  Clone ID: MRT4577_179588C.1
gccttccacccagctagcgcatccagagcaagcgatcgagcgagctctctcggcttgctagctagctccattatatataacatcgatcgcttgatagtttttggtagctagaaagaagagagagaaagagcagctagctagtacagggatggagaagatgaacgtggttgcgagcaggaagcagcagggcggcgactggatctgccggtcgtgccagtacgtgaacttctgcaagcgcgacgcgtgccagcgctgcggcgaggcgaagctgggcgtggagcggacggactacggcgcgctgggcggcgactgggacgtgaagcccggcgactggtactgctaccgctgcggcgtgaacaactacgcctcccgcgccggctgcttcaagtgcggcgccgccaagaacgagtctccgccggccgccgtcgcgcagggctggggctacaccgccgccggccaggccggaatgaagcccggcgactggatctgcccaagactgggctgcaacgtgcagaactacgccaaccgaaccgagtgcttccggtgcagcatgcccaaatcatactacggttgataggcaactgcacgtacactgatcgatgagaaaaaaaaaaaaacaataatagtaataataagtattattgtacgagatccaagaggtagagacgggcgagatctatcgttgatgatcggtcaacggttgccgccgcgccacgcgagagatcgaggacatctaacccatgcattttcctttcttgtttttcttcttttgaatgatgatccaatataaccctcgacaacactcagctggagtggaggtagggtttagtcgtttggaagagcagcagccgaagctaaaaaggatatttaggaggaagaatgtgaaacgaaaaaagaaaagaaaagagagggtgactgatgccaacaatcagtatctcgcttctctatctcttttttttttccaatatgtaaaagccgaggtcgtttaagaaaggaaaaatgcgagttcccttcgcctgaatgcatgcatgcatgctttgttgtcactcactagctcatccataatccctttatacagtcgtaatatataagagcatctccaaaagattagct

SEQ ID NO: 87264 - DNA, 575 bp, Zea mays
  Clone ID: MRT4577_179589C.1
aattcggcacgaggcgccactcgttcatgtccatcacagtatctacgggcacgagacagggggaggatggacagtccttagctttctagccgcagtcatccgatcgaactgccggatgcgagcgaacgacagcaggtgcttccggaggggcctcccgttcgtctacccactgaagcccttgccagggtgttggtcttccggctctggggtgcggaagcggcccatggcctcccccttgcactccccaccgcgcctgtacgccgatgcatgggcagcctgcgactgcgccaagatgaatggcctcaaggataccaaacattaaacgcacggggaccttgtacggcagacgcatgactgcctgggccacctaggacacaactaagactacgaccccgaaaaccccaagcgcaaagaggagaaaaaagagcatgtcaaaagatgctagagaaaatgaatggtatgcctgtaccgatcgagggaatcatagcctgtaactgaaatgtgtgtgcaattgaccacaaaactatacacagcataacacttttcagcattaaatgatacatagctcacaacta

SEQ ID NO: 87265 - DNA, 494 bp, Zea mays
  Clone ID: MRT4577_17958C.1
attcttataattgggtcactgacaggtatcatgagatgacatgacccttgcctatggccagagaaacatggactgttggatgcagagtgatctgtgtgatgacaactacagagcaaatacattctatgcattaggctcaccttatggcgatacatatagctacttcaacactcttgcacatagaactattgctgatgtcgagccatcaagcacacacatgaaatgcacataatgggacgctggcaaagctatgggttgatataacaactaatgctatgtggccacctctgctgttaccttagatgtcaagagctagtatcttggacccaaatgcttctgatgctgatgtgaaaccttcagactatgaacaagctgcacgccatgtaggatcattgaactggatgggtgctcatgcaacctaccctgatgtctcagaggcgagccgttcttaactatgcatacatacttgctaccacatcacactacttagctat

SEQ ID NO: 87266 - DNA, 896 bp, Zea mays
  Clone ID: MRT4577_179590C.1
gggaaaaacccgcgcaggaagagcattcccttccacgcagctagcatccagagcaagcgatcgagcgagctctctcggcttgctagctagctccattatatataacatcgatcgcttgatagtttttggcagctagaggaagaagagagagcagctagtacactagtacagctagcagagcaaaaccagcaaaggcgcgcgatcaggccagaagagaataatggagaagatgaacgtggttgcgagcaggaagcagggcggcgactggatctgccggtcgtgccagtacgtgaacttctgcaagcgcgacgcgtgccagcgctgcggcgaggcgaggctgggcgtggagcggacggactacggcgcgctgggcggcgactgggacgtgaagcccggcgactggtactgctaccgctgcggcgtgaacaactacgcctcccgcgccggctgcttcaagtgcggcgccgccaagaacgagtctccgccggccgccgtcgcccagggctggggctacaccgccgccggccaggccggaatgaagcccggcgactggatctgcccaagactgggctgcaacgtgcagaactacgccaaccgaaccgagtgcttccggtgcagcatgcccaaatcatactacggttgatggggcgcggcggccggccgggcaactacgtacactgatgagcaaaacaaacaaacaaaaagacataataagccgtacgatgagcttgaagagagagctagatactgatgatggttggtcaacacgccacgaggacatttaaccattttcctttctttttttgtcaccctttcgaatgatgcatgtaactatattcaccctttcgagcagcaactgaagctaaataggagaggaggaatgtgaaacaaaaccc

SEQ ID NO: 87267 - DNA, 273 bp, Zea mays
  unsure (1)..(273): unsure at all n locations
  Clone ID: MRT4577_179591C.1
gccagncgccangggcgagagggagancggaancaacggcnncggaaggancggcaggcncgnggccaggggcgcccnccagagcgaggangncgagcccgncgccgncaacgaccccnncancaccacggaccacangaccnacaagnncaaggacgacaccgnccacggccaccggaagcacagcgacancacacgcaaggaccccaagacccnncncnncggngacaagccggncaccgncnnnggcancaggaacccngaggaaaaccc

SEQ ID NO: 87268 - DNA, 424 bp, Zea mays
  Clone ID: MRT4577_179592C.1
ctgggggggtttttattttttttttgggtgtaaacacttttttttttttttttttttttaaaaacaaaaccatgttcaaaaaaagggcctttattaaaaggggaacaattcccaaacctaattcaaaaggcccaacccaaaaagggattttttttaacaaaaaaaaacatccctctaaaaaccccccagggaacaaaattaaaaacccaggctgggggaaaagccttttttccacccaccgaaaaccccgcgggagggactttaacaccattgaacccaaaattttttgagaggggccccccctggccaaagaaaacatgggcccccttcttaccccaaaccatgggaaaaatgacacccaaaatattaaaacccccctttttacacccccggggatttcaaaaaaaaggggaaaaaagtcccc

SEQ ID NO: 87269 - DNA, 607 bp, Zea mays
  unsure (1)..(607): unsure at all n locations
  Clone ID: MRT4577_179593C.1
cagnatgcttgatattgttgcnattggaaagggtatatgctctcaagttttctctatttacatgtgctttttaccgccagtattgcttgtgttaagcatgtttcaaagttattacaaacctgactgtggagagacggacggtggtgggcccatccgtgatccggcaaagaagtggttgaacgattgagaacagagctaaggatggggttaggagggagagctggaaatgggtcacgaggactgttgttgatttttgacgtgcgtagtcgatgaattgtcgctaattctgcatcgttttatactttaattggtataactgtgctgaatacttttttatgtgtttaacttggtgtgtggttcacttgatagaaatgaaatctaacttgtggacttaaggaatcatacagtagcttgcctatgtattaacatgtacttgattctaaataacaaataatttccactgctcggactgaaaattagtatccatctactgcttgattaggacatggcttagaaaatgtcatctttcactgtatgtactgtctttgattgtgctttcgtttaaaaggtagtaataaatagctatgcttagcgtgaagtatatatg

SEQ ID NO: 87270 - DNA, 205 bp, Zea mays
  Clone ID: MRT4577_179594C.1
attggaaatattttttttttttttatttttttttctaaaactaaaatttcaattgcaaaaaaaaaacggtggcccataacccaaacattagttaattaaaaccggtagaaattaaaggcctttatacttgggggaatttgataataaagaagatccccaatttaaaaaaaataggggccttgtttaaaaaccaattgaaaatttt

SEQ ID NO: 87271 - DNA, 721 bp, Zea mays
  Clone ID: MRT4577_179595C.1
ctgtgcgtggctcgcgccggccgggcggcatacacccaagcttggcatgatacatgcaatattgaaaacaatatggcaaaggaatatgcaattcttatagtccttattagcatggtacttgtggtctcctgcaatgttgtggacggtagtgcagcagacatgaggcatgcaacgcttccacgcaaaggtctaaaggaagacatcaagctcgccatcaatggagtgaattctccggttagcagtatatctggacaggcatctagcaactctgaaaccggcacagacaacgatatgtcaagcgctacagcctttacctcaaaggtgaccactacccaaggtagccaccgtggctacgagatccacgggttccaaggcagtaagatcagccccccatgatgatcgagtgattcatattagggcaatcaaatcatcagttattaatgaacaataggtatctataagggaaccaactatcaaaacaacatatctaataatcatatgttgtacttgtgtggatgtgtgtagtaccaagttgtgtattacaagttgtactacagtgtgatgtcattttccatgtggtatagcataactatgaagctttggattctcagtagtttccaaagcacatgtttatgatacacatgtattgaactgctagtacaaataaagtcgatgtctatcaatacttaaaaaaaaaaaaaaaaaaaaaaaatagcggccg

SEQ ID NO: 87272 - DNA, 368 bp, Zea mays
  Clone ID: MRT4577_179596C.1
tttctattctactactccaagttactaccgagggcttgcttattcagtcggttataacgaaaggatggcgtcacctaaaccctcttcggacatcctgcttctcctcacggaagcggccgtgctggcgctgtcactcgcggacctgacgcaccacaactgcctgaagaacaacaacgtgactgtgcaaaacctgtgcagccacgaaactacacttacactagagccgatctccaacaacccaccaatgatctcgggcacctacacgctacacccgcgcagccaatccgaattacccatctgtctagcgacagaacgactgcccacgcccgacgccatccatgtggagatccacgtcggcgtcgactgca

SEQ ID NO: 87273 - DNA, 257 bp, Zea mays
  Clone ID: MRT4577_179597C.1
caagaaaacccccggaccctttggttttctccttttacccgggaaagaagggggcccttttaccaattaaaacccaaaaggaccccgggttacccccgggaaatccgggcccaacccggggggccgcccaaatttcccttcagggaaaatttcaaaaacctggcgaacccaaagcaaaaagggttaacccgggaaaacctaaagccggaacaaattcaaaaaaaaaaacaagccctaaccaaaaaggtttaaacccc

SEQ ID NO: 87274 - DNA, 238 bp, Zea mays
  Clone ID: MRT4577_179598C.1
cctgtagctatttgaaaaggagagtatttaacattcggccttttcccttttttgggttgctcgttgtcacccacgctgaaagtaagtcgaacggggccgtgggttctcgcgtcacagcggaagatcctggagttcgcggacgttcatggagcactttagtctgcttggcggtttcgtgcgccgcgagcctgcgcgtcctttctaagctgtgtctccccgaacttcgtggctgacgaga

SEQ ID NO: 87275 - DNA, 679 bp, Zea mays
  unsure (1)..(679): unsure at all n locations
  Clone ID: MRT4577_179599C.1
gggtaccctcggagctggccggggggatggatctagacgaagtagagtatatatatcatggtccattgtccaatttacctaggcattgccagtcaggtgattctacacagcttgcagttcctaaatgtggattccaaaaacacatgccattacttacgaatactgcggatctgtagttgtagtcccaatcatgcttgtgtatcactgtgggggaaaaataaaaaaataaatcagtgagcagcttctggtttacacacatcaaactgatacactttctcaatacgtatgcagctgaggaagatgtgcaaggagggcgcatattggggtagctaattgaccgatccgtgcctcttgtcgctgcagacgcaaatgctggctccttttcccttcttcgtttgtttgctaatccagacgcttatttgtctggcacgcaggcactgttgctggagnttatgtgggcatggtgtacggcgtggaaagggtccgtggccgcagtgactgggtaagaattacatcacacgagtataaatatgccagattttggctgtggtttgaaaccagtaaccagccacagctgcatcatgaaaatcggtggatccgtcatccgngaccagccacagctgcgtcatcttttgggtgcccgttcttggaccccgttcgttatgctcttatggccctg

SEQ ID NO: 87276 - DNA, 256 bp, Zea mays
  unsure (1)..(256): unsure at all n locations
  Clone ID: MRT4577_17959C.1
ccgtttttcctcgttctcgatcccccctgncgcttccanctccgntcgatctgatccctccccaccaccacgcccatngcggaaccaactcaccgangacnagatcgccgagttcaaggnggccttcagccncttcgaaaaggacggggntggttgcatcacgaccagganctaggaactgtcatgcgttcnctggggcgaaaccctanagaggctganctccaggacntnntcatgaggtcgatgcngatggcga

SEQ ID NO: 87277 - DNA, 662 bp, Zea mays
  Clone ID: MRT4577_1795C.1
ggcgattgggttcctcgaggccggccgtcgcactctattatctaccctcgactcgacgagtgagagaccgcacacgccgctagctatgaccagcagcacacggcgtcggcgatgcctttctccatgatctcctcgccagctctggcggtggcgactcagggactgccgcccctgcggccagagagactcctccgctcagcgccctctgatccaagaagaagatcaagatcgacaatgcctactccagtgcatgtgcactcgaccgacgacgtctacaccgacgaatatgaaagtgaaaagtctgagtggtgaaccatctcgtcgactatgacggggcgacatgccgacggatactgaccgctctcacctggagcaagagtgatctcccaccgatgacttgtacagcgtggacaccactgcactgctgatctggaccgtcatgctcgatgttgtcctctgcggatgagactgccacctacactagaacagcgacgtgttgggatactcaaatgccatgcacgcatattcatgcaagtcttgatgtaaacatcagtgggtgacggatatgatcagaacgacctgtatctagtacttacttaactacgtaacagttgtcactagacatgcatggacaaccttataagatgctatgtgtgtgcctg

SEQ ID NO: 87278 - DNA, 232 bp, Zea mays
  Clone ID: MRT4577_179600C.1
atagatcgtcatcatgatcgacaccgtaactatacgcactagcaagttcatgactaaccgactagttcagcggagacaaatggtcattgatgtcttcacccgggaatgcgacagtgcctaagacagaaattcgggaaaaactagccagaatgtacaagaccacaccggatgtcatctttgtatttggattcagaactcattttggtggtggcaagacaactggctttggcat

SEQ ID NO: 87279 - DNA, 2170 bp, Zea mays
  Clone ID: MRT4577_179601C.1
aaatatgaaaggtaattaaattaatgacaggtgaaaacaaattgttggcttaagctcaaggacgactattgacaaaatatggaacattgcaacaaacgtctcagagacagacatctatgaaaccatgcataattttctcataaatacatgaccaacaaaccatctttttgtcaatttgggtgactttagctgctctcatgatgtgcccgtaaaactgaaaaaactgtacctaagcacctgcttgccatacaccaaccatgtttctgctcatttgtcgcaaggggcagatagttaatctgtgaaggtgataacgatgccagctgacttaactggtgcctgtggtcacatctagtcagatgactccaaaccatagtcaagcatttcttttatgtttagcttgatagaaggtcccatggatgagcacaagtacgccgttttccagtatatccccttagcaccagatggcttgttcctctcaacagagcgctgtgaatgaatagcaagaagtatatcaacactatcctcgataatatgatgaacagaaacagatgttttgtaggaacatagatcttacaacaacagacatgaagtttgcaatgagatcttcctctggaaagtcaaccttgccaaagggaatatggacaattcctgatttatcaactctgtattcaaccttccctttcttgaactcttctatagcctggaaccagttgcacaatctaattcattggtgtcctaagacaattaacactacaattggactgaactgattcaattttacagcaatttttcgaatatgttcaaatctgaagtaatactcccttaacttatggacaaaaggagcagaatgacttgcacatggtttttatcgacttggaaaaggcctatgataaaatacctaggaatctcatgtggtgggcattggataagcataaaatcccaacaaagtatgttacgcccatcaagaacatgtatgaaaaggttgtgattagcgtccaaacaactgatggtgatacaaatgttttcctgattaacataggactacattaaggttcaactctgagtccttatctatttgccttagtgatagatgaggtcacgagggatatacaaggagatatcccttggtgtatgcttttcgctgacgatgtagttctagtagatgaaagtcgggaaggagtaaatagaaaggtagaattatgacgtcagaccctagagtcaaaaggatttagaattagcaggactaaaaccaaagtcacatctcatatacttggtactacaattagtgaggatggatatgtaagcttgggaggccaggtatttgggatcgatgctacaaagagacggtgatattgatcaagatgttagtcataggatcaaagcagggtggataaaatggcgtcaagcatcgggagtcctatgcgacaagagagtgccacagaagttgaaagacaagttctataggacaacaattaggtctgctatgttatatggggctgagtgttggcctactaagagacgacatatccaacaactaagtggcgcagagatgcgtatgttgcgttggatatgtggacacacaagattggaccaagtgagaaacgatgacatatgcgatcggctaggagtagaagaaaagcttattcaacaccgattgagattgtttgggcatgtccaccgaagacccccagaggcatcataagatgggacaataatgtgaagagaggtagaggacgaccaaacttgacatggaaggagacaatcaaaagggacttgaagaaatgaaatatcccaatggagttgtgtttggatagaagtgcttggaaagaagctatccacgtgctcgaaccgtgattaggcattttcccttttagcgctctcaaaagcttttccccctcccctttctctctctctctctctctggtgacttcttgttaggtttcaactctagtctaccccaacttgcttgtgactaaaaggctatgttgatgtttcaaatatgttcaaatatgaagtaatactcccttaacttatggacaaaaggacatctggaccatactttaactgtcattttcaaggtagatctattattaagataccaacatcaataacattaggccaatggtggtcacacctaaatcgcgtatgactgactagttctagatcgcga

SEQ ID NO: 87280 - DNA, 656 bp, Zea mays
  Clone ID: MRT4577_179602C.1
ctcggccaaagctgactacagcctacaagcgaagcgctagaagagctcttcccgatagccatggccaagcccccgcttcaaacggctgcgatcatcctcctcgtactcctctcggccgcgtcgtgcctccacaccgtcgatgccgccactttagggttctgttggggcaagtgcagcgttcggtgcgcgggggcgaccgcgcggcaggcgcgagccgcgtgcatgagctcctgtggcctctgctgcgaggcatgcaactgcgtgccgcacgacatccatgactgcccctgctaccgcaacatgctcaccgccggccccaagaagaggcccaagtgcccctgagactgagactacgaggtcgactcacacggcggcatcaatgggactgcgactgctgcctgcaactgcgatccaatccatgctgggccagacaacctgttatgttatggatccagatacttatatggttgttagatttttttgttattttgttgttagatttttggttttatttgtttggtagtgaataagtagaatgcaggatctactatgcatatttgtattttgtttttagcattgagctagttatgatttttttcaaaaatatcaaatttgtgatctacgagctagactccaggttgttgaagtctgattcc

SEQ ID NO: 87281 - DNA, 776 bp, Zea mays
  Clone ID: MRT4577_179603C.1
aacgaagacgacgaaccaatccatccaatccctagggaacaaggaggcgaaggaccaccagaccggcctcctctcgacgcggctccgccgctccgcccccgccgaccaccacgagggtttactgtcgttggctgaatcgagagctcgcgcgttcgtgctagtcgctaatccgcggaccggcggtcgttgtgtcgttgattcgccatggggagcaaggggcgcatgcctcctccttaccaccaccggccgctcccaggtcccggctctggcccgccgcatggcatgatgcaccgtgatccgtacggcccgggcatgcaccaaccgccagggccggggccatacccctacgatatgttgccgccgcctgagatcctggagcagaagctcgcggcgcagtgtggagagatacagaagctggcgctggagaacgaacggctcgccgcgagccatgcgtctctgaggaaagagctcgctgccgcgcagcaggagctgcagaggatacaagcgcagggggaggctgcgaaggtcgccgaggagcaggagatgagggggctccttgataaggctgccaagatggaggccgatttgaagtcgtacgagtctgtcaaggcggacctgcagcaggcgcacgccgaggcgcagaacctggcggcggcaaggcagcatttgttggcggatgcgcagaagctgaacaaagacctgcagaggaactttggcgaggcacagcagctgccagtactcaaggctgatcttgatgctggctaacaggatatcag

SEQ ID NO: 87282 - DNA, 360 bp, Zea mays
  Clone ID: MRT4577_179604C.1
tccaatacggggagatcggttccagcggtttgcgcgagcgaggcgtgaccgatggcggccgcgtcgctgctgagccgggcgcggtggctcctggtggagcacccggccgtggcctcgttccgctggcagccaggccgcacggtcggcgcgacgccgtccttcgcggccgccgtcatctgcggctacctcgccgcggtgctcgtcctccgccgcctcgtcctgccccgcctcccggcgctgcctccgccggcgctccgcgcgctctccgccgcccacaacgcggtcctgctggcgctctccgccgccatggacggcgggtgcgcgctgtctacggccgcgacggcgccggcgacgcggagg

SEQ ID NO: 87283 - DNA, 334 bp, Zea mays
  Clone ID: MRT4577_179605C.1
tcgccaaatcataggataggttggttaacactctttttcatcgtattcgaattgcgagttgttatccgtacacagtgggagcaaccatgcttggtcttcaagatcgactcgcacgaccgtaagggcactgcacactttcggagcttggactatgacgagcgcaacggctacctcaaggtcatggtcaccatcataattcatgaccctggtcaaaacgcgacagttgccaaagtcgccttccggcaccctatcagatacaacaagcatatcgagctattgatagcctgccagggaatctacacctgtcacaccatatacatgctgaaagaaggcc

SEQ ID NO: 87284 - DNA, 249 bp, Zea mays
  Clone ID: MRT4577_179606C.1
aaaaaaaaaaaaaaaaaaaaaaaaaaaaaaaaaaaataaaaaaaaaaaaaaaaaaaaaaaaaaaaattttaaaccatacccaaacaaaaaattcaacctggcccctttcccgggcatgtccttcaaacgggcgatttttccaaatttccttccccctggccgacttttccttattgctttttcgagttcccatttccccctttggggatttccaattccattccctgggccaacccttttcctacccca

SEQ ID NO: 87285 - DNA, 360 bp, Zea mays
  Clone ID: MRT4577_179607C.1
cgcgtactcatgcaagtggccccttactttcacaaaaaatggtataggcttagaataggggacacttacgaacaacagtcactgtttcaatacatgcatatataacggactttgctttctctaagcctgcagaaggaggcatatatgacaataggaatggaatggattatcatattcatgcgattgatatcgcatgcacgggaacctccaatgcatattgtgcacattgcacaggtaatggttcctatcgcaaaggttggaggacttggtgatgaatgtacaaaccattgacgacctcttcacgatttacgccatatagatctacattttctgacaaaatatgatcgttgaatcctaatc

SEQ ID NO: 87286 - DNA, 938 bp, Zea mays
  Clone ID: MRT4577_179608C.1
tatatgctacaatcagaatcaagtgcaatttactaggctgttacttttttactaatcaatttaagatggactgtggttgggaaccacaaaaacttcgcatgtcatgatgcagcttgagattggctttttgaagtactgctgaatgttgtcccatgctgtatctcgctagaattggggtgtcaagtgtggctctttccaagtgagaacagtaattgcgttgtgagtgagacagcgagatatgttatttgagcttacccccccatgttggtttagtgaatttctaatttcctccttttagggagggcaattctggtaatcactattgtggcattgcctgtaccgcttctagcaatcttattatttttcattgttcttaatcatcacctgttttcagggtacccttccatgcttttctgcttagcatgatgttgctgcagttgtctgatgtatacatttattagcctcttcttactggtattgtcatgggtttaggtgctgctttttctatatggaaggtttcgaggtgccactgataacacgttgcactggatgcctccgaggttggaacaagtgcatgacgaagctgttgtagaatatttctccagaattgatgacccacagtgggaagatttggacctacctgccaacggttcccatggaagaaccatcgagtccaagctctgattgaaggtcacgggagaagggtggaacactggaacggagcctcggtagtggtcagtcaaaattacacacatcatctcgagtttgaagagtctgcagactgtttgatagaataaacatgaatgtttcatataggtcaaacttttatcacagaagaaactctttcctgtttaaacgtgggagtcatatctttttaaaataattataaagaataaaatggaaacaaaaaaaacactggaaaaaaaaaaaccccccaa

SEQ ID NO: 87287 - DNA, 1107 bp, Zea mays
  Clone ID: MRT4577_179609C.1
tctggggcgtcagggcctctcgatcgctcatcagtcgccagaggagttgttgatcgaggcgagtgaggttgaaaagaaggcggcgaacaaaggcaccatcgtcatggacggcggatactacggcggccgcgatcagcgctacggcggcgggtactacggcggcggtggcgccatcgcgacgccggggtacgctccggcggtcccgtacgggatgtcgcaggtgaacatcgagggcaacgggtgcgggcgggcgctgccgccgcagccgaccgtgaaggtgtactgccgcgccaaccccaactacgccatgagcgtccgcgacgggaaggtggtgctggcgccggcgaaccccaaggacgagtaccagcactggatcaaggacatgcggtggagcacgagcatcaaggacgaggaaggttacccggcgttcgcgctggtgaacaaggcgaccggggaggccatcaagcactcgctggggcagtcccacccggtgcgcctggtgccctacaacccggactttttggacgagtcggtgctgtggacggagagccgcgacgtcggcaacggtttccgctgcgtccgcatggtcaacaacatctacctcaacttcgacgccctccacggcgacaagtggcacggcggcgtccgtgacggcaccaacgtcgtgctctggaagtggtgcgagggcgacaaccagcgctggaagatccagccctactactgaaccaacggatgatatgaccatcgcgcccatcgatcgtgcacatgcatgcatacgtactagcagaataacaggggtcttatctcccgaggcgtcttttgcatgcatgccagcagttgcatagataaagcaggagcgagacaaagggtgttcatgtatattgcagctgtatcactgtatgtatgtgccattgtgccttgtaataatacatataataataaagttgctcggagtgtattaattaaaaaaaaaaaaaaaaaaaaaaaacagcctcggcctctgctcccggctcccccacggtactccagccgctaccctgcgattccgccagtacgccaccaccaccgagcctggactaccgccgccgcccttcgccgatatcttca

SEQ ID NO: 87288 - DNA, 942 bp, Zea mays
  unsure (1)..(942): unsure at all n locations
  Clone ID: MRT4577_17960C.1
ggggctctctctggctctctccccctgcccctgcccctgcccctgcccctgccctcgtcactctgctgttggcacctgctcgctccatcagatttcggggagctcaccaaataagcatcccccacccccgatcgaggcaggcttagctaggccttcgtactgtttcgtccggaagaagcaaactagctatagctatagctgcaggaagcaggcgagatcggatcatccgaggtccgaggccatcgggaacgggagctagctccagccatttccttgtcatccgaggtacgcgtagttgccggaggagtgccttggatcgcaccatctttggatgatgtcgtcgcagaaacgacggaagggatgcatcttcttctccctcgccttgcttctctgcagcgcgtcaggaggcgtaccgtcgctggcttcagaaaactctccgtcagagttcgccaagatcgtccagtctaagcagacgaggcacgcccgcgtgtgcggggcggaccctcagctgctgagctcgctggcaggcagcggcgcggaggtcatgctcaccgtccccaacgagcagctggagcacgtggccgagttccaggaggaggccgacctctgggtggccgccagcgtggcgcggttcgtcccggcgaccaggatcacgcacgtcctggcgggcgacgacgcgccggcgcgctccccgcccagcgcccacttcctggtcccggcgatggccaacctccgctcggcgctcgccgccgcggggctcgccggccgcgtcagcgtgtccagcgcgctgtccgccgacacgctggccgccccggacccggagcggtcgggcgtcgtggggcgcgtcctccggtccctcgcgtcggncggctcgccgctggtcctcaagtcgtcagggcccgtcggaggccagcgacgccagggccgacgccgcgtacgccg

SEQ ID NO: 87289 - DNA, 665 bp, Zea mays
  Clone ID: MRT4577_179610C.1
ttttacccgacgcaccggcctctgagtggggcaatggagagatcagctgagagctggtgggtgcttcccatgaccttgataccggccatctccggcgagcaacacggtaacatggcaaccgtagccactagcttcgcctacctcgccatcttcgcatgcctcgcatgggtgggcgcgtccctgctctactgggctcacccaggcggccctgcgtggggcaagtactggagggcgagggggaagaagccgtcggcggcgatcccggggcctaaggggctcccggtggtcggcagcctcggcctcatgtccgggctggcgcaccgctcgctggccgacgaggcgtcgcgccgcccgggggccaagcggctcatggcgctgtcgctcggccccgtccgcgcggtcgtcacgtcccacccggacgtggccaaggagatccttgatagcccggcgttcgccgcccgccccctgaaccacgccgcgtacggcctcatgttccaccgctccatcggcttcgccgagcacggcccgtactggcgcgcgctccggcgcgtcgccgcgggccacctgttcggcccgaggcaggtcgaagccttcgcgccgtaccgcgcggccgtcgccgagggcatcgtcgcggccctgctgcgcgccggctccggcggcgccgt

SEQ ID NO: 87290 - DNA, 376 bp, Zea mays
  Clone ID: MRT4577_179611C.1
tttttttttttatattttttccttttttgaattaaagatttggcgggaaattttttaatttgttaacaattgttttaaacatttttcatttttttttccaaacaccacgattgacctggggggggggggggaaaaaaaaaaaaagtttttaaaaaaaaaaaatggtgcccaggcagggttaatgacctaaaaaagggggggcaaaaaaataaagtagcccccgagaaaattttgaaaattggccataagggacaaacaccgaaaaatataaaacagctgaaacgcgtaaatgacctaaacaaaaatttccaccccccccctgggggtaaaattctaccaacaggaacccattggtaaaagccccggaacacccttt

SEQ ID NO: 87291 - DNA, 364 bp, Zea mays
  unsure (1)..(364): unsure at all n locations
  Clone ID: MRT4577_179612C.1
ccgggcttnagggtattttttttgggctgggcggataaatagagcggtggaggggggcttagtctgcggtcttgcctgggccagcagcaacataggcgctggagaatgccttcacgtcctagggagaggacctcaactccaggtcattaccgaaccgggcagacgtgttttattttgttatccagatgagtttctttatgggggggggaatccatactgggggctataggagaacatgaacagtgggggggtcagagcgtcggaacatcacaagtaaaccatgccctactctgttgcaacccttccaaaacagacacagaatccgcatttggaaatggtgtgcgttacctttacttttgcagga

SEQ ID NO: 87292 - DNA, 153 bp, Zea mays
  unsure (1)..(153): unsure at all n locations
  Clone ID: MRT4577_179613C.1
ggggacgatcataagcccggacatttttttgctgttgtgaggncaagcgcagtagatccccgnncaccatggaggcggctgaagaagctaacgcctatccagagaagaacaggcatgaatacgggttaaagaagcctatactgcatgccctga

SEQ ID NO: 87293 - DNA, 520 bp, Zea mays
  unsure (1)..(520): unsure at all n locations
  Clone ID: MRT4577_179614C.1
ggattcaattcatttggttcgaattaagggccggcgggcccctaacccggcaaaaacattggtgggcccctatgaatgaaccccgctttttttggaccattgatctttggccaacaaggaccgggtttggtggttggttccggattaccctttaccaccctatattggtcaacaccccgcatagattttttttcaccacaagtgggttagagaggggaaaaatcccccttttgcttatgagaagaaaaaaaagaaacccataggtacatcatcactcatgcctcatgccccagaaggggagcctcatcatcttaaaaatataacttggcccccaaaaaaatggccaccacagcttaattttattgcgctttcgaaccgaagcccttattttaaaggaggaggaggagtggtcatcctggcggtggcgcggtttctgaccggctacattgctttgtggaggccggcggtgtgcatcagcaccgccttaatttttttatgtaccattccaggaccatacacn

SEQ ID NO: 87294 - DNA, 348 bp, Zea mays
  Clone ID: MRT4577_179615C.1
attatgatggagcaagtttccttgcatcatgaataaaatttaaaaatctgtgtatgcataatagtttctatgatatatattcaataataaatgacaaaaacggagtaaaaagtgaattcatcattcatgcaaatatataaagaaacttttataaaaaaaattcctcatgttaagtttcggaatttctaaacttgattatttgttaattagctctcattcaaagcccttagtaaggatattggccaacaacgttaccagctctctggtatctgcagaccaaaaatctccatttactgttagtagcaataccgcacccaactttggtagtagttctccagaccatttggg

SEQ ID NO: 87295 - DNA, 303 bp, Zea mays
  Clone ID: MRT4577_179616C.1
cggctcgaggcacgctggccgcagcgccagcacggagggccgcagcagcagcattgccataaccagatggagccacagaagcgggcggcggcggcggaccattccgaggccgccgttgccgccagtctcgccggagggcagcagccgcagcagcgacgacgacgaggcgccggcgctggcgccaccgccgcggcgggcgcagcgccacctcgacatcgacctgaacctgtccatcagcctcgcgaggtaccagccgccggacggaaccggcagcgccatcgagccactgacggcgacgacgaa

SEQ ID NO: 87296 - DNA, 598 bp, Zea mays
  Clone ID: MRT4577_179617C.1
aaacaaaaagccaaaaagggccctttggggggttggccccacaggaaaaaaaaatggcccataaaggccgtttttttcaaaaagcccccttggggggaaaaaaaaaacccccccccgtttaaataaatgggacaaaggccggcgggggggggaaaaaagggaaatgcggggggggagcccccccccgggaacccccggttgggaaaagggtttgaaaattttgaacggaaaaaccccgggcccgaaggggtttttggggcccaggttgttgttgccctcggaaaaaaacccctggattttttttttccggccggcaaatttttaaaacgccgctttaacaaggggctcccccagccaaaagggttccgaaaaccccccaatgttctccttgtgggggaagggcaaaaaaaggatgcccaggggcgaaaaaaccttgggggcctgcattggggggggaaaaatgtccaaaagggttttttcggggtgttggagaaatttttaaattttttggccgggcccgcctttttaaaggggaatgtttttccggaggggggccccccggttgggaaaatacccggaaaaggggccctgcccaaat

SEQ ID NO: 87297 - DNA, 301 bp, Zea mays
  Clone ID: MRT4577_179618C.1
tttttttttttttttttgttttttttcttttttttttgttttatttttttcgggttttttcattttttatttttctttggggaagaaaaatctgggcacaatctgatggccctagttcatcccttcaccctgaattggccaggataaacacatccggtggccccccctgatacactgcgaccaaaccttgctaaaccccgccagggggggggttgcttccatcttaccacaaggggttggccccaatgccggggatcaaaccggaacttttcaacaaattctaagggcctttttggaaggg

SEQ ID NO: 87298 - DNA, 365 bp, Zea mays
  unsure (1)..(365): unsure at all n locations
  Clone ID: MRT4577_179619C.1
gcggggttgctgcctttctaccagcagtttgcggctaaccccgcaaccctcttacaactacacacaattgttcgccctttgtccaacttgctnttgacaggacccatgcggcccttctaccaacaacacanctcattggctggtgccgctctctttagatgtgcttatgtagttgtcacttcacctaatcgaagttttcttggatgtatgtgctgtgcgccctcgccgatttggtcaagctacagtttccggatctttaatgctgctgtcgggtgtgtgtgcgttccgcgcctgcgtggcgcgctgctctctgcccgcgcgcctttgcgcccgcctcctttcggctttcttcgccttgcctttct

SEQ ID NO: 87299 - DNA, 388 bp, Zea mays
  unsure (1)..(388): unsure at all n locations
  Clone ID: MRT4577_17961C.1
cnnactaatatttttctcttcccagcagcaccaaaagggtgggcgggtcaaaggaaaacagcggaccgagccacaaagcaatggaaaaagcccccagcaaattcatggcgaggaggaccacccatttccacacgcaaaagaggcaacacacccaaggggaaaaagaggatccagacaaagagaacccacgagatcaccccagaacaacccaaaacacgcgggggacaactccaggtcaagaacaagactcatgagccctactacccaaacagaggagcaaagaaacaagaagagggggggcagaaagaagagaacagcccaccaaaggcggggggggcccaaccaaaaacgacgggaaccgggcggaggccctaagagccacccgcca

SEQ ID NO: 87300 - DNA, 289 bp, Zea mays
  Clone ID: MRT4577_179620C.1
gctgccacaaaaagccattacccccaaccggcgtctgttacaaaaccctattgtgtatggggccagccccaccatatacaatcaccaacaccgactgctcatccattccgtcctcaccctcgcaggcaccaccaccagttggcaacttcggcttcgaggactccaacccgatcctacctaacaaactaccgcgcggactccgcgctcgagtccaccttcttcacctctctacagcgcactcgcgacgcgcttcgcttctcacgcttcgccgtcaggtacggcaagaact

SEQ ID NO: 87301 - DNA, 212 bp, Zea mays
  Clone ID: MRT4577_179621C.1
ctctcctggcctggcggcggcgcccccgactgaggaggagacgactacgacctaatcacaaccaccggcgacatacgcaatagtagtaccggcggactccatcgacgatcatatttaacgactatggcctggataattctactcaccaactaaagtgatcaaaaatggtggtttttgcacctctcaccgtcttcaaagtcggcgaaaagcac

SEQ ID NO: 87302 - DNA, 401 bp, Zea mays
  unsure (1)..(401): unsure at all n locations
  Clone ID: MRT4577_179622C.1
ttatttttttttttgtngggcctcttgtggggttttaccgcgttttcccctttttcggggggttttttttttttttttttttaaaaaaggggggaaggggccttttttttttggggggaaaaaaaagggtttgggcaaagcccatatggcgccccaccaccccgtttttaaaccggggggaaaccccctttttttaaaaagggtaaaaaagggcccgggccccaggccaaaccgggggggggggacaatggcccccatttgggggggggggccaagaccctcttttgggggcccccactttgggggccaaaaagcccttgggttttggccggatatgggactgccctatcgtttcgggggttacctttttgaaaaaccgcccgtttaagggggcccccaac

SEQ ID NO: 87303 - DNA, 432 bp, Zea mays
  Clone ID: MRT4577_179623C.1
aaaaaaaaaaaaatttctgggggcccccccaaaaatttttaagctgggtttatgaaacatccccattggtcttatgggggggaaccctactttgcaacccacagaagcccgacttcgtttttttgccaaattaaattaaaaaatgttctttggggctccccccccgggaaataagactcccagatcccctcgggggacttttgcgaaccacaagggctagattttttatgcgagctccaaaacaagggctggtgctccccctccaccgggggagacaccagcaactccgattttgccactttttgccctgggaaccccaatagggggaaccaaaatgggggcccccctgcccccgaggggggggcctaaagatccagctcccccaagaacattaattttttttgaagggattccaagaagcttttgatttgc

SEQ ID NO: 87304 - DNA, 470 bp, Zea mays
  Clone ID: MRT4577_179624C.1
ggccgggaaggtttccttccctcctgatcagtatcgaaattgtagtgccctagacttgttctcctccgccgcctattgggagctccccatcttcctccggcgaccatggcgacccatatcagtcagataaagaaattcgccaggggcgcggggttctacgccgaggtcaatgagatggtgacgcgggagctcccggaggacggctactccggtgcggaggtgcgcgtcacaccgatgcgcacgagagatcatcatccgcgccacgcgcacgcataacgtgctcggtgagaaagaccgcaggatcaaggaggtcacgtctgtcggccagaagaggttttattttttttataacggcgcccagctctacgccgagaaggtcgtcaaccgcaggctctgcgccatcgcgcaagctgagtccctccgctacaagctcctcggaggccttgccgtccggagggcctgatatggtg

SEQ ID NO: 87305 - DNA, 1365 bp, Zea mays
  Clone ID: MRT4577_179625C.1
atggatcctaagggaaagaggatggtggtcaacgacaaggagaaggagtccttcctcaacgagccaagggacgataagcccactgactctggctcaagtcataagaaggacgggaagaagaagaggcgcatcaagaagatcgtctactacgacagcgacgggtcttcttcttccccaagagacgacgactacgacgagaaaaagaaactgtacggatctgtattcattaacgaacaaattcataagaatgcacaagctaccactgttttgttagcatcattgtgcagggatgaatacaacaaggtgagtggcttggacaacgccaagcaaatatgggacaccctcaagatttcacatgaggggaacgacgccaccatgatcaccaaaatggagttggtggaaggcgagctaggaaggtttgccatgatcatgggagaggagccaacgcaaacatacaacaggctaaagaccctggtcaacaagatcaggagctatggaagcacgagatggacggaccacgacgtcgtccgacttatgctcaggtcttttactgtcattgaccctcatcttgtgaacctcatccgtgaaaatcccaggtacacaaagatgacacccgaggagatactcggaaagtttgtaagcgggcgtatgatggtcaaggaagctagatatgttgatggtgcattgaacggcacaatgcccatctatgagccccagcctgtcacactcaaggcaacaagcagtaacagggaggcgctacctagcaaggtggcacaagttgaggctaccgggctaaacgaagatgagatggccctcatcatcaagcgcttcaagaccgcgctaaaaggacgcaaggagcatcccaacaagagcaaagcaaagggaaagtgctcctgttttaaatgtggtaagactggtcattttatagcgaattgtctcgataatgctaatgaccaggaacaagaaaagagcaggaagagggagaagaagaaggcctacaagaaggcgaagggcgaggtgcaccttggcaaagaatgggattcagattgctcttcttccgactccgacgacgaaggactcgccgcctcggccttcaacaagtcgtctctcttcccccaacgagcgtcatacttgcctcatggcaaaggagaaaaagagcatgttgtcatttgtaataggtgcaaggattttgatgttgatgcatgtgttgaacaccttacttctattacaaaattaaatggtgaagtggcaagtcttaatgcccaacttaagacttgcaaaaatgactttgataagttaaaatttgctagggatacctacaccgttggtagacatccctcaattaaggatggacttggcttttga

SEQ ID NO: 87306 - DNA, 1770 bp, Zea mays
  Clone ID: MRT4577_179626C.1
atggatcctaagggaaaggggatggtggtcaatgataaggagaaggagtccatcttcaacgagccgagggatgacaagcccactgactctggctcaagtcataagaagaaggacgggaagaagaagaggcgtatcaagaagatcgtctactacgatagcgacgagtcttcttcttccccaagagacgacgactacgacgagaaaaagaaatcggttaactcaaatttttcatttgattattcttgtattccatataattccaatgcccatttgctttctattcctcttggtaaacctccacactttgatggagaggactacgctttttggagtcacaaaatgtgtagtcaccttttctctctccatcctagtatttgggagatagttgagaatggaatacaatttgatagtacggataaccctgtattcattaacgaacaaattcataagaatgcacaagctaccactattttgttagcatcattgtgcagggatgaatacaacaaggtgagcggcttggacaacaccaagcaaatatgggacaccctaaaaatatcgcatgaagggaacgacgccaccatgatcaccaaaatggagttggtggaaggagagctaggaaggtttgccatgatcaggggagaggagccgacacaaacgtacaacagactcaagaccctggtcaacaagatcaggagctatggaagcacgagatggacggaccacgacatcatccgacttatgctcaggtctttcactgttattgaccctcatcttgtgaacctcatacgtgaaaatcccaggtacacaaagatgacgcccgaggagatactcggaaagtttgttagcgggcgtatgatggtcaaggaagcacgatatgttgatgatgcattgaacggccccatgcccgtctacgagcctcaacccgttgctctcaaagcaacaagtagcagggaggcgctacctagcaaggtggcacaagttgaggctgccgggctaaatgaagatgaaatggccctcatcatcaagcgcttcaagacggcgctaaaaggacgcaaggagcatcccaacaagagcaaagcaaagggaaagcgatcctgttttaaatgtggtaagactggtcatttcatagcaaattgtcccgataatgctaatgaccaggaacaagaaaagaacgagaagagggaaaagaagaaggcctacaagaaggcgaagggcgaggcgcaccttggcaaagagtgggattcagattgctcttcgtccgactccgacgacgaaggactcaccgcctcggccttcaacaagtcatctctcttccccaacgagcgccacacctgcctcatggcaaaggagaaaaagaatagacttttagaaagcaagaggatattttatatgaagagcatgataaggttgtgtaaggattttgatgttgatgcatgtgttgagcaccttacttctattacaaaattaaatggtgaagtgacaagtcttaatgcccaacttaagacttgcaaaaatgactttgataagttaaaatttgctagggatgcctacaccgttggtagacatccctcaattaaggatggacatgggtttcgaaaggaagtcaagaacctaacaagccaaagggctcccattcccaacaaggagaaagggaaggcccctatggctagtagtaatcaaaagaatcatgctttcatgtataatgatagaaaatttctagaagttctcattataataggagttataatgcttttgattcacatgccatga

SEQ ID NO: 87307 - DNA, 1873 bp, Zea mays
  unsure (1)..(1873): unsure at all n locations
  Clone ID: MRT4577_179627C.1
ctccactccccccttcacanatccgttcctccagctagggttagcgttcctctgcagcgatggcgatcaagcggaccaaggcggagaagaagatcgcgtacgacaagaagctgtgcagcctgctcgatgagtacaccaaggtgctcatcgccctcgccgacaacgtcggttccaagcagctccaggacatccgccggggcctcaggggcgactcggtggtgctcatggggaagaacacgctcatcaggcgctgcatcaaggtgtacgccgagaagaccggtaaccacacctttgacccgctcatggacctcctggtcggcaacgtaggcctcatcttcaccaagggagacctcaaggaggtgcgcgaggaggtcgccaagtacaaggtgggggctccggctcgtgttggtctggttgctccagttgatgttgttgtgccccctggcaacactggtctggatccgtcccagacctctttcttccaggtgcttaacatccccaccaagattaacaagggtaccgtggaaattatcacccctgtggagctgatcaagaagggtgaaaaggtgggctcgtccgagtctgccctgctcgccaagctgggtatccgccccttctcgtacggcctccaggtcaccagtgtctacgaggatgggtccgtgttcagccctgaggtgctcgacctttctgaggaggacctgattgagaagtttgccactggtgtctccatggttgcctccctgtcactggcgatctcgtacccgccccggttgctgctggggactctggcgctgcagctgctcccaaggaagaagagaaggctgcggagcctgaagaggagtcggacgaggaaatgggcttcagcctcttcgacgactagagctgctgttttcgtcaaactgctgcaagttttggcttttttttttatcatctacaagtactgtttcctatattttttagcagacaaattatcgtgtgtaatcgacaatgatatctccttaaattttaaaaaaaaaaaaaaaaacggacgcgtgggcggcttcgaaggattcggacaccactacagcagagcgtccagcggcaagctggactgggcagagagcatgattctcatcacgcagccagtcaaggacaggaacatggagatgtggcctacaaatccacccacgttcagggacgcgctcgacgtctactcggtagagatgatcggcctcgcaatgcggctcctggggttcatggcggccgacctcggggtggagccggaggcgctgcaggacgccttcacggggaagcggcagagcatggcggtccaccactacccgccctgccgccagcgggagaaggtgatgggcatcacgccgcacacggacgggctgggcctcacgctgctgctgcacgtggacgacacgcccggcctgcagatccgcaggggcggcaggtggttccccgtgcgcccgctgccgggcgccttcgtcgtcaacgtcgccgacatcctggacgtgctcaccaacggcgcctacaccagcgtcgagcaccgggtgctcccggacgccgagagggcccggaccaccgtcgtcgtgttccaggaggcgtccgtcgggggcctggtggcgccgctgccggggctcctcgaccagcagggcgcgcgcgcgcgctacaggtccattgagatcgaggagtacatcaagggcaacttcaacgcgctggagcaagggacacggttcatccagagcctcaggatatagccatctagttgctccttccatccaaaaataattgcccaccatatcgataaatcaatcaatctcaatcttcaccaatcatatccatatcttccgtatctaatattaaagagagtgttaatttcttcctc

SEQ ID NO: 87308 - DNA, 303 bp, Zea mays
  Clone ID: MRT4577_179628C.1
cttttgagatctgaaatctattgaaattttatcataatcctgtagttctttcatctacaatttgaatgtttacttgtatgtatgattttacaatggtaacatttcattcctctttggttttgatatcttgttgataatgatcaaaatttggtattctttggtgtttggtcccaccatgttgtactaaaattagctttttggtcattatatgtagcggtccctgttcaaactgatccaacactaacctagcattgatttatgattcttaagcaacaaatagtataaactctatttgatattggg

SEQ ID NO: 87309 - DNA, 553 bp, Zea mays
  unsure (1)..(553): unsure at all n locations
  Clone ID: MRT4577_179629C.1
agatcgagccggccgcctcggccgggcgggcgcgtctcggtccttcgttgccgtcgctgtccccatccagcttctcgacagatccgctggcccgcaggccgcaccacggaaagctctatgcattgctcttgcgaggaagggtctgtttgtgactgtcatcgacctctctgaagaaaacggaagagaagttgcttcattagttcaaaaggaaaacaaacatgtccatcaatatgctagagttccatccgccatattcatcaagtgtgatgttaccaatggagaggatcttgctgctgcttttcgaaaacatgtggacacatttggtggactagatgtatgcatcaattgtgctggatttgtcaacaaatcgttggtttacgatgataaatctgacggaacttccacttggaggcgtgctgtaaatgtgaatcttgttgctgntatcgatgggacgcgcattgcatctcaagtaatgcgatcccagaagaagcccggcgtcataataaatattagctcagttgctggcatatatcctatgagctatgaacctgtg

SEQ ID NO: 87310 - DNA, 162 bp, Zea mays
  unsure (1)..(162): unsure at all n locations
  Clone ID: MRT4577_17962C.1
gagataactcaagaggaggaataaaaagtanctgctcttgttacctctngaagcactactgatcaaacatggatgatgactccctnaatcaatggaagatccatggcaccaagacccaactagcacctgacatataaganaccaaagttccacacaanatag

SEQ ID NO: 87311 - DNA, 325 bp, Zea mays
  Clone ID: MRT4577_179631C.1
acgaggcaaaaatgttcgtatatgggatcggaatcatttgctgtgatattaagcctatcctgaagccaaaggacatgagatcggaattcctcggggaattccaatgacacatactcaagaaatctggtggcaaaaatgtccatatatgaacaggcattatttgtgctcttattaagcctatcctgaaaccaaaggaaatgagatcggaattcctcgcagaattccaattccacattttcaagaaataaggatgcaaaaatgtgcatatagcaatttggaattatatgggtttcttattatgcctatcctgaatccaaaagaaatg

SEQ ID NO: 87312 - DNA, 274 bp, Zea mays
  Clone ID: MRT4577_179633C.1
cgctgctggttcgggcagagtccgacggtaaggttattggaactgtagaataggggatagtgcctctggttggggcacagtgtgtgtttagggccctgggcccgttaccgttgctactccttcgggacagcgcgttggttctgagactggctcttgtgtacggcaaaaacaaagtactgtacttttgactggacttatcctcagagaccgagactctctgtccttctcccatctctcttaaggattggactccttcctttccagtccctcctct

SEQ ID NO: 87313 - DNA, 296 bp, Zea mays
  unsure (1)..(296): unsure at all n locations
  Clone ID: MRT4577_179634C.1
ccataatcatacaaagcccccgcaccaataggatcctcccgaatcaaccctgacccctctccttcataaattattcagcttcctacactattaaagtttaccacaaccaccaccccatcatactctttcacccacagcaccaatcctacctcnntcgctaaccccactaaaacactcaccaagacctcaacccctgacccccatgcctcaggatactcctcaatagccatcgctgtagtatatccaaagacaaccatcattccccctanatnaattanaaaaatattaancccata

SEQ ID NO: 87314 - DNA, 382 bp, Zea mays
  Clone ID: MRT4577_179635C.1
ccaccaccacgcccactcccgctacggccacgggctcatcatgcggtcgccggtgtcgcccatggacgcctacatggtgctggcggcctccgcgtcgccgtcgccgtcgccgtcgccgtcgagcggcggcgcggtggtgacgataagcagggaggaggaggagcgggaggagaaagccatcgcctccaagggcttctacctgcacgcgtcgccaaggggtggtgacggcgaccggcccatgctgctgccgctgttccccgtccaatcacccaggatcagtgaactccggcgaggctagcaagctagtcatgtgtggctaattcaccgttagtgacatatatatatgcatgtaccgccctttatatatatattttgcggctag

SEQ ID NO: 87315 - DNA, 256 bp, Zea mays
  Clone ID: MRT4577_179636C.1
cggtgtacggcgtggcgtacgcgtcgccgccgccgccggggaagccgtactagtaaaccacgccttggccgctcgctcgcgctgcctcgccgtcgccgtcgccggagtataatacttttccagccgccagtataatacttctccatgcatccatatccatctagtattttttttctcttggtttcgtttttttttctttctttctttgtatctcatgatgagtatttgatcaaattgaatcaaagagttgctatgt

SEQ ID NO: 87316 - DNA, 1814 bp, Zea mays
  Clone ID: MRT4577_179637C.1
gaccggactttcggtgtgcctttatgcatcttgttcttccaatggagattcgacctgcctgcgcgtgtagttgaacctttcttctccatccttgtaatggtttagcacataacagactatttcttcttgctgaccacactattgcgggcagcgtcgctttacctttgcagtagctgcatataccatctcaaacgaaagacaaaaaaaattgcaaaatttacagtgtttatatagatagatcgtagatagaaagaatcagtgcaaattttactagctcagtttgcaggatacaacaagaatttcctgaataacaaggggaaaatgccaaagatgaccttctaaacatgagagtgagttcaggtgtacacttgcagactcaacacagttgcgcttttttatttcaggagagacagggcacacaagtctaaatggactcaaattcagtaactcatgccgaaacttgaacaagaatgtaacaatgaactaaaacgaggatctactaacacaactcaccacggcgaacaagaatggccggcgtccagcttaagccttctaagcgattcttctcacagaaggggttggacatcaagtatcgacaggaatatccaagctgttttcttcgggttctgtggttacttcccttacatcagacacttcggaagaacggggatcgtcccattcggtgtccccgaccgtagggatgtcgactccctcgtcgtccaactcaacaacgttctccgtaaccggtactgaatccggatcgcttacgcaagctttgtcaacgttatcatcctccatgtgcttcgaggcagtcgagcagagttccgagctctcttcgcagacctgtatcgtgctagtctcttgcctttgtatttgggattgtagagcatccacaagggctaggagatcctccttttctttggtggcagactcaagtcggttcatggcttcttttatgcggatgtcagcatctgctgctgagaccctagctttctcttcggctctgacaacagccgcttctagaattacagcgtttcctctagcttttcctagctccgagcgccacatctgagcttcttgaagagcggaatctctctctgtaagcaagcgatctctctcttcaacaagaagctttgctttctcctccgattcccttaacctaagcaaagatgcttcaacttgtttctcgtggtcttgtttcagccgttcaagttctaacgtaaaaaatcttctctcttcatcaattgaacgtgctgcagaagcagctgtttcagctgcttctgcagtctcctgtaatttatccgcaatttcattgatggtagaatcgcgtgcacgaatatcctgcaataattggtgtagttcgtcgtctttaactcgaagggtctccatcattattgtgagatcatctaattgacctttggtaagtttatgtgtagttgagcccaaagctgcccgtagggaaatcttcattgcggcttctacctcctttgttgcttcaattgcagtggcattggctacagccacaacagttgcaactgttcccaattttgcaggaccattctcacccaatgaattcacggcctccttatgagcctgtagcaccaactgagtcgcacgtgtcggaccgcttcaagagagggccctggaggaggtggcgggtggaggtggaggagagctggcgccgcacccggtccaatctgctctgcatctcgcccacaaccgtgctgctgctcctgttcgaggccatggctgccgctgccggccggacaggcggcgcggaagaagaggaatcagaccaagaccgacgacccccg

SEQ ID NO: 87317 - DNA, 483 bp, Zea mays
  unsure (1)..(483): unsure at all n locations
  Clone ID: MRT4577_179638C.1
ttccgcgccgcctgtccggccggcagcggcagccatggcctcgaacaggagcagcagcacggttgtgggcgagatgcagagcagattggaccgggtgcggcgccagctctcctccacctccacccgccacctcctccagggccctctcttgaagcggtccgacacgctaagaaagtggaatgagcgctgggtcatccttgatccagcaactggaaagatagaatacaaggtcaataggagtgacaaagatgttaggggagtagtcgtgttcgattcaacaagcacaagtgactttgtcgcctacgaactttcatggactgggcaaaatacgaaggatgctgtttctgtatccatacggtggtatcttttgcgtttgtcatgtttactccccttctccctttttggtccgcaatttgggttccgtttggaantcctttgaactaagtgtttctannatatttggggaactcccaacaagaaaaa

SEQ ID NO: 87318 - DNA, 657 bp, Zea mays
  Clone ID: MRT4577_179639C.1
attgggtacctcgaggccggccgggataaaaggtctgccgtccacaattctatccgactcacttctgtttcctccagtcggaagtttctcgaaaccggatccttctagagccagcttgatgagggacatattttttcaggcaagagactagcacgatacaggtctgcgaagagagctcggaactctgctcgactgcctcgaagcacatggaggatgataacgttgacaaagcttgcgtaagcgatccggattcagtaccggttacggagaacgttgttgagttggacgacgagggagtcgacatccctacggtcggggacaccgaatgggacgatccccgttcttccgaagtgtctgatgtaagggaagtaaccacagaacccgaagaaaacagcttggatattcctgtcgatacttgatgtccaaccccttctgtgagaagaatcgcttagaaggcttaagctggacgccggccattcttgttcgccgtggtgagttgtgttagtagatcctcgttttagttcattgttacattcttgttcaagtttcggcatgagttactgaatttgagtccatttagacttgtgtgccctgtctctcctgaaataaaaaagcgcaactgtgttgagtcacaaaaaaaaaaaaaaaaaagcggcc

SEQ ID NO: 87319 - DNA, 247 bp, Zea mays
  Clone ID: MRT4577_17963C.1
ccccttccttgcaacgtcttagtttttttttggggtaacctaatttaaattaattggccgtggttttccaacgtcgggaattgggaaaaaccttggcgttccccaactaaatggcttgggggaaaatccccttttcgccagttggggtattaccaaaaaggcccgaaccgatcgcctttccaaacagttgcccagcctgattggcaattggaaccccccttgtaccgggcctttaaccccgggggtg

SEQ ID NO: 87320 - DNA, 859 bp, Zea mays
  Clone ID: MRT4577_179640C.1
cggtcttggtctgattcctcttcttccgcgccgcctgtccggccggcagcggcagccatggcctcgaacaggagcagcagcacggttagtccgttaccctctctcttctcttcccgtaccgagccagttaccggccgacgccggcgagttcctttgcgtttccgtatcctttgaggcgggatctcaccgggacctgggaaatttctcttgctcctcgctcttgcgtcgcgtgtgccgccgcgccgcgacacgccacgccacgagcgcaggttgtgggcgagatgcagagcagattggaccgggtgcggcgccagctctcctccacctccacccgccacctcctccagggccctctcttgaagcggtccgacacgctaagaaagtggaatgagcgctgggtcatccttgatccagcaactggaaagatagaatacaaggtcaataggagtgacaaagatgttaggggagtagtcgtgttcgattcaacaagcacagtgactttgtcgcctacgaactttcatggactggcaaaatacgatggatgctgtttctatattggaactccacagaaaaaggaatactttctttgtgcagaaactcccagcgctgcaagagcatgggtatccactttacatgcgactcagttggtgctacaggctcataaggaggccgtgaattcattgggtgagaatggtcctgcaaaattgggaacagttgcaactgttgtggctgtagccaatgccactgcaattgaagcaacaaaggaggtagaagccgcaatgaagatttccctacgggcagctttgggctcaactacacataaacttaccaaaggtcaattagatgatctcacaataat

SEQ ID NO: 87321 - DNA, 802 bp, Zea mays
  Clone ID: MRT4577_179641C.1
actgtaattcagagggctcaactcagtcacagaaacctccccaaattcaagggtttacacataaaccgcacgccgccgccgccgccgccgcccagactctcgtctcccggtcgtgataatggttccactcgatccatgcaacaagcccacctcgcagcgccgcatcacggagggcgacaccgtcgtggtgtacgaacggcacgactcgatgcgcgcagtcaccgtcagcgccgccggcgtactgcagaaccgattcggcgtcttccgccacgccgactggctcggccgccacttcggatccaaggtattcagcagcggcggtgtcggggggcaagggcggtcgcaaggccggcggcgggttcgtccacctcctcgcgcccaccccggtgctttggacgcttgtgctcagccaccggacacagatcctctacattgccgatatcagcctcgtggttgcctacctcgagctcgtccctgggtgcgtcgtgctggagtccgggacgggcagcggttcgctcaccacctctctggcccgcgccgtcgcgccgcatgggcgcgtgtacacgtttgatttccacgaccagagggcagactcggcaaggggaagaattttgagaagaatggcctaagcagccttattacagttgctgttcgggacatacaggagaaggattcccagatgagtactctggagctgcctgatggtgtggtcctggacttaccccagccttggttgggcataccgtcagctggtaaatgctacgaacagatggtgttctatgctccttttcacctgcattga

SEQ ID NO: 87322 - DNA, 1253 bp, Zea mays
  unsure (1)..(1253): unsure at all n locations
  Clone ID: MRT4577_179642C.1
ttgggtacctcgaggccggccgggagcctgtcctcgaacaggagcagcagcacggttagtccgttaccctctctcttctcttcccgtactgagccagttaccggccgacgccggcgagttcctttgcgtttccgtatcctttgaggcgggatctcaccgggacctgggaaatttctcttgctcctcgctcttgcgtcgcgtgtgccgccgcgccgcgacacgccacgccacgagcgcaggttgtgggcgagatgcagagcagattggaccgggtgcggcgccagctctcctccacctccacccgccacctcctccagggccctctcttgaagcggtccgacacgctaagaaagtggaatgagcgctgggtcatccttgatccagcaactggaaagatagaatacaaggtcaataggagtgacaaagatgttaggggagtagtcgtgttcgattcaacaagcacagtgactttgtcgcctacgaactttcatggactggcaaaatacgatggatgctgtttctgtatccatacggtggtatctttgcgttgtcatgtttactctcttctcctttttgtctggcatttggttcgtttgcattctttgactagtgttctagatattggaactccacagaaaaaggaatactttctttgtgcagaaactcccagcgctgcaagagcatgggtatccactttacatgcgactcagttggtgctacaggctcataaggaggccgtgaattcattgggtgagaatggtcctgcaaaattgggaacagttgcaactgttgtggctgtagccaatgccactgcaattgaagcaacaaaggaggtagaagccgcaatgaagatttcccctacgggcagctttgggctcaactacacataaacttaccaaaggtcaattagatgatctcacaataatgatggagacccttcgagttaaagacgacgaactacaccaattattgcaggatattcgtgcacgcgattctaccatcaatgaaattgcggataaattacaggagactgcagaagcagctgaaacagctgcttctgcngcacgttcaattggtgaagagagtagatgttntacgttagaacttgaacggctgtcacaagaccacgtgaaacaagttgaagcctctctgcttaggttttgggaatcggttgagaaagcatagcttcttgttgaagagagagatcgcttgcttacagngagagattccgctctttcagaagctcagatgtg

SEQ ID NO: 87323 - DNA, 274 bp, Zea mays
  Clone ID: MRT4577_179643C.1
ccttttggtgtcccaaacactgtaggaactgtggctggggagcacccatttggagagcacccttccaggaccttgttcgtaaggaacatcaatagcaacgtcgaggactctgaactgcgatctttgtttgagcaatatggggatatccgtaccctttacactgcaacaaagcataggggctttgtaatgatatcttatttcgacatcagagctgcacggaatgcaatgcgcgcattgcagaacaaacctctgaggaggagaaagctggacattc

SEQ ID NO: 87324 - DNA, 197 bp, Zea mays
  Clone ID: MRT4577_179644C.1
cactcggggcggccgccctcgttactttttcttggaattcgaccggagaacacgagccgcctctgccttaataaaaaagacgggtcatggacattcccaacgcaagagagacccccgcgcgggggggagactaaaaaaagaaaggaaagacgcagagggatttcctaggcgggggcgggcacctcaagaggggaaaa

SEQ ID NO: 87325 - DNA, 390 bp, Zea mays
  Clone ID: MRT4577_179645C.1
gcggccgccctttttttttttttttttttttttttttctttttttgggggggggaaacaatatatcaggggcatgggccaaaaatagctgcaaacaaaaacctggccaattcttttatcgtgtggtatcacagcccgggcaaccaaaggggccatcgggggtcccaacaactaagccatgggtagaagcgggcgcttacacctgtgacacacgcatacggagacgcccccctttaatttgaggagatagcgcggccaaagccgggatgggccaatacatacgaccttcaaggacgccaaggtggcgggtgctctgccttcacctcacacccgtgggccaacggccggcaacccccccggttctggagcccgaggaacaaccccttctggt

SEQ ID NO: 87326 - DNA, 599 bp, Zea mays
  Clone ID: MRT4577_179646C.1
tcgttgcgcctacaccctcctcgccgactgactccctctgtggtcggacatccgtccgggtaggacgaagccgtccgctacccatggccttcggtgagctcgcctgcacctacgctcgtcctcgattctcatgcgacgaccgggatcgctcatcactcggcgagaagatcgacaccattgctgaaggcggccaacatcaagacaaagattctactggccggcgctcttctctaaactcctgaaaaaccgcattgttgaggatctaatcctctccaacggatctggcggtggttctgctccatatgctgctgtcgatcccagctgaaggtgctgcatctgatgctgcccctgctgcagatgagaagaaggagagcccaaggaggagtctgttgactacatgggcttataggcctgttcgactgatgatgccctctctacccatccattagcaaatttccttatgctgaacaagacttatgttacactatgtatgtagccttttgttattacaagtactcaattctttagtgatcaagatgtggctatgacaatgtgatgaaaaacgctaaaccatcatattacagtgaaacttgtttcta

SEQ ID NO: 87327 - DNA, 272 bp, Zea mays
  Clone ID: MRT4577_179647C.1
ggcggccgcccgggcgggtaaaaaagataaaagaaagaagacacacatatataaatgtgtaggaatgaccaaataaatataagcataataaaaaaagataaaggtggttgggacctcggtccgggaccacttttggggaaaaattttggaattttccgccacactgggggggtgggtggggacttgcttttaagggggccccagttgggccttttgggtgggcctctttccaatgggactggcacggcgtttttacaagggggggccttgga

SEQ ID NO: 87328 - DNA, 322 bp, Zea mays
  Clone ID: MRT4577_179648C.1
gtcaggtggccacaacgagcgcaagtacaacaggctggtgcttatccaggccatgggatgtcagttctccaaagcgttcaccacgtacgccggatctctcaactgcctcgtaggcaggatgtgctactgcatgcgcatctctaggctgcatgtttcatgattggcgatctgatcgttccacacaacgtcgtgtcgaatatgactgttgagtgtggaatagccgggcgtaatttatgtgtaaccttcaattctttttgttctggcgattgacccacttcaaaaaaaatctaaagagggcggccgattcaggagttccgagctt

SEQ ID NO: 87329 - DNA, 169 bp, Zea mays
  unsure (1)..(169): unsure at all n locations
  Clone ID: MRT4577_179649C.1
acatcactagcctcacccattctggattgtttaaacaagaagatggggctggtcacttcttttgctctatgaancccaattactagctatcatatataaaattaaaaacttcattatatccagtgccacctccaaaatataacgtctcgatagaacaaaaccttattat

SEQ ID NO: 87330 - DNA, 138 bp, Zea mays
  Clone ID: MRT4577_17964C.1
attcggctcgagctttttccaccggcaagtataaaccacacaccgacacgaaggacacgggcaggtttaaaaacggaaagcagatcgagacgacacgagacaacacacaagatgccggctgaggcaagaacgatgatg

SEQ ID NO: 87331 - DNA, 771 bp, Zea mays
  unsure (1)..(771): unsure at all n locations
  Clone ID: MRT4577_179650C.1
aaggcatgaattcggcacgaggcagagacacccacatctctccttaccatgcctgcttcaccctacagcagctacacactagtgctcgggcttttcctcgtctccctgctgctgctgcacagccccaggccgtgctcttgtgcgaattaccacactctcgcggcgggccaggcgctcgctgtcggcgacaccctcgtctccaggaacggcaagttcgcgctcggcttcttcccgtccggcaccaccaccacccccgccgccgccgccagtaagtcctcctccgacatcaacaccaccgccgtctccaactggtacctaggcatctggttcaacaagatcccagtcttcactccggtctggattgctaaccgggatgacccgttcaccgaccccaataataagctcctccccaaaaggactctgcaaatctctagagacgggaaccttgtagtagtccaggaggacaacaacgctcctcagagaactgaaaccctagtcgtttggtccactggaataatcaccaacaacgcatcctccaagaccaccaccagcatcaacaccaacaccaccaacaccgtcgccgagctcacccacaatggcaacctggtggtgcgcgacgcctcggccacggacgcgtncaaggtccgatggcagagcttcgactacccaacagacgtgtacctcccaggatccaagctgggcaggaacaaggtgacggggttgaaccgcgtcttcgtgtcgaggaagaacagggcgaacccggcgcgcggc

SEQ ID NO: 87332 - DNA, 299 bp, Zea mays
  Clone ID: MRT4577_179651C.1
aaagcaaaaacccttaaaaaacaatatggggctttaacaagcaatccaatctggggacaattttttctaaaacaaaccctttgggggtcaattcagccaggacaactatgggttggggtataaaaaaaggacaaagatgggccccaacagggggaactaatttcgccgcacgcctagcacttgatctccttaagaccatgagagaaataggggaatggcggattaggggccccatccttggaataggggaataccacagacgcattatcctttaggggctcaccaacaaaaaattggag

SEQ ID NO: 87333 - DNA, 341 bp, Zea mays
  unsure (1)..(341): unsure at all n locations
  Clone ID: MRT4577_179652C.1
cgggtcgaccgcacggcgtgcggtgatgtaanagcgtgttatggtggngaatgtccgcgaatgcccgtttaaggccaccacgttttctcgtcttaattggatgtccaagctaagtcctctgaaaaaaggggtttttgcttttgaacatggggggcggaagggtcggttagggtttattgctgtctagctggtcccttagtggtggggtgctgcattcgtgtgtggttatggatcatgttttggcttgggcctttggggaggtgatggacttntgtcgggattaangagtggctgaggtggttgtcaagctgcagttgatagttggggggcggtgtgcgtgg

SEQ ID NO: 87334 - DNA, 694 bp, Zea mays
  unsure (1)..(694): unsure at all n locations
  Clone ID: MRT4577_179653C.1
ggggtgccaacaaaagcacacaacaaactatcgggcacaaagtgaagtctggttttccggtagtgttgtctgtttctatgggtctgagggcgacttcttccgataccgatttattgatccacctttttgcgtcatgcctttttgcgtcatgcatagcgtttattttttctagggtcaaaactctggctatcttgccaagcgcagatggtgttgtagaattgcacacctccctggacgggtcgctttgggtgtttgcaccctgtcatgctcgtgctcgtgtcaatagaggatagaccaatccgaccgctaagttatgatgagttggcttgtatggacgttccggttgtaagatttttatatccggtagcctaccaagggggtatccgaggtagtgttttgtgcggtgggggatcgccagacctagaatctgaaggttaaagtgaggacacaagacacatatttatataggttagggccaccaagatagcgtaataccctacgtcctctttgtggtgttgtatattgcaccatacgcttgggtgttgaggtgttatgtgttgatctaggaacccggccctccttttatattgntggaactcgctaactcgtagtcagcctagctcaaacaatggcagaacaggaaatagtttgatgccgattaacacagagtattttgggcaacagtggttttcct

SEQ ID NO: 87335 - DNA, 103 bp, Zea mays
  Clone ID: MRT4577_179654C.1
gcaaaacaacacaaaatatgggtaggataattatatgtaggcctatcgcacacagaggaggttaatgttatactaactgaattccgttatttcacctcctgta

SEQ ID NO: 87336 - DNA, 588 bp, Zea mays
  Clone ID: MRT4577_179655C.1
tttccggatagctaccggaagatgagagctccagctcctcctgttcccgcgctgctctcccgctgctcctcgcgtccctcctcggtcccgctccgcctcctcacctcctctcgcacgccggccgccttctgcccgcctccggccgtcgcccgctctgtctccgtctccgtcgatgcgccggcggccgccacggagccgtctgtcttgggcgcgccctccccgatgccgcgccgtcgcctcatcctcctccgccacggggagagcaccgccgggggccgctccactagaggtatgttcaaattcaaacggcggcgtcttcgacaaattggctgcgcgtgtccaagagtccgtgtgtgttgatttgattgaccctgcactggaaactggataggaaggagcattggatgctgagaattggatgcttgtttgccgcaccctagttagtttctgctaaaatgttgtagctgttgcctctagctctgcgttttattagagtaggggaatgtagtggtatcttgtatagtgctgtgctggtgcattggccatttgggcaagatgaaatgctataggcattatgtctaattggcg

SEQ ID NO: 87337 - DNA, 389 bp, Zea mays
  Clone ID: MRT4577_179656C.1
gtggtgtgatacggctggctgatccccaagccagagagcactcggtttactaaggtgagttcaaatgctatggtgcccatgctaacgccgcgacaaatactatggctgggtgatctctggaccttaccgacgctcaggaccagccatatcgtcggcacacacgtacatactaatgcgatcacgaacttggcgcccaccagaccaagtagactcgcatgccacacaatctatatatatggacacagatcagaatccagatacaccaatctctaatgtcgttactgataacatgttgggcttatatatatatacagacgagctagtgctagctgatgctgttcaaaaaaaaagcacacaggctgccgatctagaggatcactgcttactta

SEQ ID NO: 87338 - DNA, 498 bp, Zea mays
  Clone ID: MRT4577_179657C.1
ctagccttgctttagaattagtcgggatttcaagacctgtccatggccgattatggtcagtttctggagccataaccagcaaatctgcagtgcccaactcataacttcaaccgctgttcatatcatcctatccaataaaaacacaatccttagcttcggttgcatggttatggtcttatcattaacgcgttatgcattctctccttttggcttgtgcttttggtgaagatccattttttattgtaaaactgatgtatccctttaaacatatcactctgctaactgctagtgttgttttttggtgtccaaccagatatttcaaatactgaagttatggtttgctaaccaaaaactgatacatggtagtgggagaaaatgcattaaaaacaactcagcagtactagcttgtatgccacatttggcttgtgcttttggtgaagatccattttttattgtaaaactgatgtatccctttaaacatatcactctgctaactgc

SEQ ID NO: 87339 - DNA, 381 bp, Zea mays
  Clone ID: MRT4577_179658C.1
atggctaaagcgataggaggacaaaaaatgaaccctctggcttccacacttgttttaatatggcaccgaatacgagaaaatgagaagcacaaaacctataaggcatggaacctgaatgagttctatgttggggaagatggcggcgaagcgctcggcgacctcccggctgaggggcgcgccgccgatgccgatgaagaggagggaggagaggtcgcagtggcgcgcatcctcgggggcgtcacgggcagcagcgtgacgcggtaccgctcgatggcgcgcagcgctgcgatgaagtcgaatcggtccatgaggatggcagtctcccccatggccaccgacctcagcccctggattaagcatgtcctagttaagaaagtgtag

SEQ ID NO: 87340 - DNA, 349 bp, Zea mays
  Clone ID: MRT4577_179659C.1
gcttgttgctcgccctaacgaacattggactggaaatttggtctatgatggcgatctgacacggaccacatgccgaggatatgattttcttatgacgctaccagatgctgtaccctacggagcattaatatatcggtgcacagagatcacatgcacgcccacacacgctgatcagatatgtatgatcatcccgcacgttgttacggaaactagcctatagccacccgatgcggtctgcaattcctacgcaagaagcattgcctaccaccgtcctgtcaaagcgcgagatgctggccagatacctacaggacacgctgaaatgctcgtattgcaccggagcatatgctgc

SEQ ID NO: 87341 - DNA, 427 bp, Zea mays
  unsure (1)..(427): unsure at all n locations
  Clone ID: MRT4577_17965C.1
tcggcctgagctgcccggcgcctctgtcctcctccgggctccacaggccttgccaggcatggggttggccttgttgaaaccaccagatttgtgcctcctagaccccagttcctcggcaacaaggtaacctccgtgcccctgctccctttcctgactgctggtgatgaggatgatcctatccggtgcctcctctgtgaacgcctactcctgggcccctgcaactaagagcctccgccggagtcgccgcggagaagctgctgctcgccgtcgcagccgaggtaaacatccgtaacaaaaaaatcattgccaagcccccctccctcttcattcattttgtcgttctagtcagttctctgattcgactgctgtatattatttatctttaattggctntatttatntatttatcctactgggcgcaaggcct

SEQ ID NO: 87342 - DNA, 635 bp, Zea mays
  Clone ID: MRT4577_179660C.1
tgggacctcgagccggccgggaaaaattactccacagagcacgacaactgaaggcggcgcaacagcagggttgcgcacgagcagcgacgacaaggcagcgcacgagcgagtacagcggctgcagcacggatacagccctccctcgcccgcccttcgctctgcgtggctccctcgcctccggcctccgctccgttccgcgtggatccctcgcctccagccaagttcttttcaagattcaagttcttttcagagacccatcccttgctgtactgaagcatattcactagcctactttgaggtagaatttacaaaactttgaggtgtttgtggttcattgacctactttgatgaatacttgatgatagatagtttgttgttattagtaaacagtatttgcaaaagaataatatacaagcaatttcttggcaatatcaaacatgaacctcagtaaagttggctttgattatttattatatatcggtttcagaaatcaggttacaatattacgaagaaattatccattacaaatatggcttttacatgtacttctcctatattaaagatgcctgaatttttagttgatttcagaaaatactcttatacagtcaactagtacaaataaactgttacatttg

SEQ ID NO: 87343 - DNA, 531 bp, Zea mays
  Clone ID: MRT4577_179661C.1
tcttaaatgcatcggtggcccctgaacttgtcaagggatgccacttagatcctcgaactttgaaaatacatttataggtccttgaacttgttaagtgatgtaccacatatcgctaaatttgtaaaaatggtgcatcacatgtctattcctggaccataccgaccactgcggtgtgccacttaacaaggtcaatgacttagaaatgcatttttaaagctcgtggacctaaatggcttcccttgacaagtttaggtgtcgctaatgcatttaactcaaatttgaaatacaaaatagactagaccgaaaagatacaacgaaacagactctaacccaacacaggtgacctggccattagatgattcctgcattacagcatggccacacatagcctggtctagaaatctagccaggtcagggctacacaagttgccaaacagaccctatagctatctggatgtacggtacatgcctagtgcacactatttacaatgagaagggactgatgatactatcatgtagctaattatcgat

SEQ ID NO: 87344 - DNA, 366 bp, Zea mays
  Clone ID: MRT4577_179662C.1
atccaaaaaaagcaggtagacggaagcgggctctttttatttttaagggcgggtagaaccaccctattcaatttattattaaaaaaaaattataggccacacatttgaacccgcaggcggacccgggaggatccccagaaatcccggacccgcccctggaaagcctcccaacattccctatcgggaaacccaccacacttcccaggaagaacagccataaccgattcctgcgggaaaactacaaccggccacaatccccaacaacaaaggagccggccgcaaaaagggaaaaaccagccccgcccaatgagtggaccaacccacctaaattgaggtgccctcactgccccctccaaagggggaaaa

SEQ ID NO: 87345 - DNA, 915 bp, Zea mays
  Clone ID: MRT4577_179663C.1
tgggtacccctcgagccggccgggtctttgaactgataattgcggccgggctttacctcgcgtgcgcgacaactagggcgaccgccgtcgctaaacgcccagctgcccaggtcttcgtcgggcccctcgccggcgacgagcacccaacacaccaggatggcgctgaggggggtctggcagctccagaagctcgtggtaaactactgcgactggggagggagcagcaggggcatcagagccttcatggaggcacatcttccagcgtttaaggaaaagattccacacttagaagtggtgacagagcttgtccgcggtcaacatcctaacttgaagggaatttacaagaaccataacgagcgagtggtctgcgtgagaaatttaccgccagaagaaatactcctgcaagccaccaggctaaggaactctctgggcaggaaagtggtgaagctgcggaccagacacgtaacgaagcggcccagtgtccaggggacgtggacgacggagctgaagatgtgaagccaagctagcagccaaggtgtttcggtgttcttggtggtgtgatcgtagagaaatgtcagctgtgtcaataacttcggtagagagctgccgttatgccagcctatttcgatagccaaactatttacaccttttgttccgactatcaatggtaatgacataggcacacctggagtttctggttagtggcaggccgtcacgttcgacatttcagcctccatgttcctgatatttacagacagttataatgcaaaaggcgacattattttcattcagctgttaagttgggaaaaaacaacctgcttcgtatattagtcccatgttttcaggctgcctcgagcagtattcggtaacgggtccggtacccttgactcgaaaaaaaaaaaaaaaaaagcggcc

SEQ ID NO: 87346 - DNA, 391 bp, Zea mays
  Clone ID: MRT4577_179664C.1
cggcgggagatcccaaaacaaggaaacctcaagacgacgagaagcctttcaacctcctctgcttccgagatctctccccacctcccgggtccgctagcagatagcgggggccagcacagatcgcagatccgggagagagtaggggccacccatcagcgtctgcgggaatggcggaacacggttgacgaggcccggagagcgggcacaaacccctccacggcccggctgggtcaaaggaacaaggctccgaacatccgggaatgcccgaacgaaggcggcccaagggtacgaacttcccgcccaaaaatgggcgggaggggaggttctttacatacccctaaccacgcttcagcataccaggcaaaagaaaggtggggacccgccacccaag

SEQ ID NO: 87347 - DNA, 539 bp, Zea mays
  Clone ID: MRT4577_179665C.1
ccaaatagtagagaaaaacttattgaaagagttctaaacgatacagcaggcttaatgctctgtctaaaggcaaagacatgtcttagctaactgcaaaatgtaaagagttacaaatacttgtttggtaaagccactcaaaaacggaaaatacagcttggttcctttctcggaaatggatagagcttcaagatccagagaggacaccgcggataggtggacagacggatggatctcatttcttcccaccaccggaaacattgaacttgaagaaaatgatatctccatcctgaacaacatatgttttaccctcctgtctgtattttcctgcggccttgactgcaggttcattgccaagttccttgagatcctcgaatttcatgacctcagcacaaataaatcctctctcaaaatcagtatgaatgggccctgcagcttgaggagcctttgactgccgtcttatttgccagcccttcacctcatcaggccctgctgtaaagaagatattgagggtaattgcttgaaatccagttttgatgatc

SEQ ID NO: 87348 - DNA, 815 bp, Zea mays
  Clone ID: MRT4577_179666C.1
cattgggtacctcgaggccggccggggccaggaaacgtcacgtctcccagatctaactccccccgactcacgaatcccagagagcctccatggcgacgcaccgccactgcctccctgctgggcgggtggaacccgatccctgacgtgagcgactcgcacatccaggagctaggcgggtgggcgctggggcaggcgaagcaccagaagctggccgccgacgggctgcggttccgccgcgtggtgcgcggcgagcagcaggtcgtgtccgggatgaactaccgcctctacgtcgacgccgccgaccccgccggccgcaccgtgccctacgtcgccgtcgtgtacgagcaggtctggacccgcacccgccagctcgcctccttcaacccggtgccccgcgcccactgaaaccatacgcacacgggtgggccgaagcgacgttctccgtcaattacgtgtcgagctaatcttattattgtttctattattataataatgcttctccctgttcctatggacctatagtagtatactagtatgttgcgagggagcgagtagaccgtgtgtttcgctatcgtgggactagaataagccatgtcaatgaacatgagccgaatagaggctacgtactgttattgtatcagtactagtaccatatatatatatgggcgcactacagtctgtgatgtaatggattgtgctagtatttgactcttgcttttgtacagaattattattattttatatggtgttctaggatttactgcacggggttttagttaacctgcaaaaagaaaaaaaaaaaaaaaaaagcggcc

SEQ ID NO: 87349 - DNA, 463 bp, Zea mays
  unsure (1)..(463): unsure at all n locations
  Clone ID: MRT4577_179667C.1
gccactcgcaagtgctgtttttttttccgtccttttnggagggaaaacgtngcagcttanacagtccacggaccaagttttttttttttttttccaaatncaccccacaggggggggggggagggttttttttttaaccngccccnngancaaagggnnggggcactggtggggggggnnacccccccccccttggaacgttgtggagtcggttttgtcgcgccggcacagctctgctctgcctcttataggcgccgctcantgctgtccgggcngcttctccttgttcttgtccttattgccttttttctcgccggtgccctctgtgccggtggcgttggccctgtcggtgtgtccctgctgcccgtgggcgctgccgttgtgtccttgctgccctttgcgccgtcggtcgttgccgtggtgtgttggtcgtncttgtggcctcggggcggcttttctttgt

SEQ ID NO: 87350 - DNA, 1655 bp, Zea mays
  Clone ID: MRT4577_179668C.1
ttcatcgtccatttaagtgccgtggcccctcgctcggcgaccggggccggcgtcattgggaacctcgaggccggccgggaggaaggaaacagtcacgtctcccagatctaactccccccgactcacgaatcccagagagcctccatggcgacgcaccgccactgcctcccactcctcctcgtggccgccgccctcgccctcgccgccgtccctgctcgcgcggcgctgggcggcgggcgcggcccgctgctgggcgggtggaacccgatccctgacgtgagcgactcgcacatccaggagctaggcgggtgggcgctggggcaggcgaagcaccagaagctggccgccgacgggctgcggttccgccgcgtggtgcgcggcgagcagcaggtcgtgtccgggatgaactaccgcctctacgtcgacgccgccgaccccgccggccgcaccgtgccctacgtcgccgtcgtgtacgagcaggtctggacccgcacccgccagctcgcctccttcaacccggtgccccgcgcccactgaaaccatacggacacgggtgggccgaagcgaccacgacgatgttctccgtcaattacgtgtcgagctaatcttattattgtttctattattataataatgcttctccctgttcctatggacctatagtagtatactagtatgttgcgagggagcgagtagaccgtgtgtttcgctatcgtgggactagaataagccatgtcaatgaacatgagccgaatagaggctacgtactgttattgtatcagtactagtaccctatatatatgggcgcactacagttctgtgatgtaatggattctgctagtatttgactcttgtgcttttgtacagaaaaaaaaaaaaaaaaaaaaaaaaaaaaaaaaaaaaaaaggaaaaaaaaaaaaaaaaaagccgcctagacaactgcacttccctcgtctcagggaggaactcctcttgactaccaagctgtgtaccccttacaatactcccaccgctccgttcaagtagagggtgctcgacaagctcatgagggagatcaccattgatattgctctgtggaatttgagaccaccaagttttcccctggacaccgtgacttcatcaagaacatgatcactgcctcccaactgtccttatcattgactccaccactgtgaggctggtatctccaaggatggccagatgctttcacacttggatcactcccagaattattattattttatagggtgttctaggatgtacttactgcacggggttttagttaaccttcacatgagatcttttggaacgtgtttcgtagcatttttgtagatggattctgtcaagcatgcaggaatcctgcagctgctgcggcctcgctggatccctcagtttcctaggcacgtgaacccctgatcatcagatatggtactgtgtgtgtactagcgtcgaacagctggatcgcgctggacggatggagcgatttggatgtgttcacgtggatgcctgctctgcacggctgctatccataaacaattccttggtccttcgatggggagggactgacgaaagaggaaagactccacctgtagccaatccttttctgtttggttcaaatattaattgtatactgtaaatataatattttattacac

SEQ ID NO: 87351 - DNA, 1585 bp, Zea mays
  Clone ID: MRT4577_179669C.1
gcacgaggcgacagcacgttcctccgcttgaataatctcgacatcaacggcgacgacgcgccgtcgtcgcaggctcctacgagcaagaagaaaaggagaggcacacgggcagtgggtcctgataaaggtaaccggggactgcgccagtttagtatgaaagtttgtgagaaagttgaaagtaaagggagaacaacatataatgaggtggcagatgaacttgttgctgagtttacagaccccaacaataatattgaggcaccagatcctgataaccctaacgcgcaacaatatgatgagaaaaatatacgacgaagagtttatgatgctttgaatgttctgatggctatggacattatatctaaagataaaaaggagatccagtggaagggcttgccgcgtactagtataagtgacattgaagaaatgaagacggagcttgtgggactgaaaggtaggattgaaaagaaaagtgcttacctacaggagctacaagaccaatatgtaggtctgcaaaacctgattcaacgaaatgagcaatcatatggttcaggaaacacgccttctggtggagtggctttgccatttatcctagttcagacccgacctcatgctaccgtggaagttgagatatcagaagatatgcagctggtgcattttgacttcaatagcaccccattcgagctgcacgacgactcatacgtcctaaaagaaatgcgattctgtggaagagaacaacatgacagcactcaagagtcgatatcaaatggaggtgagagctcaagcgtgtcaaatatttattggcaacacgtacagcatgtggaaaggccaaacaatggcacaggtaggttaccgagctcaccgcctattccagggatcttgaaagggcgtgcgaagcacgagcactaacgctagggtgttggttcactttccttttcgtctgagcagttggttttattgcatttctccgttgtgtaaagggccctgtaaattattaggcaagcgggagcgtagcttgatctaatttagctctgcaccagattggtagaacgacgggtgctctaagtagttgtgtaactataactatccttgaatcggtttctttagtatggttgagagaagggttgacatgtaattttgtagagccttgtaaaattaaaattgttgatttctatcagggtgaaatttctgggcacaaaaaaaaaaaaaaaaaaaaaaaaaaaaaaaaaaaaaaaaaaaaaaaaggcacagttaggttatcaagctcaccgcctattccagggatattaaaagggcgtgtgaagcacgagcactagcgcttcggttttggttccactggcgttgtcgtctgagagcagtttgttttattacttttctccgttgtgtaaagcgcctgtaaattattaggcaagggggagggtagtagctctgatctgatttagctctgcattggtagaacgacgggtgttaattctatatccttgaatcggttctttcggtatggttgagaaaagggttgacatgtaattttgtaaagcattgtaaaattaaaattgttgatttctatcagggtgaaatttctgggccc

SEQ ID NO: 87352 - DNA, 212 bp, Zea mays
  Clone ID: MRT4577_17966C.1
ataattacacccgcgggcccccaccgaaggggaggcactaatgcacaagagggggagcaccacccgcagacgaccaaacaccaggaacgggacagcgagagagagccggagaaagaacacggggcgaggaacagcgacaaccacgccgaggaggaaacgccacacccaagacggggccaaggcacagacaccggcaggcgagccaaacaagc

SEQ ID NO: 87353 - DNA, 967 bp, Zea mays
  unsure (1)..(967): unsure at all n locations
  Clone ID: MRT4577_179670C.1
gccggccgttttcaaaaaagtcacgtctcccagatctatctccccccgactcacgaatcccagagagcctccatggcgacgcaccgccactgcctcccactcctccctgctcgcgcggcccgctgctgggcgggtggaacccgatccctgacgtgagcgactcgcacatccaggagctaggcgggtgggcgctggggcaggcgaagcaccagaagctggccgccgacgggctgcggttccgccgcgtggtgcgcggcgagcagcaggtcgtgtccgggatgaactaccgcctctacgtcgacgccgccgaccccgccggccgcaccgtgccctacgtcgccgtcgtgtacgagcaggtctggacccgcacccgccagctcgcctccttcaacccggtgccccgcgcccactgaaaccatacgcacacgggtgggccgaagcgacgttctccgtcaattacgtgtcgagctaatcttattattgtttctattattataataatgcttctccctgttcctatggacctatagtagtatactagtatgttgcgagggagcgagtagaccgtgtgtttcgctatcgtgggactagaataagccatgtcaatgaacatgagccgaatagaggctacgtactgttattgtatcagtactagtaccatatatatatatgggcgcactacagtctgtgatgtaatggattgtgctagtatttgactaaaaaaaaaaaaaaaaaaaaaaaaaaaaaaaaaaaaaaaaaaaaaaaaaaaaaaaaaaaaaaaaaaaaaaaaaaaaaaaaaaaanaaaaaaaaaaaaaaaaaaaaaaaaaaaaaaaaagggggggcccttttttggggttccaggtttccttcccgttgcttgccacgnctaactttttttttggggccccctaatttaatttacggggccgggtttttacaccgtgggggcggggaaaacccctgggg

SEQ ID NO: 87354 - DNA, 180 bp, Zea mays
  Clone ID: MRT4577_179671C.1
aaaaaaaatgggggtagacatatccaagaaattcttcggtaacacaacataattcagatcaagattaaaatgggtcaacctacattctatacacagccaaaaggtggcactacggtatcagctaactattctgccctaaaattccattttacatacctaccttagtgcttttgttcagac

SEQ ID NO: 87355 - DNA, 598 bp, Zea mays
  Clone ID: MRT4577_179672C.1
attctgaaattcaagcccgatcttctgtggtcttccccgtatctcgggctccgccgtaaccctagcctcggctatccgcttgccgaagggaaggagggatctctcagaggcgcccatggaggctgaagtttgtgtacgacaagcgcgagcgggagctcctggagagctacgcctacactgacacgatcatcaaggtcttggagaagctggaacggaactacattggaaacctagattaagtcgacaactacgaggaagaccgccttaagcttatgttccagcttatacatacgtttcctgctcgctcgccggcgccttcatatgtcctctctttttgtgcagaagagccagctggattgacaggtcgatctcaatcgtctgatctggtgggggaagaagggcagcgcttagcttggtgacgtgagcgcttaaatcgtgccgaacgttggcgtcgcctgggtgattcttatacactattgaaggcgagctctgatgagagaaataaacgactttgatgtaaacatgcttgcgaatgccctggctcaggcactaaaggtcatagcatgtgttgttgatgacccttgatcagatgcatgct

SEQ ID NO: 87356 - DNA, 856 bp, Zea mays
  Clone ID: MRT4577_179673C.1
cctcgaggccggccgatgaccgcatatccttgttcagtgtgtcgcattggggctgtcgcggtgtgggcaggtcgcgtttcacgaatcggtgttacggtgtgtctgtatgggattgctaaaggagctcctcccacttcctgattttcttaggaggtcggtccaaaacgcaggagggaactcaaatgaggttatcaaggctcaggtcaataaacaccttgatagtgttcttttcaaagaggcaggcccggtgactggggttctttgcaaccagtatacatatgccaatgacaaggctaaaagctttgtcgaaacttgtgtatgggagtacgcacaggagatttatcgtcatcttcgtgcagtagtgtttctgcaccgggggaagcaggacggcttgattacggcgattgacaagaatgctgaggcctcatttcttatggttgtagtctttgcagctgaggtcgctaaacacaggctaaatgctaagtcctccgaggggttccaacctgaggttgctgctagaatcttggtggcgttctcttgtgtggaacatcttaggcgactgcgtctccctgagtacactgaggcagtccggagtgctgtgcttgccaatcaagagaatgcagcagctaccgctttgttcatcgagtcaataccttcatatactgaactgacaagtaaaccagatttactggccttggatggaacaacaacatataactggtacagagatgaggttcagacatcacgcatgctgttttacttgcgggttgtgccaactttgtgtagcctcattccagttcatacgatgcaggataaactgggctcgatcatggtcttatatctacacatccaaatg

SEQ ID NO: 87357 - DNA, 1321 bp, Zea mays
  Clone ID: MRT4577_179674C.1
aacgaacaaaccctctcgaaaaccctctctcatattcaccccgccgccgcctcctcttccccttttcaacttcgccgaaaccctaaccctcccggcgaagtcgccatgtcgaacccgaagggctccaagatgctccagttcatcaactaccgcatgcgggtgacgatccaggacggccgccagctcgtgggcaagttcatggcgttcgaccgccacatgaacctcgtcctcggcgactgcgaggagttccgccgcctcccgccctccaagtcctccaaggccaccggcgaacgcgaggagcgccgcacgctcggcctcctcctgctccgcggcgaggaggtcgtctccatgaccgtcgagggcccgccgccgcccgacgagtcgcgcgccaaggccgcggcggcgggcggagccctcgccggccctggcgtgggccgcgccgctgggcgcggcgtgcccaccggcccgctgctgcaggcagctcctggtcttgctggccctgtgcggggcgtgggtggacccgcgcccggcatgatgccgttccggtattggcggccaggagagcctagccagcgtgtgcaccattcatcctttgacgtgagatgggcccttgtacgtggaggggccaggacttgtatcctagcaggtggcggcggttgtgttaggaaatacggatgcctggctggacgcctgctacggtgttcgtggcagcgccacatcagcccatgaggggaccgtcgccgatggggtctccccaggtgtggcccgggatgccggggccgccaccgcctggaatgaggcctggaatgcctccgccaccattcggacagccgaggccagggatgccgcctccgccacctggtccacagcagcctggacagaacccgccgcagtagcttcctggataagcttcttgcagatacacctatggaagagttttttatctcgagagaggatcataatcgcacctggggatgacctgtgaattgcaccaaagcttcaccattctgtctcatcagggcagtagtttcctttgggtattgtgagggaggagaaccttgcaagcgtgtgtaccactcatcctttgatgtgagaagggaccttgtacgtagagaggccaggacttgtattttaactgttggtgttggttatgttaggaaatatggataactggctgcagtcttgttgttacggtgttgattcatgctctgttgaagttgaagcccttgttttctctctctaaaaagtactttctgtgtttgttgacgaagcaagataattggtttagagaatatggatcacgggtttcatagttgtctta

SEQ ID NO: 87358 - DNA, 420 bp, Zea mays
  Clone ID: MRT4577_179675C.1
ggccgcttttttttttttttttttggacggcatagaaaattgtcatgaccggggacaggtgacacagatataaacctcactgacaatacaagagaataggtcattcttatttcttgacgcaacaaatagggctcaatgggaaaaggataatcactgaaacaaccactataactctttcaagcgagcaccaacgtaactgaaggcgtgctaatacagcgtatcacggagagggccttcgtgtcaaacaacccataagggccccatggcaactacttgatgcggatggaaagatcagagtacaaccccagggtcatcacagagggggacgcccttggacagggagcacgcctccaggagggtgcatgtcacgaatccggcgaaggtgatcctctaccacttggccgactgatacacgccctt

SEQ ID NO: 87359 - DNA, 1412 bp, Zea mays
  Clone ID: MRT4577_179676C.1
aggccggccgggacggacccatagcaaaaactgacattgcaaaaggcccacaagacaacgccccgctccttccgtccttcggcgcctacttccaaacggacaaaccccatcgaaaaccctctctcaaattcacaaggccccgccgccgccgcctcgtcccccattcatcttcgccgaaaccctaaccctagtcgccgcggccacccttcccggcgacgccatgtcgaacccgaagggctccaagatgctccagttcatcaactaccgcatgcgggtgacgatccaggacgggcgccaacttgtgggcaagttcatggcgttcgaccgccacatgaacctcgtcctcggcgattgcgaggagtttcgccgcctcccgccctccaagtcctccaagactaccggtgaacgcgaagagcgccgcacgctcggcctcctcctcctccgcggcgaggaggtagtatccatgaccgtcgagggcccaccaccgcccgacgagtcccgcgccaaggccgcggcggcgggcggagccctcgccggccctggcatcggccgcgccgctgggcgcggtgtgcccaccggcccgctgctccaggcagctcctgggctcgctggtcctgtacgtggcgtgggtggacccgcccccggcatgatgcagccccagatctcgcgcccgccgatgcccaacctgtcggcccagccggtgtcgtacccgcaggtcgtgcgcccgccgcaggggatgcctccgccaatgcgtcctggaatgccgccgcagatgccgatgcaattccgcccgcctggggcgccgcctgctccgttccctggggcaccgccacaacagtacatgaggggaccgccgccgatggggccgccccaggtgaggcccgggatgccggggccgccaccgcctggaatgaggcctggaatgcctccgccaccattcggacagccgaggccagggatgccgcctccgccacctggtccacagcagcctggacagaacccgccgcagtagcctttcctggataagcttcttgcagatacacctatggaagattttttttgtatctcgagagaggatcataatcgcacctggggaggacctgtgaattgcaccaaagcttcaccattctgtctcgcatcagggcagtagtttcctttgggtattgtgagggaggagaaccttgccagcgtgtgtaccactcatcctttgatgtgagaggggaccttgtacgtaaagaggccaggactttaactgttggtattggttaagttaggaaatatggataacttatttcatcgttgtcttaattctaaaaaaaaaaaaaaaaaaaaaaaaaaaaaaaaaaaaaaaaaaaaaaaaaaaaaaaaaaaaaaaaaaaaaaaaaaaaaaaaaaaaaaaaaaaaaaaaaaaa

SEQ ID NO: 87360 - DNA, 1260 bp, Zea mays
  Clone ID: MRT4577_179677C.1
ttttatgggaacccatagccgggtatttgaaaatcttagcttacatgtgcccagccctggggcgcaaatgcatatcatgctatagcatattagcatacatttgagactttcacctttactgatgagtgtgaatacatgactttggtgagatgcataaatggaaccaagctgttttaagctgattgcggcaaaacaatgggtgaagcagctcaaaattgggatgcagcaaacgaaactaggatcgactagccagataaaaatcccctgcacttaggaaaacgtgctttcctagcagtaaactgaccggtggataaccttcgatgcagtcaactgtaatcatgccctttccagcttggaactggttcttcaatctggaaagagatcttgacagaagatatactctcaacgcctccacatgattgcttttgcctgaggcatgagaaagaagatctggtgcaagaatcggggtggaccttgcaatgcatatgacaaatgacatgtcatgtacgttgtgcgattcctcgccaagtactacgacatctgttggtgccatttcctttggaacgattggtgagccaagtgcgtctctaatatactgatcctgtgacttcaatatctcttccagagtgtttttgtcattgcccacagattcgtaatacacatcaactggatcagcaggttcaagctgagcagtctttcgtaatttctggatcctgttcacaacctctcgagccactccagcttcaaacctttttttttttttttttttttttttttttttttttttttttttttttttttttttttttttccccgtcgagcccaagccactccagcttcaaacaatgactggtcagctcgtagatctaaaatgactaaaacgtcgcctataacaaaagcaatatagggatgttagcagaaagagattagccaaactatagacaaagtagcatattaatggcaaaaccatctcctgcagcatcaatctccttctccgacacgttttcaggacgcttgaattgtcggacaacctaaaaataagaagtctacaagtaaaatttgtagaaatggtgaagatgcagaaaactgaaataagcaccttgtgacatctaatagaaacatgttgcactgaagtattccatgcccagttaccagtatatgaggatgaaagcgcaaacacacaaaacctgtaaggctataactataaagtcttctaatcatactaattgaaaactatttgctagatgaagatatttttac

SEQ ID NO: 87361 - DNA, 186 bp, Zea mays
  Clone ID: MRT4577_179678C.1
aaaataaatattttttacattgtgcttatacatatatgtgataatattctttttccccttccttatttatttctttagccgtaaaaaaaacacgcttttcatacaagagctctgtttaaatacttctaggttttaaaatctactttttttgtatcaacaacattcttttttatacttgtacccata

SEQ ID NO: 87362 - DNA, 518 bp, Zea mays
  Clone ID: MRT4577_179679C.1
acggatccaacaacgagaagaagaggtagagagtaagaagaacacgcctcgttgggcagccgccatgccgcgccataccccgtaggctagagccagcgtccgtcagcagcttttcttctcctttctcttctcttttcttgtcttctcttctgtaataagagatcgagccaggcaactgcaggcaaggcatgatgatggagagccagagggcagcgtaggacgaagcaggttcttctttaagtattttaggaagtgcaagcaatggcgagtagctagggaagggactaccatatgctatagctgccttgctagctagctagggagaggggggggcatccaagagaccaagctcacgggggcggatcggaggcgatggagaacgacgaggaggaggaggggtacgtgaaggtggggacgaggccctaccgggtggcgatgaggccgagcggcgccgcggcgcgccgccgcatccactacctcgagtgctgctacctccgcaaggagagtatcgcccgcgg

SEQ ID NO: 87363 - DNA, 310 bp, Zea mays
  unsure (1)..(310): unsure at all n locations
  Clone ID: MRT4577_17967C.1
acgggcaaggagagggatctccagctccgcccgcgcccggggacgcagcagggaagcgcggagggacggagcgggcccagnacctccgctcccgctgcacgcatgcgaggccgccggggcatataacaaccaccttctcagccggtagctccagcctactcaccacgatggctttgtgtggtcgcccagcgaggcgcgggggaagtgacgccgctcctcgcgctcgcgctcctcgggctggtgcgctgcgccgtcgtctcgtgctcggcggcggcggcggcggcgacgctgctgtaccacgagagctact

SEQ ID NO: 87364 - DNA, 334 bp, Zea mays
  unsure (1)..(334): unsure at all n locations
  Clone ID: MRT4577_179680C.1
gcccatacgtattctcgtctgaaacaaaaggaaagagcgaaaaaaaaaaaaatcttcccttaatttcagctgatcggcatggcgcagggagcagcaacagccgtagacggcagcggcagcggcagcaccgcccgtccgccggcggcgctgcctggcctgaagctcctccgccgtctcctcctcgtggcggtggtgggcacggggttcctggcggggggggggctgctctcttcctcatggcgatactcgtcatccatgctccctcgggtccccgcgccggncgtccggctgcccgcgccggcgggcggcgggnngatgccactggagcggtggg

SEQ ID NO: 87365 - DNA, 451 bp, Zea mays
  Clone ID: MRT4577_179681C.1
acttcataatggacagccaaaatggcttctttgtttcataccaaattatcctatgcttatcttcatgcttactatagcgatctatcttcttgcgtggaaggagtcgaactggggaacaagagagaaggaccccgctagccccatccttggtgggaggaagaagctagcaccaccattgcagcaggaggagggtggtggatccaagcctacgcgacgggttcagagcgaaggcgctcctcggtagacaagacaccagcatcactgatacctgctccctgtcctgacgagatttggacaccttacaaagggtaaggattacgaggatccaccagactctgcatcggcgtgcccgcgggctagatggccatcaaggagacactactgatggaggcgccatctttggtagctgaggacaaattagagtttgtctttcggtgcaggttataccttt

SEQ ID NO: 87366 - DNA, 268 bp, Zea mays
  unsure (1)..(268): unsure at all n locations
  Clone ID: MRT4577_179682C.1
ctggttggtgggcagatggtgctacggcttccctcaggggtggtgtaagagaagtgcaagctgcagcagaatacaggctcttcacatagtatgagcagaaatctgcaaggatgaatgtctgcacgatttctgaaaacagcaccatatacggccacagaccatagccgagagctgtcagcagacggccacgcgtatccaaaacctgtagaacccagtgggcgcagctaagaaaccttgcaacccccaacgcnaatacatagtgtgctgt

SEQ ID NO: 87367 - DNA, 328 bp, Zea mays
  Clone ID: MRT4577_179683C.1
acagtgcaacaagcaagatttacctgcccatcgatcatatcggcaactggtccgggagttcgcgacaccatgagctccacggagtgcggcggcggcggcggcggcgccaagacgtcgcggcctgaggaggtcgggctgagcgtgaaggacgccaagaaggtgatcctcaaggacaagacggacgccgacatcgtggcgctgcccgacggatccgcgccgaccgcgcattatcgccctaaccgtgtccgcatcttctactacatcgaccaccatactccccccatcggatgataatatataagctaaccgctactccctccttcttgcc

SEQ ID NO: 87368 - DNA, 307 bp, Zea mays
  Clone ID: MRT4577_179684C.1
acttgaacaaattcgtttgacaatacaatagtttattacatctcttgtcgtacaaagtgtgggtagatactcaactaaaactaaaaacctatcacatttctacaacaataaacaatcaatcaaccaccaacacaaaccatatagccacacgaaaaacattaaactttatttttattcacaagctaactttgttccaaaactgcttaagcttattgcaaatgctttaaactcagagaatggttgcccgtaatccattgtaaacatattcctatcgaccttaccaaactgcagcaaaaccgtatcatta

SEQ ID NO: 87369 - DNA, 243 bp, Zea mays
  Clone ID: MRT4577_179685C.1
cggtgctaaggcagcttggactgcgatccgccgcgccctcatagagcggccggcgataccactatgtctcggctccttggggagcgagcgcagctatctgctgagaggcgctgtcagagagcagaggcctcagctaggcacatataggcttctgaccttcgaggcgtccactcataattacggctcactgcagccttcaggccgctggctttgcagccgagcgcgatgatcattcagtatgaa

SEQ ID NO: 87370 - DNA, 263 bp, Zea mays
  Clone ID: MRT4577_179686C.1
aaaccaggactaaagccatgcattgtccaggcgttttcggaacctgggctgaaaatccagccattttttaatttggcaatatttccacttctgggatatactgataatattgacaaattaagccccgtacacaaattgcctgatgacccggatgagcttgttgggggcctcaccgtacgggtccatggggaaaaacccatgcccttgccccgggaacacgaagaggtggacggtctttccgggcgtttttagcttggtgactt

SEQ ID NO: 87371 - DNA, 132 bp, Zea mays
  Clone ID: MRT4577_179687C.1
ttcggtctagacccatccggcctggttgaggttaaggaggagactagactggtggtggacggtattgcagacgagtggtgaggacgcgcacgctatttcttgtctcactatcatagccgtggtgagcgatct

SEQ ID NO: 87372 - DNA, 382 bp, Zea mays
  Clone ID: MRT4577_179688C.1
tttatattttttcactttttttttttcccactgggggccttttttattatctggggcctttcttgacaggcggacccggattaccgctttaaagggaaactggaactggaattggcataggaacccccccaggaaaatttctggggggaattcttcatgatttaccccccgactttgtgcaaaacaactttttcccccgggcaaaaaaccaccaccgcatttaatcggataaagacttttggcttaacaacccaggggggaaagggtcaaaggattgacgagggcgccaccaccctgggggtttaaactatttctttaccctgtccaaaaaccccggtcttatttggccggcaccttgtatttctttttggagagcgcgggg

SEQ ID NO: 87373 - DNA, 564 bp, Zea mays
  Clone ID: MRT4577_179689C.1
taaaaaaaaaaaaaaaaaaaaaaaacaaaaaaaaaaaaaaaaaaaaaataaaaaaaaaaaaaaaaaaaaaaaaaaaaagtttgttcctgcccggacgagccattaaagggcaaatttttgcggttttgccctctcccgtgggggtccgtgtcaagctattcttattacccgggtcccacctccgcccctttgtggctggggtcatgacttccatattgcgcctcgcgccgtcgctcttttacattcgtcggggttttgggaaaaacctggccgtggcccaatttaatggggttgcgggaaatccccctttttccagctgtcctaattttaaagaggcccgcccctttcccctttcccaacatttgcacaacctgaatgccgattgccctccccctgtactggtgccttaaccgcggggggggtggcggtctcccccagggtgaccgttacactggccagggccttaacgcccattccttccgctaccttcccttccttcctcgccaccggcgcctttttttccttctttgctttatttccggggctcccttttgggttccgatt

SEQ ID NO: 87374 - DNA, 556 bp, Zea mays
  Clone ID: MRT4577_17968C.1
cactccaaatattgctttgatgcaaacgacaatgagactcagcctttacttacacgtattcccctccaatgaacaccagctccaccgccttgctgcaccttgacatcaccggactcccgccgccgaacgaaacttggtgccccgggtcgaacaatacgagttggacccttcctttttcgtggactagcggcatccttgttcgaaaaaaccggcaccgcgacagccggcgccctgctctgattgccctgatgtaaaaccaaaaatttatctgtccaagagccggaagtcaccaactgggaggggaactaactgtgcatcggctcaggaagcggcatcgtcaatatcgtcttgtttgcagaataaaaatagcataaattgctgcttgaaccatgacagagtttaaagttttaaagagtatgggaaaacccttagtctactcaaaaaataaaaaaaaaaggcccctaagacctccaatacccggttttttttccatttatcaagggtaaatagggatgtagtatcaacaaggctgaaattctactgcagagcgaaaatg

SEQ ID NO: 87375 - DNA, 314 bp, Zea mays
  Clone ID: MRT4577_179690C.1
gtggtcctgtttttggaactccccaattcaacctttgaagggacggctcacgatgagtttatggccccagcagtccctttttaagcggtacatagcaacttatatgttccaggcaggttacattacaggagggctaacgaaattgatatttacttaaataccgacccgtttccagggtgggttggaggaacaacctcagagtggaggctgctgccaccttggtgagagggggaatcaagggccggtttcttctgctgaggttcaaccaagaccggattgaccctagctccatggacgcctctgcctacaacccc

SEQ ID NO: 87376 - DNA, 512 bp, Zea mays
  Clone ID: MRT4577_179691C.1
acaagccatctcatgagtgaagacaagaacgaagaatacagcgatccccagatcatccgtgacatcctgggggagtgcgagcagttcgagttctgcatgaagatcttggcgcattctttctacgccagacccaaacggagcaaccaagaactgaccaagctgcgcgacagccttcaggcagtttcccccaagtcgttcgaaggcgttgctgccaagatgctcaagttctcctacaatgacctgcccaaagagtacaagtcctgcttgctgtacctggccatcttccctccaggacgcagcatcaggaggtcgacgctggtagcacggtgggttgtcgaaggtctgatcaaccgggatgattggaacgccgcggttcgtcagtccgatcgatgtttcgaagccctcatcgaccgggggcttgtcgatcctgctgagatcagtggtaccgggaaggccaagatctgtcacagcactaatcgcagcaatggactccggacagtgacgtccgactc

SEQ ID NO: 87377 - DNA, 269 bp, Zea mays
  Clone ID: MRT4577_179692C.1
cccacgcgtttttccgccgctccgccgacaaggtccgccggcgaaccgtgaaggtggtcgccatgggcgccaacgacaagccgatggcgcatgccaacggagcatcgagctcctcgctcggttccgtcggaaccgcacaagaatctggctcgctcagaagggtagtcgctacgggcaccttgaacagatgaaggtcagaccaggacaacctaggactacggtcgcccatgaaactatgccagcaacaggccgcacacggttggacacga

SEQ ID NO: 87378 - DNA, 262 bp, Zea mays
  unsure (1)..(262): unsure at all n locations
  Clone ID: MRT4577_179693C.1
ggccgnntngncctgcgatgatccctgnngttttggctcacagaaggtggcctaagtnccaactggcgctctgctcgattacnttattganaaccatgttgcntctcctnctctttctgaccatggctgctgctcagagtatnnncatatttgggcgactganacaggatgtnggcntcctaggtcanaggagnagaataagncngtttctttcnnacantagctcnggacacccatgtgcttccggntttgcatggantcg

SEQ ID NO: 87379 - DNA, 641 bp, Zea mays
  Clone ID: MRT4577_179694C.1
gggccggaacccagcctcacccaggctcgttcagacgccgaccaacgcgatcgcttcctccgacgcctcccgcgctctccacgaacaactggtatcgctgcagtgccaaacggtgatcggccggggccgcctggttcaaacttcaaagcaaacttcgattcgcatctcgccggttgagtttcataggcgcgttgcctgatgtatcctagttggaatggacgctggctgctgggtgtgtgaggcccttagcaggtaacttggagggatgggcgtgggccggccaatctgctagttgtagatggcgcgttatctgaagacgcagaatggccacgtccatgtgttgaagtataatgcagcaactggtgctccaagattgtaaattgccgagaagtctctgatgttgaaattttgccgccatcctggtgcataaactgtttgtcttgcttgctgtttgaacagcacaaaaacaattcgatgaattccagctggtggccttgggctttcatagggaactatttcattgcctgaaaaaagcatgtattccttattagaatgctttgctattattttttaggttaatcctagcattaaccattttgtgctaatgacttttgtaattgtaactgttttttcacgaaaaa

SEQ ID NO: 87380 - DNA, 281 bp, Zea mays
  Clone ID: MRT4577_179695C.1
ctttctttttttttttttttttttttttgagaatttttttttttaattatatttttttcttttcaaaacaacaattccacacaaaacaaaaacacattcaaaatccacctcccacattaaaacaaaacttttaaacccctatgcctagttcaactaaacccaatttcttttgcccatccccaaccatttcttttccaaccccccttatacaaccaccaataccccattctaggacccccccgatgctaaaaaaaaaaacctttcattacaacccatctttc

SEQ ID NO: 87381 - DNA, 348 bp, Zea mays
  Clone ID: MRT4577_179696C.1
ggaaggccggggcgacccacgcgaccgagcacacggagaggcgcccgaagcgggcgcgaggcgaggggagcacgaagggagccgggggggaggaacggccgagaaggcacgaaacaaacgcccaccaggagccgaccggaccggaccggccgagcaaaggaaaacacaggaagcaagggcaggccaacacagaagagggaaacacggccagaggggaagggaaagaggacaagggacgcaagaggggagaaggcaaaaggaagaaacggaggagcaaaacgcaggaggggggaaagaaaaaaaagccaagcaagaaacaggagcagaggaggaaaaaagcaggggaca

SEQ ID NO: 87382 - DNA, 1800 bp, Zea mays
  Clone ID: MRT4577_179697C.1
cccacgcgtccgccaaaatgatttgcatgagctatggtcattgttggagttcatgatgcctgatatatttgctactggggatgttgatctgaagaagctgctgaatgcagaagatcgcgaactaatttcacagataaagtccattttagggccatttattcttagacgtttgaagtcagatgtaatgcagcagcttgttcctaaaatccaacatgttaagtttgttgtcatgggcacagagcagtctgaagcttacaaaaatgccataaatgagtaccgtgctgcttgccaggctcgtagtgccaagtcttcagatggcatttccaataatgttgctggattgattccaaagcgacaaatatcaaactattttacacagtttcgtaagattgcgaatcaccctttgcttataaggtgtatttatggtgacaaagatgttgatcgaatttgacggttgcggtaccctaaaggtgcatttggcttccaatgctccttggagagagcaatacaagagctaaagaactacagtgatttcaatatccaccaactattattgtcatatggtgatgtgggcacaaagggcgctctaaaggatgagcatgtttttgcatcggcaaaatgtcaggccttaggggagcttttaccttctctggcaaatgatggtcacagagtactcatatttagtcagtggaccacaatgcttgacatccttgaatgggcattggaaattataggagttacatatagacgccttgatggagggaccgctgtgacagaaaggcagactatagtggacacgttcaacaacgatctttctatatttgcatgtttactttctacaagagctggaggccagggtctgaaccttgtaggagctgacacagtcattatacatgatatggattttaacccccagatggatcggcaagctgaggaccgttgccatcgcattggacaacagaaacctgtcactatctataggctagtgacaaaggattcagttgatgaaaacatctatgagattgcaaggcggaagctagtactagacgctgcaattcttcattctggagcagagttggacaatagtaccgatgtaccagagaagacaatgggggagattttggcatctcttctcctggtctgaagttctaaccctggagtttcttgaaggtatacaattctacccgtgggatatcttcaacaatgggtttttggccttcatttaagcttaccattcaccctggttaatgtcttgaatcttgaggtcctaagatgtgcatccatgtatcctttttgctcttgaaacctcccatcttttagtctgccttatccatcttttgttctatgaatggcgtgctataaactgctggatttccgaagtgtttatggttctacataatgacataatgtttaaggttactgtaggttgtaatggagtccggttcccaccccccctctgatataggaagaactgaaatctgaagtaatacatctgtaccaaagttttaacttgttttaaatgaaacgcagaatagttccaaagtcgcaacattttcttcagtctgtaccattatttatctttatttttattttatctgcacaagtaggtacggggtacctaagctacacttaacattgtcaggatacgtattagagtgcagtttgaccacatgtacatgtatcttgacatactagtctaactgtcagtttgagattgacacccgctttatcagagaaactatatgggaaactttatatgtgttaaatttaactccccaaaaaaaaaaaaaaaaaaacccc

SEQ ID NO: 87383 - DNA, 223 bp, Zea mays
  Clone ID: MRT4577_179698C.1
gtcatctaacgagcgcatacacgggttagatactgatgtacccccatggccagtcttaccactactctttcttactcggatagtcaccgtaaccagctgaaagagacctgcctgtgcctgctccacacacccagtgaggtcaggcgccaaccaagctcatgccatagacagctaggcgccgattggcatcaccgccacctgcaattaacaactggacagtgta

SEQ ID NO: 87384 - DNA, 579 bp, Zea mays
  Clone ID: MRT4577_179699C.1
tgggtaccgggcactctttctcgagttttttttttttttttttttttttttttttttttttttttttttttttttttttttttttttttttttttttttttttttaattcaaaaaaccttttaaaaccgggaatccggcccccaataaaacacataccccccatttaatttaaaaaaaaaaccctgtttaagggtttttgggaccaacacagggtttttttttcccccccattaaaaaaaaacccggcgcccaaaaaaaaaaattttttgttttttaaaaacccctttagaaaaaaacccaaacggagcccctcctttctttaaaagggaaagggggccccccgggtttggggggggggaaaataaaaggaaaaacatccgcccccaccccctgggaattgaccgcccctttaagattccccgggaagcccccgggtttccccagggcccaaaccttgccaggggcctttttaaatttttaaaggccccccatgagccccgggttttaaagggccaaggggaggggttttgttttaaaaccacccccttaaaactaaaggcctccgggggccctgaaaa

SEQ ID NO: 87385 - DNA, 224 bp, Zea mays
  Clone ID: MRT4577_17969C.1
ctcaccctcaatgtcacggtgaatctaaagcaaaaacaagaagcaggaggatgcgaacgagcagccatggatggattttgatgctgcgatattgactcacactccaactcgctcttgcctgagtcgtagatcgacgacgagtcgcactcatcactgggctctctgagggtatctgacgatatgtgcgcagagccagactattcctgagatgtcctaccaaatga

SEQ ID NO: 87386 - DNA, 352 bp, Zea mays
  Clone ID: MRT4577_1796C.1
ctcggacgctccctccgggtcggccggctccgacgacgccgcgcccacgggcgccgccggcgccagggccgtcggctggagcttctctggcctcgccgccgtccttggctgcctgttgtgagagtgagaccgtgcgtcatttctagggacggaggacggacggacgacaagctagttgaagatgagaatgccatgccatgcccgggcatgggcgccctctttcatctttgcctgagattgtagtgggcgtgtcccttcccgtcttctctcggctgttatttaaactcttcatctgctagttcttatttgactatggggttgtagatggctatggatcattatgcctgcgtgt

SEQ ID NO: 87387 - DNA, 901 bp, Zea mays
  unsure (1)..(901): unsure at all n locations
  Clone ID: MRT4577_179700C.1
ggggcttgaacaggtctactttcattctactgctatgagtagcaattccccgcgcgcgctctctccgccccggcactaggccaacggcaatcaccactcaccaggtgccaaggtgtcttgtcggccccttcaccaagtgttagtcgggtccttcgccggcgacgggcaccaccagtatggacgaatcacgaaaaagagctgtctctactgcaaatggtaaaaatataagttcatcccttgatgaagactttggaaatgacttcctttcatcttggaagttaccaaaatcaggaaaagacacgattgacttcagtgttgactcagttcccaagagtagcaagaaattcagctttgacaacctagatgattttgggcttaatggagcctttgacaaattaccgtcctttcaaatgggcatgtctgatctggatttttctagccctgacaagaaaaaagtgaagcacaccagttcaaatgcagatctttttgaaaagaaaaaggaaactgacaaggacaatttctccttttcttttgatttcaatgagttgggaaagtttagtcttgatggaaagctaggaattgaagaaaagagtactaatagatttaatggcaaatctgaccctgtctcctcagaggttaaaaaggatacacaaagaggccttttagccaagggcaatgctatccttgaagagaataatagtaaggataaaatgcatacacttgatactcgcacttcaagaccttctcatctgacgaatcatgagaatgtgaagaatgccagtcaaccaacttcaaatatcgatgttgctgattcatctgacaagatgcaagaacataccagtgtcaatcctggcacaatgggacaaactanagtagactcagtgctcaatgacaatcctgg

SEQ ID NO: 87388 - DNA, 670 bp, Zea mays
  Clone ID: MRT4577_179701C.1
cattgggaccctcgaggccggccgggaaccttatcccaagcggtcgcaaaccaaaccggtctgcattctccttacattctctctgctcgtcacgcagctatctactctactgctctacttagactgagcctccttcagggtcgaacgcaccaccctgagtacgacgaccctgtactgctcctcaccgagcgccttcacagtggtaccaggcctcctatgcgttcacccgggacacgcggttcgccacactggcggactatatcgcacagtgagctgtctctcggagtactctggcgctatggtaaattttatccgtctccttgattgacgcgctgtttatcagcgctcagacatcaccgctcaccgaagagattgacgctctctacaactgggaacttaataacctctgtggtggctgcagggatcccatatacaggtggagtgcacgaggtatctcggacttttctactcgcggtcgccgacgagatccactcactgtgcgctctagtgctccaacatactgacagtctgcgttgcttcctgatcgggggacactgagctctaggcacggtgcgtgctcctacgctgattgcatgtctgaatttctgatgatgtcttatgtctggactctctatcgactatgtatgacacgtgatctccctgctcctgc

SEQ ID NO: 87389 - DNA, 461 bp, Zea mays
  Clone ID: MRT4577_179702C.1
caagaaaaaacaggaggggcggggcggaaatcaatcccaagcaaggaccagggataaggccccccaaaaaaaccgaaggcataattcccgggttaaagataaaccaaaaattccaacggcggcaatttgggccaaggggttcagctaaaaggcccaaaaacacaggggttaaaagcaaagcaaagcatagctttagaaaagccccccggaattgggccattcaaaccaaaaaaaaacacggaccttcacccgaaaaaaacaggtctaaaaggggacaacccctacccccagccttgggaagccggggggggggctgtttggccccaaccagggggagcacccaggggggggccagggccccccaccaaaggggcaggggccccagttggaccccagccatcaccggggggaaccggagctggagcacccccccaatcagccccagtgggagcaacaggggg

SEQ ID NO: 87390 - DNA, 266 bp, Zea mays
  Clone ID: MRT4577_179703C.1
tcgtctagatcgcgagcggccgccccttgttttttttttttttggcgggaggaagaatttttttgaccttccggatagagagaaaacgaagcctggcccagaccaaaagaatctagggcacgcacccatgctaaatgaaagtcctgatccggaacatcaagtgaaacccgactacaaggaaagatactatataggagttgaagtacctgcacatgatccataagcaaacaggtcattttatgggccaaatcaacgaccctctaaag

SEQ ID NO: 87391 - DNA, 284 bp, Zea mays
  Clone ID: MRT4577_179704C.1
agctctcacaaaattatgcaagtagagaacttgtttgaacaccacttatcaagtcaccaactatgtgatctaatggattatcttttgcaaagggcactagttagacaatttgtcattgagtgcttgggcttggtttgataactaggctggaacttgagctggtttaaccacttgttgatttacatttggtggacttgaggttgatcatgaaaaccctttgggcttgggtgatcttcattcttgaatacatgatgagggaaccacccttattgagcccgcctttt

SEQ ID NO: 87392 - DNA, 230 bp, Zea mays
  unsure (1)..(230): unsure at all n locations
  Clone ID: MRT4577_179705C.1
gccatgagcatcaagcggtagaccccggacgtatgccgtctcaccctcaatattgtaaataacgtgacaggagaggatggcgcccaggaacgcgcatagaaccaggggagttctgcatcgtgtcatatggtgggtgaccatgtgtcgctgagagacagggtcgattacctgtangctcagcacaggccaggacagctcatactcttcttacagcaaaaactatggagcag

SEQ ID NO: 87393 - DNA, 540 bp, Zea mays
  Clone ID: MRT4577_179706C.1
aagtttagaaaaattatctcacgtttgtttgaagctaggtttgacatttgctgctatgaaaattttagtttgtgttgtggaggtgttagttttgcttaaaaggttacagtgattggattgtgttattgagggtaaatgatgcagttatctgccttggtcaatgtggtgatagttgtaatattccctaatttctgattgtgatttggtcttttctaggttcatgatttttgatatgcgtctagatatagattatgtctagatacatgagtatctcgaaaaagctagctacggagccttacaatttggaaagaagcaagttgtgtttttgtgtacattatcttatgtttaggtgaacaagaatggcctagaatttggaattgagcattttgcagtcttggttcttattgattgtttattagtagccaatttaaaagccactgaggtgtttttttcctgctatgagaattgtgccactatttatatatatagtggtacatgttcgatgtaaatttgtacctacgttgcaatgcctacatatta

SEQ ID NO: 87394 - DNA, 524 bp, Zea mays
  Clone ID: MRT4577_179707C.1
tcaggaaacaacctgagtcccctagtgccacaagttcatcatcataaccagaataacatcatcgtatcataaagtattctcatcatgttcattgattaaagtaaagcactagcatgatattaaccatagtagctaaatcccaaaagggtaattaaggacaggataaacagaaaactagtcaatccttaggttgatcatggtatgtgggacaatgaattataaagtaagtaggccataatgggtcagagaacacttgccttcaccaagttgctgcatagggaaatctcctgcaactccctcgggaaccacggactgctcattgtctacacaaggcaaccattcattcaacacttgggaaataacaaaggaacaaaacaccaaacatctgctacagagtaaacacaggttcaataaaaggtaaacacaatcaggtgcttcctaagttgaggtaggttactatgccatgtgattcattgttccctaatcaagtctatcttactataacacttggtcaaatataatta

SEQ ID NO: 87395 - DNA, 671 bp, Zea mays
  unsure (1)..(671): unsure at all n locations
  Clone ID: MRT4577_179708C.1
accctgccaaaggcgagcagagccgccgagtggccgctcggcctaggcaccgcctggctggccagtggatggctgccgccccgtcccgaccaatggagtaccagcgacgtttcattaaatcccagccagccactcttctccctacgcaatccctctctcccacacggcggcaggcagcgactccatctccctggctcctcggacaccgaagctccatggccgcccagctccttccctagccgagctatggcttctcccatggcgccaccctttccctcggcgcccttcttcctcaggctggtgtgcaggccctcttcctcctcatgccgagcgtccctgcgtccccttctccccctctgcaccatggccggttccttgttcccctcgaaacccagcaggaagagtaggcgccccttcccctagcggatccatgatgctaggaggatctcctcctcggccggcgctccaacccggcgtccatggcgtcggtgccctccctcagcagtgcgccgtcgacccgctccactcgccggccaacatcttccacaggacgccgatgagctttcccacctccaatgtcgggaccgcgcgcgagcataagctcagggccccgctcggncctctcgttcgcgcgcagggtgcccctgctttcccatggccgagctcaacct

SEQ ID NO: 87396 - DNA, 139 bp, Zea mays
  Clone ID: MRT4577_179709C.1
cgacctgcttgaggtcattcactagatcaaatggtcgctttgatctggagtaggtatttcgtcaggggctagtttggtgtcatatgattgctgtgtgctctcgcatttgtatgaacttttgtacctcatccatttcttg

SEQ ID NO: 87397 - DNA, 271 bp, Zea mays
  Clone ID: MRT4577_17970C.1
tctttcttgcgtgtcaaaagatctcggacggcttgtcattatcgagtggtaacagttcatgttcattcttcacccgtcgatagagtcattgtcgtgcactatcagcaggacaacattccaatgaacagcgcatgatggttatatctccactcctgtggcagctctctttgcacaatgatgtcagacacgtattgcatgaagggtttcaaatgccataatggttctaacagcatgggatccacgaactaatcagtctgtgttagttttgctg

SEQ ID NO: 87398 - DNA, 577 bp, Zea mays
  Clone ID: MRT4577_179710C.1
agagctaatgctaagaccgagctaagaagcacagcaagtctcacgagacgtggcggcgtagcgcgagaatggccaaggacatcgaggccgcggcggcgcacgagggcaaggactactcggacccgcccccggcgccgctggtggacgcggaggagctgaccaagtggtcgctgtaccgcgcggagatcgacgagttcgtggggggggtgctattcctttacatcacggtgggcacggtgatcgggtacaagcaccagacggacgcgggggggtctggccccgacgcggtgtgcggtggcgtcggagtgctcggcatcggctgggccttcggaggcatgatcttaatgctcgtgtactgcaccgcgggggtgtcgggagggcacatgaacccggccgtcaccttgggcctattcctggcgcgcaaggtctacatggtgcgcgcgctgctctacattgcatggcaatgcctcagagccatatgcggtgtggtgctcgacaaggggttacagagcgccttatacgtgcgctacagcggaggcgccaacgagctcagcgccggctactccaagggcaccgg

SEQ ID NO: 87399 - DNA, 269 bp, Zea mays
  Clone ID: MRT4577_179711C.1
gcgcgacgtcaacgagtgcccctgctaccgcgacaggctaaccgcctgccccaggaacaggcgcacgcgcgcccaaagtcaggtcaccccctgagcaacccatgaccgtgctcctgggagtgcactgtaagcctcgcactgctaacgcaccggctgatgggccacgccacctgatatgccatgcctaccctactactacatatgtgtgtacgaacgtatggtacgctgccttgtgtcgcgcgccccgatctatgatggatgctcatgat

SEQ ID NO: 87400 - DNA, 238 bp, Zea mays
  Clone ID: MRT4577_179712C.1
aaaaacaaaaaccctttgaaattattcatcattcttgatacctaattcttatgggccccaaattctttggacaactagattctcacaaaaacccggcgggaaaaaaaaactaaacaaacaagcccccaatgcccaaggaattaactttcccggaaggtgagttggaagggaaaattgggaccccccccttaaaaccaccattttggggacaattggtctaatgcttaggggggggggg

SEQ ID NO: 87401 - DNA, 1481 bp, Zea mays
  Clone ID: MRT4577_179713C.1
tccggctccacatctgccgtcgactaaacccgccctgctagaatactcgctccctacaccctctccttgcaattaacacctccgttagcacgagctgcagggagggagacctcgggagaggccgggctaccggggctgcggatactcgctccctacagctctcctcgcaattaacacctccgttagcacgagctgcagggagggagttgggaggagaaacagagctaccggggcgatgggcaccgtgctcgattcgcacttcctggcgctcaccgccatcgttactgtggggtaccagctgctgttcttcatcatcacagctctcctccggttcgataaggtcaccgatttcgcaggcagtacaaattttatcataatctccatcctaacattagctttgaagggagcatggcatttccgtcagattgtgctgacagtgcttgtcaccatttggggtcttcgtctaggattatttttattgatgaggattttgcaatggggtgaagaccgaaggtttgacaaaatgcgtgataatttggggaaattagcagttttttggattttccaggctgtgtgggtttggtctgtcagcttgcccgtcactgttgtgaatgcaagtgacagaaacccctcgattgaagccagggatataatcggttggataatatggttggtcgggatatgtgtagaagcagcagctgatcagcagaagcttgtgttcaaaaattctccaagcaataggggaaaatggtgtgacgtcggtctttggaagtactctcgccacccgaactactttggggagatattcctttggtggggagtatttgtagcatcgaccccagttatctcagatgccgaatggcttgtgattcttggacctatattcctgactcttctgcttcttttcgttagtggaatcccactcctcgagtcatctgctgataagcgctatggacgattggaggaataccgtgcatacaagaacactacaagccctcttatcccattgccacctgctgtgtatggttccctgcctgcgtggttcaaggttgccttcctccttgagctcccgctctacaatcctgggccgggaggtgatccaatcaaaccagaatgagcccattgatgggtcagcctgatgtttatgttgctattgtgtgcgtggcagttattccaccttcgattccaaggggttacagtggagtttggcccctgatttatcgctcgcgaggctcaaacatgtatcttgttggttgaaagttagatttcttttgttgccctccctgcctccatgtgcagatgaatagatgcttagaaacctgaacgtggaacgtgttcaccttcctcgctccaaaaaagtgggaacggaacaatcttgtccatatagtgttaaagtatatttttttttaagtacggtaccacgttcctgtttctggttcccatcaatccgagaactgattagatgatcaaaaaactcgtgc

SEQ ID NO: 87402 - DNA, 602 bp, Zea mays
  Clone ID: MRT4577_179714C.1
ccggccgggccgggatccgggaaagtggtgcgacgccggtctttggaagtactctcgccacccgaactactttggggagatattcctttggtggggagtatttgtagcatcgaccccagttatctcagatgccgaatggcttgtgattcttggacctatattcctgactcttctgcttcttttcgttagtggaatcccactcctcgagtcatctgctgataagcgctatggacgattggaggaataccgtgcatacaagaacactacaagccctcttatcccattgccacctgctgtgtatggttccctgcctgcgtggttcaaggttgccttcctccttgagctcccgctctacaatcctgggccgggaggtgatccaatcagttgagtggtgcttgcaaactgttctgctgcccttcagtgatgaacttgtatagaatatccctgcattattccaccttcgattccaaggggttacagtggagtttggcccctgatttatcgctcgcgaggctcaaacatgtatcttgttggttgaaagttagatttcttttgttgccctccctgcctccatgtgcagatgaatagatgcttagaaacct

SEQ ID NO: 87403 - DNA, 1505 bp, Zea mays
  Clone ID: MRT4577_179715C.1
ttgggtacctcgaggccggccgggattcgcatagcccgcgccgcaagtattcgcggtcgcacaggctggtccagtccaacacctgcctccctgtttcgatgctggcgaaaagctcgcccggccgcccggggtgaggatgactgccactcccaccgggctcctccggctccacatctgccgtcgaccaaacccgccctgctaaatactcgctccctacagctctcctcgcaattaacacctcacctccgttagcacgagctgcagggagggagttgggaggagaaacagagctaccggggcgatgggcaccgtgctcgattcgcacttcctggcgctcaccgccatcgttactgtggggtaccagctgctgttcttcatcatcacagctctcctccggttcgataaggtcaccgatttcgcaggcagtacaaattttatcataatcgccatcctaacattagctttgaagggagcatggcatttccgtcagattgtgctgacagtgcttgtcaccatttggggtcttcgtctaggattatttttattgatgaggattttgcaatggggtgaagaccgaaggtttgacaaaatgcgtgataatttggggaaattagcagttttttggattttccaggctgtgtgggtttggtctgtcagcttggcccgtcactgttgtgaatgcaagtgacagaaacccctcgattgaagccagggatataatcggttggataatatggttggtcgggatatgtgtagaagcagcagctgatcagcagaagcttgtgttcaaaaattctccaagtaacaggggaaagtggtgcgacgccggtctttggaagtactctcgccacccgaactactttggggagatattcctttggtggggagtatttgtagcatcgaccccagttatctcagatgccgaatggcttgtgattcttggacctatattcctgactcttctgcttcttttcgttagtggaatcccactcctcgagtcatctgctgataagcgctatggacgattggaggaataccgtgcatacaagaacactacaagccctcttatcccattgccacctgctgtgtatggttccctgcctgcgtggttcaaggttgccttcctccttgagctcccgctctacaatcctgggccgggaggtgatccaatcagttgagtggtgcttgcaaactgttctgctgcccttcagtgatgaacttgtatagaatatccctgcagtatgtttacgttttttgtttttgttttggtttgacagaactagaatgagcccattgatgggtcagcctgatgtttatgttgctattgtgtgcgtggcagttattccaccttcgattccaaggggttacagtggagtttggcccctgatttatcgctcgcgaggctcaaacatgtatcttgttggttggcaaaaaaaaaaaaaaagcggcctccaccttcgattccaaggggttacagtggagtttggcccctgatttatcgctcg

SEQ ID NO: 87404 - DNA, 249 bp, Zea mays
  Clone ID: MRT4577_179716C.1
aatgcggcacgagggacgggcgggcccaccagaagcacccacctccggcactgaccatcccgggcccacatggccaagagccgaaccacccgcgaccaagagggcaggaacagctaatgccttccttcagggcgactttctgtgcgtgcgccggactgtgctcgcattgctcgctaccgggagggccggctccttcctgcacgggatcctgagttcgccagacgcgcggtgacctgacacattagcagc

SEQ ID NO: 87405 - DNA, 355 bp, Zea mays
  Clone ID: MRT4577_179717C.1
ggaccagattaaaacagctgcataaatttaagaaccggaaatacactttactttttttttaaacctttacgcttctcaaattagacacgagatcactgtttgcacatgcttgggctaaaaattgaacctaatagcttacatttgcatgatgcgatgaacactaagaggggtaaccttttacacactgggaatgtacaaagcgtttgtcatttacgatcagtttattttcggccacacctgcaacttaaccgagatcagggttttcccaacaacttctgcaccgtttgagcgagcctgggcttgcttttgatgccctggatccaccttgcgctgatccggacgttttaaaggcttt

SEQ ID NO: 87406 - DNA, 135 bp, Zea mays
  unsure (1)..(135): unsure at all n locations
  Clone ID: MRT4577_179718C.1
agcgtcagccagactggatcgatcacagtcagcgtgccttatgtagttttttggcttcancaccanctcgtgatagatgacccacgagtacatgagggaggtgactgtgatccgtccagtctggctggcgctctt

SEQ ID NO: 87407 - DNA, 255 bp, Zea mays
  Clone ID: MRT4577_179719C.1
cgtcgactctctcagtattaactgtagtgcgcactgctgccgtgcatgacattccttgctaccatccacgatcgcgatcaatgaccactttgcccgatggaaaagaccaacctctgtggtaacgtcctgagtgacgacctcctaattgtcttgatgaatgatatggagagcaggctctctgtcttatgctaaggccatttaccacttcttggggacatcaacgttcagccagtacactgtgttggatgatgtgac

SEQ ID NO: 87408 - DNA, 594 bp, Zea mays
  Clone ID: MRT4577_17971C.1
cccacgcgtccgcccacgcgtccgcggcgaaagacgcggaggttggtgaaggagtgaaggaagaaagagaacgaaaggcggcctctcactcgcagtcgcagtagcaggttctagaccaccaaacccagcggctcccgctcatctcagttcggcttcggccttcgcattcctctacagatttcgcagttttgctgggggtaactacggaatggggggcggatccggatctttcctcaaggtcttggtcaacaacatggatgtcctcgcggggcctttggtttcacttgcgtatcctctgtatgcctctgttagagcaattgaaacaaaatctgctgtggatgatcagcaatggctcacgtactgggtgctgtactcatttatcactctattcgagctcacctttgctccggtactcgaatggcttcctttctggtcttatgcaaagctgttcttcaattgctgctgcacagaggtacattgagcaaaatggatcaaaagcgtttgagaatcttgttaacaagtttaagagttcgaacccaaggcgctcaattctggaggaggtagaggttgaaaggagggccaggattcaactag

SEQ ID NO: 87409 - DNA, 431 bp, Zea mays
  Clone ID: MRT4577_179720C.1
atcaaatacaagatcaccgtttctggctgaatatcatatcacagacactgcgcttcgggatcaaccaacgctgggcgcagctcgtcattagctactgattctccattctctggaagccactatctaaaagcactggctaaagaagatcaacctttgctccaggtcgatgaaactacatcttaaatgcactgtctcccataacaccctttatgctcatttcatcagaacgatccactgtcgttcattatacactgaatgcaataaatcactcacgcatcctatgaacatagctctcctaatatcgctgctctatgctgatacctctggtgacatgctactcttactaatgttggcacttctgaacaacgcattctatttcaagcccttaatgaaccagccgatatagatcgacaatcaaattcttaaaacaa

SEQ ID NO: 87410 - DNA, 1132 bp, Zea mays
  unsure (1)..(1132): unsure at all n locations
  Clone ID: MRT4577_179721C.1
gacccacgcgnccgggagctggtgcggacgcgcttcgatagggctgcaaagtttccggcacttcgaaaggtcactgtcactcctgctactcacgggtggctgttcgcacctctttatgaaacccccatgattcgggcttttccatacggattcaactgccctattccacgtgcctggccatatgcggtcgaaattgagcgtcatctacaagttgcgccatgggaaaatgaaaagacaagatggcgcggtttcaatctggtcacgaagattctggctgagggacggcataatgtcttggaatatgaaatcgatggccaccacctgggaaccgggctcaactgccggatatttgataatcaatgcagcgagtatgaagatttcgtatcagttcttcgcctacccggctttaaggagctgcgattatccctttttgttgacgggcaagaacgtttggggtggccagctcttcgcaatggtctactgcgaaaagccctagcagaagctacacaattggagcatgtgagtatagctacaggcccttttgagcacctgcatggctgggtagacgcgccgctgggtttgaggagatttcttcctattgagtgctggcccaaactacaacattttgagctgtggaatgttgatgtcgatctagctgagttattatcagttatttcacaactcccagacgggcttctttgtctccagttaaattctctacgtttttattcgggctgttaccgcgagttactcgatcagatgcgcgacagattgcattggtgtgagcagcaccctcagacaagggtgatgattggcgtatctatcgacaactgcattcccgggcgcgtggcttggctcgagacggagattgatgacttcttcaagcgtggtggtataaacccttttgagcaagataataccttttacttgcatctgcctcgctttgggatgggagttgtacgtaatgcgtttgacatggactatgtaaggccctgggtggagcaggatggtttagcatggacttattcaagcccctattcagagtgtcattgtaaagactcgacagttattgattcttagagcagatcttgaagctatttagatgaaaaaaaaaaaaaaaaaaaaaaaagaa

SEQ ID NO: 87411 - DNA, 332 bp, Zea mays
  Clone ID: MRT4577_179722C.1
aaaccagtgtgtgtcattattacaaaacgaacatgcatgttctgtgtctgaaacaaagaggctaatgggctatacagaaaagctgatgaagctgaaccgacgacactacacgtcttgatcacatgaaaataaacgctgcaagaatgtacagattgaatattgacgattttggctctgaaaattaggacacaaacctggaatggcatgctctaatttgtaacccatgggatattgtatttgtatgccaatatttcctcaaacgtaaacgaaattgtaaattcatggccacattttacaaacctgtgacggtataaacccttgtgttacccaaa

SEQ ID NO: 87412 - DNA, 252 bp, Zea mays
  Clone ID: MRT4577_179723C.1
tcccactcgtccgttcggattgagaaaatcttcttcctatgatgatgtgaaagcaggggagaggggggcatttgtatggtgcactcaaatgtattcttggctacacaaacgaggactttgttttcaatgatattgatggggattatatgtcaagcatttttgatgccaatgctggtatcgtacttagcttttattaaatgatacttgtgtattggtttgacatctagtggtgctacagttacctagtgttct

SEQ ID NO: 87413 - DNA, 361 bp, Zea mays
  Clone ID: MRT4577_179724C.1
gttaacgggtttttttttaagttgtgtaagtgtgccttggaagaccaggggcaggaacccgggtaaaaaaggacacccaacccgggaaaaaaggggcagacaaacggggaaaaaaaaaggaccaaaaagggagaaaaagaaagaaaagaaaggaaaaacagaaacccaaagggaaggcttccttaaccaaaggaaaaaagggggggtagggaaggttaaaaaacccggggggggccaagaaaaaacttcgggggtatgcacaaaaaaacttacagaaaaagggggggctttgggatttgatgaaacgggggggcaggtttcagggccaatcaaaacttcaagaccaagacaatccgggaaa

SEQ ID NO: 87414 - DNA, 656 bp, Zea mays
  unsure (1)..(656): unsure at all n locations
  Clone ID: MRT4577_179725C.1
aattcggcacgaggtttgcccttgcctccacagcctcgaacccctctgcctgccttcaccgcttcttcttccacgagcgcttaccacatgcattgccactcatcttcctcctcacttttgctgtttggagtcgccctacaagggaggaggaggaacgggaggcgaggaaaaatatggtaagaggccgttgggtttccttttgttttgttgacgggaggtgaggaagatccagggaagcgccgccgcggggaggcgaggatggtggggaagatccagggaggcgccgcacgcggggaggcaaggacgggccttccatgacgggattgacaagggcgatggagggaggtgcaggtgctgcagtctagggcgcgcggtggcatgccgatctgtgcggcggagacatgacgagattgacgatcgttgggtttcctttttttttggacttaacataggcagctgagaccaaggctccagatctcctctcccattaccgcgcccgcctgatatggaaggttcggcctcggcaacgcggcggtcggcggcggatctggacgcgcactacgcggcgaacaacatcgtgttggcctccttcgccagccagctcctcgctaacgcccccgcaccatcgcgggnatggatcgtgctggcgggaggac

SEQ ID NO: 87415 - DNA, 325 bp, Zea mays
  unsure (1)..(325): unsure at all n locations
  Clone ID: MRT4577_179726C.1
acacccttccgttgccccgattcttttccaatggtttttggttttggcctcgttggaactttacccggttgggcaatccaaagtgggtggggggggccggncctttaccaaaagtttggttaacttgaaccgtcagaattggcttagggttgccttaacaaaacagcaacaactgccaatttcaaacgggggaaggttaccaagctgctgaattttaacccaaacacatctttaaaacctaattaatcaaacaaccttttttttccttgataaaaaaaaataaaaaaaattatttattaaaatattttattataaaaaaaaaata

SEQ ID NO: 87416 - DNA, 306 bp, Zea mays
  Clone ID: MRT4577_179727C.1
ggttgggggccttttttttttttttttttctttttataattgttttatcccgccaaacaaagggttggggtgccaaaaagaattacttgataaagcccgccccccccttatagaaagaaagccgcccccgttctttttaaacgggattcttggccacaaattgggcttaaggcacccaccggtgagcttatgggaaatatgaaaaggcctttgccgggggggggttggggtggaaactatacctcggggcaaacggggaaaaattggacggagaaatggcacgtgcacaccggtcaaattgggggg

SEQ ID NO: 87417 - DNA, 258 bp, Zea mays
  Clone ID: MRT4577_179728C.1
gcaattagctcatcgactccagattggagtactcgacaccatgaaggtgctgatgggtgcccttgctctcctggcgctcgctgcgagcgccgactccagtacaagcggcggttgtggctgccagacaccaccgattcatctaccgcctgcgctgtatatgccgtctacgttctatctgccgacgtagcagcagccgaagtcatggcaataccccactcaaccaccgaaggtaagcccgtgccagcagttcggatcctg

SEQ ID NO: 87418 - DNA, 389 bp, Zea mays
  Clone ID: MRT4577_179729C.1
cgagccgaaatccgagcaaacggacgcgggcaaggaaagtcaaagcccttcaataggggaaccaaaaaaaaattcacgggccggcgttaaaaaagggggggaggggaaaaacccgggggtaacccaactaaaaagactggcagaaaaaccccaaatcgccagggggagaaaaaaaaaaaaggcccgaacagaacgcccttcccaaaagggggccaacctgaaaggggaacgggacccgccccgaaacggcccaaaaagcgcgggggggggggggggtacccccacagagacccgaacacttgccagggccggagggggggggccttgggaatggttcccttcctttccagaaagttccccggctttccccgaaaagaataaaaacgggg

SEQ ID NO: 87419 - DNA, 479 bp, Zea mays
  Clone ID: MRT4577_17972C.1
tgcctggccaggttgtcggtcacctcgcgcagggtcttcaccgggtccccggcggcttctttctctgcaaacgcaggcaccaccagcacgcgcgcgtctgagctgagctctgaaggactggcaccgaagtggcatgcggcagtgacttcacttgcctgcggcgaccgtgttgttgacgaggaaccagtagatgtcggtgtcgctgatgggcaccatgccggctctgagaccctccgataggaactgccggagctcccgctttacgccgtgcccgccagggaagacggagagcccgcggacggcagaccggcccgagctcgccggttccgacaggcccagccaccgcgccaccaccgagtgcacgccgtcacacccgatcaagacctgataacgtgtacaaggaaaactaagaaccatgcctccttttcttgaggaaaactcggcccggtttgccttccgaggactttcaaaacccttgg

SEQ ID NO: 87420 - DNA, 934 bp, Zea mays
  Clone ID: MRT4577_179730C.1
atccaaatccgaatcccgatccgcgcgcgcgtgaatttcttcagctccgtcttctctccccctgccaaggaggatggtgaggagccgcagcaggagggcgaggaagagccggcgtcccaagagtccggcggggggtggattttcggtagcctgatcgatacgctcaaggaggagatcgaggggcagcggaaagtgaacgagtcggccgccgtcgccgcggaggcggaggaggcccagaggggtgccgatggagaggctgtccccggcagcgggtggatcttcggcgggctgatcgtccggctcgcggaggggattgaagcccagcggaaagagcaggaggccattgcagccgccgcggagtcggaggagctcgagcggggagcggaggctgatgcggcggcggctgcaacggcaacggcaacggcaacggcagatgaggagggagaatcttctggcggcggctggagctttggcggcctgatcaggacgctcgcggaggagattgaggcgcagcgcaatgagaatgagaaggaggctgcctccacggcggaggaggacggagagcagggaatcgatgcggaagtcgcggcggtggatggggaggagggggcgccggctggggaaagctcagacggcgggtggagcttcgggggcctggtgagtacgttcgcgtcgcggtcggagtcggtcctgggagtctaccgccgcgacctcgaggacctcggctcggggctccgcctcgagacggccgcgctccgggccgccgccgcgcgcgccgcctcagcgctacctggcgcgctggaggccggcgcgtctgtcgcctccgacaggcttgagtctgtcggccaggccgttgacgacctcggtgccgccgccgctgggctcctctcgcatgccaacgagggcctccggtccgctgaaactgaccgtgttg

SEQ ID NO: 87421 - DNA, 312 bp, Zea mays
  Clone ID: MRT4577_179731C.1
agaacacttacgtcaccgcgtaacggttgacattgccttcatggctagaactgttgtgggcatcacactccttaacgacttgtgctagccatctacttgctagtcgcaatgaatgttatcgattgtgcacacagcgtgagaccaatccagctgctttgtgtaactataggagaccaagtgatcattccacctaccgtgtaatccagataatgcgtacatcgtatcatgactttgagatggtgccctagatatgatgatatactgcgatgtcagcgactgcacaacttatgtaatcaatatagcaaggattag

SEQ ID NO: 87422 - DNA, 466 bp, Zea mays
  Clone ID: MRT4577_179732C.1
gaccacgcgtccggagtgatgatggcattgctacaaccgatgaaccggatgatggttggttatgcttctatgagaccctcgccgatcgttttgttatagtgcctgaaagtggcatgcatctacttgagtctactgtgcatctttggagccagatcttctgggccaacatatacgcacttcttttccagaaatggctgtgtgaagccactatcgatgaaaaagaaatatcgatacgatatatgtttgctcttgttcaaggtgctacagatgttttttggatcgacatacagacaaataccagacattctctgtctatgaatcattatgtcctcgacgacatcgctctagtccctgaaagacttagtcaaatatcattacaggcactgtggagaccttatacttctggtctctaaattcatgctcttctatgatcaagatcacatgctctgtactgtcctagagcatt

SEQ ID NO: 87423 - DNA, 260 bp, Zea mays
  Clone ID: MRT4577_179733C.1
tcgttacaacctgggaccagggaacccgctgggggggcatttggaaaggctatggtgcatgtgccccacggtgccgaaccagatggacacggacgacgacaggaaaacggcatagcagattgtcgacgacgagcgatatgtaagagcaccttgtagaacaccgatcgcagtggctggacagagaggtgcactgaaccacaaatcgatgtaaacctggactacaaatatgaaactgacaaaggaaaggaaaacagcacaag

SEQ ID NO: 87424 - DNA, 557 bp, Zea mays
  Clone ID: MRT4577_179734C.1
gggcgattgggatcctcgaggccggccgggcgagcccggctgctacttcgccgagaccgcgttcacgctcgccgcgcgcgtcatcgggaagcgcacgcgcggagaggtgcgcgagtactggatcgacgacggcctctacggctcgctcaactgcatcatcatggaccactacgtgcccaccccgaggccgctcgccagcccgcgccccggcgataaaacctacacttccacggtcttcggcccaacgtgcgactccctcgacacggtgctcaccgggtaccttctgccagagatgagcgtcggcgactggctcgtcttcgacgacatgggcgcctacactaccggagccggctccaacttcaacggctacgcgacgtcagatataaagatctatgtagcctactccagctgaatgcgaacgtctccacgacgtcgggcctggactaattgatatgttctttttttatttattctataatcgacccaaccctgtattatctatctttcgatataaaaataaggtgttctttcggaaaaaaaaaaaaaaaaaagcggcc

SEQ ID NO: 87425 - DNA, 110 bp, Zea mays
  Clone ID: MRT4577_179735C.1
ctcatccatcgttccaccaccagtctcgcacagatacagcctctatttctgattcgatggatgtgatgttaactcaaacatggtagcctccaaggatagctaaggagtca

SEQ ID NO: 87426 - DNA, 431 bp, Zea mays
  Clone ID: MRT4577_179736C.1
tttttttttttttttttttttttttttttttttttttttttttttttttttttttttttttttttttttttttttttttttggaagccagagcagttttgggatttttagaaaaccggcccaaaaaggaaaaataaaggggtttaagccccccaaaaaatggggggggggcttttttggacatgaaaaattacgggttcccaaaaagggggggcccatgtttttatcccccggggttttaaaaaaaacgtttaaaaatttgggggacaaaccaaaaacttttttagcacggggacaaaaacttttaagttgttgcccggaaggcaactggaaaaggttcctcaaacctttatactttccgttgaaagaaaggggagcccaagggctgggtaggcctccaaaaaaataatttggggttggggttttccttgc

SEQ ID NO: 87427 - DNA, 637 bp, Zea mays
  unsure (1)..(637): unsure at all n locations
  Clone ID: MRT4577_179737C.1
cccgggcccacagctcttctgcttgactcgcccttgtcagcttcactcagcccaggcctctgctcgccggacgccgtagcacatgcttcctgctcggcctccctggcgtgctgctccctcgccttggcgtccctgcgagctccttctccctcgcctgatttccagctcgggcctcgccggatgccgacgccgcttctctaacctagccttgacactaaatcgctgcagcacgccataccgtgtgtgttgcactgtcatcgttcgctatcctcatccttgccaattttcctcgtcgtttctcggctacaacctcgtcagctcctgcgcattgtgcacgtcttgtgttcgggtcgagccccaggattttgaggaaaaggaagctctagtgcatcaaccggtgaaataaataaactggtggtagtcatggtccttgcgaaatccgagatcaggtacgctagctgatcacgtgataccaaggaccagagctgagtcgaccacaagatgctgttaagcatgggtttcttcgaaaggtgatactgatgaatgaacttgaagattgngtgatcggatcaagcgccaggatgtgagatgctcgccaagtggacgtcatctaacaaacactaacctagtgttatta

SEQ ID NO: 87428 - DNA, 596 bp, Zea mays
  Clone ID: MRT4577_179738C.1
atcccatcaccaccgcaccaagtcacaagcaagagtaggagctcgatcaccgagtgttagctctcgtagatcgcaagtgtttcgtttccacggtgcagtttcagcaagtcggcaatggctacgattgctctggtagtagtggccatggtgctcagcctggcgcagctctccgccgggagcaggaggctgatggagctgtacgtacctccggagagcgaccggctcacgtaccaccagggcggcgtgctcagcggcggcatccccgtgtccatcctctggtacggcaagttcacgcccgcgcagaggtccatcgtctccgactttgtcgtctcgctaaactccgcacctgacggggccgccacgccctcggtcgggcagtggtggggcaccatcgagcagctctacctgtccaaggcggctgccgccaacggcgaggccgccgccacgcacgttctcctcgccgagcaggtgaccgacgagcagtgctccctcggcacgtcgctcaccctggcccagatcgaccagctcgccgcgagcatcggcgccaagaagggcggcatcgcgctggtgttcaccgacgaggacgtccgccgtgg

SEQ ID NO: 87429 - DNA, 676 bp, Zea mays
  Clone ID: MRT4577_179739C.1
gttgttgcaagccttcccggctacttagatcactaacaacgtcgccgacagcatgcgactatgcagctgcggaccataagtacctgcatctcgacgtcgaacatggcaacgacacacacgcactgctcctcgccgaacttatcttccacgacatccgcctaggatacgcaaggggaaccggcacaacctcaggcaacagaacgtaggcaacatacagcggcttccgctcccgccttcggccccggacaagctggccatcatcggacacctccacctcatcgatgtcgagacccacatctcgatacgggacctgcacgccaaggacgggagcaacgggctgctgatcctccgcatcaggtgccgagcccaccctgtgcgtggcctcgcaccagagacgccgacgccgtcctgcgcagccaagaccagcatcttcgcgtcgcggtcgccggccatgggcgccgagatcatccgctacggaccctcggacggcgcggtcgtgcgctacagcgagtactgacgggagggcagaaaaatcctcaccacgcacatgttcagcaccaggaaggagcaggacttccgccatggccgacaggaagaggagcgactcggcatggacaagacccgcgcggatgacaagccgcgacgtagacgggggcggacctgagcgatctcctga

SEQ ID NO: 87430 - DNA, 1218 bp, Zea mays
  Clone ID: MRT4577_17973C.1
gaccctcgaggccggccgggaatgagagagaagagcaagaaagacttcgtcacgtcaggtcgacggcgaaagacgcggaggttggtgaaggagtgaaggaagaaagagaacgaaaggcggcctctcactcgcagtcgcagtagcaggttctagaccaccaaacccagcggctcccgctcatctcagttcggcttcggccttcgcattcctctacagatttcgcagttttgctgggggtaactacggaatggggggcggatccggatctttcctcaaggtcttggtcaacaacatggatgtcctcgcggggcctttggtttcacttgcgtatcctctgtatgcctctgttagagcaattgaaacaaaatctgctgtggatgatcagcaatggctcacgtactgggtgctgtactcatttatcactctattcgagctcacctttgctccggtactcgaatggcttcctttctggtcttatgcaaagctgttcttcaattgctggttagtattgccacagttcaatggagctgcacatgtatatgagcattttgtgaggccaatgattgtaaatcagcaagttgtaaacatctggtatattccaaagaaggatgaatcaagtagacctgatgatgtaatttcagctgcacagaggtacattgagcaaaatggatcaaaagcgtttgagaatcttgttaacaagtttaagagttcgaacccaaggcgctcaattctggaggaggtagaggttgaaaggagggccaggattcaactagaatctgaagcgagggaagtgaaccctttcttcaatccagaatatcagtactaggcaaccattttcccttcacttgccaggaatgtgctaggatcggtttggaggaagatgtctggatattaggattgcgttttgcacctactgaatcgatgatattgtgtagatggacaaccataattgttgtagatatgttgtggcgatggaactcatgtaatggtcatgtcgcgaatgtttcatgctgctggaaattatgtattcacactggactctagttatgtgcctcactagtttcttgaaggtagttgttgaactaggtatttcttcgtctcttgtctgatataggtgtaaaccatgtggcactgccatgggaggttgactgtccgaatgctacgcttttattaaaaaagccagaagcactgaccaataaaaatactaggctgattaaa

SEQ ID NO: 87431 - DNA, 369 bp, Zea mays
  Clone ID: MRT4577_179740C.1
gaacatgctgtcagtcgattgaatccttttcgtttccaacagtagaaacagagtatcgattttccatcattaaacttagatgtaatactttcgatacaccactctcattaaccactgtgcatacagattcgtcctccttaaaaggtcttcgagtaaggagggttccccaaggaaatactgcgattgatctctaatgttctccagcttctagatcaatgattaatttgcacagctgcctgtattctgtcagttatcttgtcatgtgcatcatctgctgaactacgttttgtttcataataaccaagcagactacactgccagtggaggagataagcaagtctctccaacagatgggatacgacgtggtgc

SEQ ID NO: 87432 - DNA, 326 bp, Zea mays
  Clone ID: MRT4577_179741C.1
gaattcccgacccacgcgtcccgtccagcatcctcagccacagaaaatgctctgtggtcggatggcacattcttacacgtcacgtattgacgagcaactcatgcacagttctatttatacccctggatcaccctatacttgcgatgtccctatggtacaagaggccatagacgccatatgtaggatccacggatcatcaccagatgagaagatagacatcacctaagctattataaagaggctcgactggatccaagcccgcactctttgctggcatcatagcactggtgatgagcaatctaaccatgatccgaatgacccgcaga

SEQ ID NO: 87433 - DNA, 438 bp, Zea mays
  Clone ID: MRT4577_179742C.1
gcggtgaggaggaggaggacgacgacgacgaaccatcgccgtctgccgcaggtgaacgaccacaacagcagaccaccacgccggcgtccgcctcggctagcgctcctcctcctgctgcaagtacttccagcgctagtgcaagtagtagcactgccgccacggccacggcgacggtgacgacgacgacgacaaggaaggaggaagaaggatccgcgccaagctcgtgataagtgtagatcatctactagccttttgattcaatcataccatcaccggcctcccaattctcagataatccatcttaaatttttagttgcttactattacaactatatattgttatattgtttgttggtataagagaggtctaagggacttgtaggatcatgttaggaggggtacatatatatataaacaaagcatatatatcacttgaag

SEQ ID NO: 87434 - DNA, 193 bp, Zea mays
  Clone ID: MRT4577_179743C.1
aggcgatatcattttttaacagcaacagaacacgcacccttgcagggggagggggcgttagctgctatagctgtagcctctacccctaactagtagctagccactcgggcgagtagacatcagccctctgatcggcacccatggccactgccaaggtccagaccccgaccgtcagggcgaccgaagaagcgcc

SEQ ID NO: 87435 - DNA, 474 bp, Zea mays
  unsure (1)..(474): unsure at all n locations
  Clone ID: MRT4577_179744C.1
tcgagcggccgcccgggcaggtactttcttatttctgcgaagccacactcatcacacaaaaaactttattattgatctataactcatcataatctaatagatggcaccaccactgatgggttcatcgtctaaacgctcatgggctagccaaaccatgctgcctagtatggaaaccattgttgcagtttgcatagaaggcgccagcgtgtatgcgcactgtgctggttataacggaaccacctgagcttcgcatcaaacaaggctaagatggcttcactaccacgctagcatggtctataatgattacataacatacgttgctagctagttaaataactcactgactagattcaactgctagncagcatgcttctaatgataagaaactgctagctgtaggcagcacctatctcttttaataacaaccacagttgttgcacatatacccagagctaatgctaatacttggacgat

SEQ ID NO: 87436 - DNA, 556 bp, Zea mays
  Clone ID: MRT4577_179745C.1
gcttcgccctctcgctccagccgcttcacagcgccgccgctcgcctctccgaccgccgcgagaatgccgttcaagaggttcgtggagatcgggcgcgtggccctggtgaactacggcaaagactatggccgcctcgtcgtcatcgtcgatgtggtcgaccagaacagggcacttgtggacgcccctgatatggtcaggtgccagattaacttcaaacggctctcacttactgacatcaagaagctgattgtccagaagaggagggctgcgctcagtgactttgacaggttcaaggtcatgctggcaaggatcaagaggggtggtgctatcaggcaagagctcgccaagctgaagaaggcgtccacggcttaagtcccttttggtggatggcatgttagtttttggtttcatgttgcatcagcattttgttttgagtgttgtcaaagccagaattagtaatatgtttcatgtgtacccttttcaaacttcatcaagaatgggtgtgctctggatattttgtcgggaatgatatgaaatacttaagttagcttgcgac

SEQ ID NO: 87437 - DNA, 536 bp, Zea mays
  unsure (1)..(536): unsure at all n locations
  Clone ID: MRT4577_179746C.1
gccggcctggccggggtttctgttcggacttccgccgcgcttcgccctctcgctccagccgcttcacagcgccgccgctcgcctctccgaccgccgcgagaatacgcgttcccaagaagtcaaccctgatcaaggctatggaggaagctgatgtgaagacgaagtgggaaaacagctcatggggcaagaagctgattgtccagaagaggagggctgcgctcagtgactttgacaggttcaaggtcatgctggcaaggatcaagaggggtggtgctatcaggcaagagctcgccaagctgaagaaggcgtccacggcttaagtcccttttggtggatggcatgttagtttttggtttcatgttgcatcagcattttgttttgagtgttgtcaaagccagaattagtaatatgtttcatgtgtacccttttcaaacttcatcaagaatgggtgtgctctggatnnnnnnnnnnnnnnnnnnnnnnnnnnnnnnnnnnnnnnngaaaaaaaagaaaaaaaaaaaaaaaaaaggccccta

SEQ ID NO: 87438 - DNA, 913 bp, Zea mays
  Clone ID: MRT4577_179747C.1
ccggccaaaaaaaaaaaaaaaaaaaactgttcggacttccgccgcgcttcgccctctcgctccagccgcttcacagcgccgccgctcgcctctccgactgccgcgagaatgccgttcaagaggttcgtggagatcgggcgcgtggcccttgtgaactacggcaaagactacggccgcctcgtcgtcatcgtcgatgtggtcgaccagaacagggcacttgtggacgcccctgatatggtcaggtgccagattaacttcaaacggctctcacttaccgacatcaagattgacatcaaacgtgtccccaagaagtcaaccttgatcaaggctatggaggaagctgatgtgaagacgaagtgggagaacagctcatggggcaagaagctgattgtccagaagaggagggctgcgctcagtgactttgacaggttcaaggtcatgctggcaaggatcaagaggggtggtgctatcaggcaagagctcgccaagctgaagaaggcgtccacggcttaagtccattttggtggatgacatgttagtttttggtttcatgttggatcagcaatttgttttgagtgttgtcaaagccagaattagtaatatgtttcctgtgtacccgtttcaaacttcatcaagaatgggtgtgctctggatattttgtcgggaatgatatggaacacttaaaagttagctgtcgacaaatgtgcattgcttcccatttgagttttgtttattgccagtgtttttaggaaaccaggttattggcataaactattttgtgatccaaaaaaaaaaaaaaaaaaaaaaaaaaaaaaaaaaaaaaaaaaaaaaaaaataaaaaaaaaaaaaaaaaaaaaaaaaataatataattatttaaaaaaaaaataaaaattaaaaatataaaataaaaat

SEQ ID NO: 87439 - DNA, 702 bp, Zea mays
  unsure (1)..(702): unsure at all n locations
  Clone ID: MRT4577_179748C.1
cgaccgactgctgcacagtcgcacgtctccagcaaactgaggatgagcaggacaccttcagtgatgccgcccatgaggacagcagcaacgaggtgaaatggccggggtgcacttgcttgaagccggggagccgggacgcgtgcgacatcatctcccacatgcagagggcaccacctgggaaatgtggtcgagggggacctagacaacaaggacggacatgtcgaggttcatgagcacaacagggcgccgagggctcatagcgcaagaaatgcagcaaatactatgacacagagcgctatacactgatgaacaaatgggacgggtggtcgtaatcttgtcatggcgcatgagcaagggaggaaggtgtagcatccccatgcacgcccaaatcttcaaggtgagacggcgcttgcgcgtatatatagcagaagtgaattataaggtgacacgctgtagtatgtgatggcatggcaaactggtgtctacatgcctcgaatatctgacgtgtgtatgtgaatgaatgtgtctcaggataagatgattaatgtatgaggatgacgcataaaaaaatgaaaaaaaagcgctccatcaacctccacgttttgttaccttcttacgagggataattgtgcgattgaagtgatcatggccatangagangcctgagcgaaattgctatccgttcactattccactcaacat

SEQ ID NO: 87440 - DNA, 383 bp, Zea mays
  Clone ID: MRT4577_179749C.1
atgaggaatccgcacagattgaagtctctcacagccttacaagatgaacacaattaagacttagagtaagggagggagaaagaacatgcacacaaaagcacaacacaggaacacacgcaataaatccaaagaaacgagcgcaagaacacaatatcacagttacaactcaaaaccgacactcggatctcactagaattattggaatgcgtgcttgcaaagatttggagtgttggtatgctcttaagatgcttgagtactagtatgagacgcataggggtcccttttatagccataaggggcctaggagtcgttgcaaacttaatatggaagtccaaaaacatccttatctacgggcgcaccggaatgggtcagtgcatccccag

SEQ ID NO: 87441 - DNA, 1266 bp, Zea mays
  Clone ID: MRT4577_17974C.1
aaaacttgattactggtctaaactggctaggccccgttcgaatgtcatcacataacaacagtatgggggccaaatcacaagcttttacacgtatagtatagggggtttcatctttacaagatcctttcccttttccttttcacccctatcaccccaacccacctacgctacattacatttcctgctataccagtataccaccaatctgtatacaattgaaaaactacaggctactacaacccaatgcttcctttcaggcacatatgtaacacatatataatcatctgaggtactctcttccgttccaaattataaaacgttttgggtatatatctaaacacatcttatatttggtatagcagaggccatgaatttagaaaagccaaaaaaaaaaacgtcttgcgatttggaacggagagtgagtataggcaaacgaacaatcaccccacaaaatcatggaaaaggggcgactgctcaaaccgttgccgctgatccatctggctcatggactcgtagtccggcgacgccacgctgacaccgagaggagcggcggtggcattgtagatgtcgtcgtctccgacaccgattccgacaccggggaagctctgctgagcgtgcggaaccgagaggctgctgctggagcgctgcagccccagggtgagcgacacgttgccgttgccgtacctgcccagctccgccaggtggtacgccatgaaccgggcgttctcgtcctggtgctgcgccacggcgctgtggtggaggaggaggccgccgccgccgtcgttcggtcgctgctccttgagcatcaggctcatgaagctgtcgtcgtggtcgtggtcgtggccaggctcgttctggaataaccccatgggcgctccagcggcggcggcggcgacgctcatggccctcatgctggctcctcctggtggctcgctcagctggctgctgctctcgcagacggcccgcggcgtgcagcagcttctcgccaggtggtcctccttgtctcgcgaagacgccgtcttggccttgcttcctgctggcgcgttgtcggaggaggagttggagtcttgctcgatgtctccggtctcttccttgtacatgtcctcgatcatgggtttccagaggcggacgcgggcgttgatgaaccagttcgaaatctgactcctcgtcaggcctgtttgccttgccagcatcagcttttcagaatccttagggtacctgcaggacagtgccatcagccatgacaagatggtgaggaggaacccg

SEQ ID NO: 87442 - DNA, 643 bp, Zea mays
  Clone ID: MRT4577_179750C.1
ccggccgggacgagcacatcaagcctataatcactgtgctccgatccatcaacaatcagcccacagcgatacggagctaaataaagaagaagcagagcggcattatcgcgaggctgcactcttctgtgctaccactgacgctagcttgtgcccttgctgaagcagaggctaagaataatacacctgctgcccgcggcgccgaggagaagaaggcgcaagacaaattctgctggacgctgagctaggccagcaatgctatggacatggtggtatgcaaggacacctgccacctatcacagggctccaacctggagctgtacgaggcggatccaggacaagggcaagtgcaacgagcagaaggtcttcaccgggccgcacatgaactactgccaacaggcgtgcgacaaggactactgcttcaaggcggatgacgtcaacaacgactgcaacaccacctgcgccaaggaagaacaacctctgctcatctagaactgcacgacgttgctgcacccttactcattgctgaacgcagagcacgcccgacgaacgtcgtgttctgcctgcttgcctgacactgaatcaccgatacatcatatatacatgcatgcatgggatgcgatgacgatgcgatgcatgcttgcat

SEQ ID NO: 87443 - DNA, 331 bp, Zea mays
  Clone ID: MRT4577_179751C.1
attcggctcgagagaaactgcgggtccgttttttttgttgcatacccacatgctgatattgaagagtttattctgtgctttaaaccaagagaatgagatgaacgaggaccaatgatgttgcaatggcacctgaccgtattacggaagacgaataaaccacttgtgccaacatatacatgggtatgtctcaagataggacactgctctgacgttgacagattctgaacaagagcacatactagaccacaggcgtgatggaatataggagcttaaataactggaaacgcgaaggccacaggagcttctagtacacttggggtgggctgatctc

SEQ ID NO: 87444 - DNA, 168 bp, Zea mays
  unsure (1)..(168): unsure at all n locations
  Clone ID: MRT4577_179752C.1
ntacgtcacgccgtccgnccactcttcgttcaagttttccgtaaccttgtccaatcatgggcatgggggtgtggccattttggaaaagtggccacttttgtttatccagccatttgtacaactggaggccatggttgattcaaaggaccggccgttgttttcttccgg

SEQ ID NO: 87445 - DNA, 2041 bp, Zea mays
  Clone ID: MRT4577_179753C.1
cgccacgcgtccgcccacgcgttcgcggacgcgtgggcggacgcgtgcgagcaaacaccagttttctaccctaaacacaagaacccagatgcataataaaaggtgaaagctagcagaagaggtacctaactctaccctactatagagaaaaagtcagcacattgcaagcaataataatggagacgacgacgaagctccggtggagccggcccggctccttcctcctcgtcgccgcggcgttcctggcgtccgccgccgcgtcgggcgtcaacgtcggccagttcgacgaccacttgcagaagcggaaggagctcgccgaggcgtcggcgagggaggcgtacaggcccgacccgtacaacgtcaccaacagcttcaacgccgccgtccacagagctgtcagcagcagtcggcgtgagatgcgggagaggccgaggaagcacaagaagaggggcccgtgccgggcgacgaaccctatcgacaagtgctggcgctgccgcagagactgggcgacggaccggcagcgcctggcccgttgcgccagaggcttcgggcacgcgaccaccggcggccttggcggcaagatctacgtggtgaccgaccccaccgacctcgacgtggtgaacccgcgccccggcacgctgcgctggggcgtcatccagcccggcccgctgtggatcatcttcgcgcggtccatgatcatccagctctcgcaggagctgctcatgagcagcgacaagaccatcgacgggcgcggcgcgcaggtgcacatcgccaacggcgccgggatcacggtgcagctggcgcaaaacgtcatcatccacaacctgcacgtgcacgacgtcaagcacaccatgggcggcctcatgcgcgactcccccacgcacatcggctcccgcaccagggccgacggcgacggcatctccctcttctccgccaccaacgtctggatcgaccacatctccatgtccaactgcgaggacggcctcatcgacgtcgtgcagagctccacggggatcaccatctccaactgccacttcaccaaccacaacgacgtcatgctcttcggcgccagcgactcctggccgcaggaccagatcatgcagatcaccgtcgccttcaaccacttcggcaggggcctggtgcagcggatgccaaggtgccgctggggcttcttccacgttgtcaacaacgactacacgcactggctcatgtacgccattggcggcggcgacgcgccaaccatcatcagccagggcaaccgctacatagcaccaccaaacatcgccgccaaagtgatcaccaagcactacgcggaagaaggcgtgtggaagaactgggtgtggcacacggaggacgacctgttcatgaacggcgccatcttcaatccgtccggcggcgcccccaagcaggtcgacaccaacgagtgggtcaagcccaagccaggaacctacgttacaaggctcacccgcttctccggcacactgtcctgctgcacgggcaagccgtgctgaaggccggccggtgggcgtcagaggctgcttcttctagctcatggcctggccatgccaggtcgcgatggctgcgtttcatttcatggaagaaagcaaggatggatcacaggttgtcgttctgctaattaatctacatacgtttgccttcaagtactgtgttgtggcattgttacacatcacagtacagtttggtcattttttttcccacagaggaagtagggattgatttaatcattgatttaatcccacacgcgtgtatctacgtatacagtttgtataacatgaaccacctctgtttgcgattggtctaaaaataaatataatacttatataaaaaaaaaaaaaaatttgaccaaactgtactgtgatgtgtaacaatgccacaacacagtacttgaaggcaaacgtatgtagattaattagcagaacgacaacctgtgatccatccttgctttcttccatgaaatgaaacgcagccagcgcgacctggcatggccaggcccccttatggccaagatcaagatcgggat

SEQ ID NO: 87446 - DNA, 621 bp, Zea mays
  Clone ID: MRT4577_179754C.1
ctcgaggccggccgggccgggatccctccagactgcgaccagagcagcgagagagagagagagagagagagagagagcaactgagcaagcaaggaagcaagcaagcaatcggagcgatggagcacgggtacccctgcaacggctgcggcaaggagaagcggccgccgctcaagaggggccagctcaagctgcagatcgccaggaccctgctcggcagcctcgcggcgccggtcgccaagaaccgggaccgtgccttcgggagataggccgcccgtgccgtggtagcaggagtagagtagtagctagctgaggacatgcgtcggtcgagtggcggcggactgtgccgtctgtacgaactgatgagcttttgttcttcctcctcttcttcttcttttaaaaaagagcgtgttggcgtcagcttttgctctgttcttttttctccttccgcaggcctcttgctcaccttctccagccgcctctcttggttggctggctcgtactagaacggaaacgccaggcagcttaagagccctgttcctccagaatgaagcaatgcaaacaaaaaaaaaaaaaaaaatgttttcttatgtagtatcctcttgaacaaaaggagacgccacc

SEQ ID NO: 87447 - DNA, 135 bp, Zea mays
  unsure (1)..(135): unsure at all n locations
  Clone ID: MRT4577_179755C.1
acggagcgcgcgctactgcgtatnaggaagcctctcgcattgacaagccagccggaggnttggttcgctttgctttgcttacgtgctgcgctgtgcgctccgaccaggccccgtcccgacccggcgatgcagccg

SEQ ID NO: 87448 - DNA, 298 bp, Zea mays
  unsure (1)..(298): unsure at all n locations
  Clone ID: MRT4577_179756C.1
aaaaaaaaaaaaaaaataaaaaatttactttctaaacaaaaaaaaaaaaacacaaagccaagttaaaatttaaaactacgcaagccccacccaanaaatcaactttacaaatattaatatacaaaaaatcctatcccctttcacatacacatatcttaacactatccacatctaaatcatctatatttttcccttatcccctattttaatttcattatcccctttctaaaaaccatcataattaaaaaacccttttctttccccattttttatacttttcccccctccccattttccc

SEQ ID NO: 87449 - DNA, 816 bp, Zea mays
  Clone ID: MRT4577_179757C.1
agtctcccaacctcggagaattgatgggaaggaaacaggtgatcaggttggttcatcatcccataaatctcaagacgcacaagtaggttctctagtcaacctgctgagaaatgccagcccgctgcgaaatcctagcaattcatcacagatatcaagggccgagtccagcgaagtagcctcagcaagctcggtcacgtcccgcaggacatctgacgcccttgaggagctccagtccttcaaggagataagggagcgactgctgttccggagcagcgcaaaacatcaagagccaccaggaaaaccataaggccattctttgttttgtttctcttaacgtgatcgctgatagactcccaaccgggaaaccatatgcacagcgaactatagttgctgtgttcatgtatatacgagtgctaaagttgatgcttttgattgaagagaaggcaccggcttccatttatttcagcggaacaatcactcgtcgttctcaagagtgatggagtgatgccgctgttgatactcttttgtatatgggaagcgaaaccgatacacgtaggtgggagcgagggagcctgtgaattgtgatggatgaaagcaggtctcattgtgtgcgtgtgtttgtaaattatgtaactgctggaaatcaaatgttcattagacgtcaacctttgaagagttgctcgcacttcgcaagactagttttatttgctcttgctatttgatctggtaatttgtggattggcgacctgcaggctgcagttgtaaaaataactgtcagttttaaattataagatgttttgactttttatgcatata

SEQ ID NO: 87450 - DNA, 1035 bp, Zea mays
  Clone ID: MRT4577_179758C.1
tcgaggccggccgggagcggatcagatttatgcagtcttactgccgccagctccagccatgccgcgcggcagcagcttggaccagagcctgagcgacgaggagcggtcggcaggtactggggcggtttggatccggcgtcgccggcaatgtccgggatgtccgactccgcgggcggcgggcgcgcgggcgcagagctgatggtggagcagttccacctcaaggtgctccacgccgtcctcgccgtgcgcacgccgcgcccactcgccaccgccgccgctgccgcgtcgtcgtcgtcgtcgttcaggcggagggacaggtggttccatctcccgctccacgacccgccgccgcccgaggcggccggtcgcctcgacgagctggcccccggggagccgcgtgtggtgggtcccctcctgtgtcctgccaccgccagtggtgtgggagcccgaggggaggtggtggagaggtggaccgtggcgtgcgagccctggccagacgccgcgagcggcgaggaggttgccgtgaaccgggcgtacaagcactgcttcacgctgctcaggtccgtttacgccgcgctccgcgtcctcccggcctaccgcgtcttccgcctcctctgcgccaacgcctcctacaactatgagatgggacaccacgttgacaccttcgccgagcccttctcgcgccctcaggaggccgccatgcgttcccaacgcttcgttcccgtcgaaacccagctcggtcgcctcgtcgtttccgtccactatctccccagcctcgccggcgtcgccgccttcaacctcgagatcacccccctttcgccctccatgataatcccagactacgtcggcagcccagccgctgagcccatgcgcaccttcccggcctcgcttacagaagccacgggctccggcttcccaccgtcctatgagcagcagcgtccacacagctgggcttcacctgcgttctggccgcacacgccggcacaccaggccaggttctcgccaccttcagtgttttatgcgtcaccgacgcca

SEQ ID NO: 87451 - DNA, 141 bp, Zea mays
  Clone ID: MRT4577_179759C.1
acaaaatactacaatatttgtagtaccatagtacacattgttattaggtaattaaacttgaaaaaagagttaatttcgcagttaaatgcagtgattaagattaacgcaagggcgagagagattagagctcccccgtgcgaa

SEQ ID NO: 87452 - DNA, 840 bp, Zea mays
  Clone ID: MRT4577_17975C.1
cattgggaccctcgaggccggccgtggttggcaagctagctagctagccattattctcccactccacctcgcccgtggcccgtacccgtcgtcgtcgtccacacagacacagccacaagctgctgcgtgcttcctcttcagttcagctgaggtagcggcgcctcacccatcccccccgctacatacacatatctccttcttcgaagaactcggccctttgggagcgagcaggagccggagcaggaccaggaagatcatatcagaagctaggggatatggcgaacgctggcggcggggcggccggggaaggggagtggctcaaggtcgcccagctcagggccctcgtccaggcccaggatgaggaccaccgcgcaaagatcgaatcaataaggttgcggcgggagaagcggtgtctccgaacaaccgtcggcgttttgacgaccgacctgcacgagtatcgacaaatcaggtttctgggaaatgcttcgcgcacgtccgctcggattcctctccaacactcgtggaaatcactgtaaataaatctgcattttcagtttattgcgatggcggacttatggttagatccattgttgattcttttttatacgttaattttgttgagttagttcagatctgttatgttctaatgttatatatactatctgccagtgtatttgagtttttcgttttacgctgcattatcaaattaatcttagaccctatcaattttcagaaatgaaaataggaattaagcggatgggacatcatggtctaagtgatgttattaataaaggtcgacgccattattttacttctgaaaaaaaaaaaaaaaaagcggcc

SEQ ID NO: 87453 - DNA, 2482 bp, Zea mays
  unsure (1)..(2482): unsure at all n locations
  Clone ID: MRT4577_179760C.1
aaaaaaaaaaaaaaaaaaaaaaaaaaaaaaaaaaaaaaaaaaaaaaaaaaaaaaaattggtacctcgaggcagcgcgggtaagccaatccccactcttccaccgctcctccgcttagcgtgcagatctaacgatcgctccgatcccaagcacaacaacttctccaattccaatcaccagccgatcagatttatgcagtcttactgccgcgagcgccagtcatgccgcgcggcagcagcttggaccagagcttgagcgacgacgagggctcggcaggtgttggggcggtttgggttcggcgtcgctggcaatgtccgggatgtccgactccgctgggggtgtgcgcgcgggcgcggagctgatggtgcagcagttccacctcaaggtgctccacgccgtcctcgccgtgcgcacgccgcgcccgcacgccttcgcggcgccagcggcggcgtcgttcaggcggagggacaggtggttccatctcccgctccacgacccgccgccgccgcccgaggcggctgaccgcctggacgacctggtccccggggagccgctggtggtggacgtcctcctgagccccgccggtagtgtgggagcccgaggggaggtggtggaaaggtggactgtggcgtgcgagccctggccggacgccgcgggcggcgaggaggttgccgtgaaccgggcgtacaagcactgcttcacgctgctcaggtccgtctacgccgtgctccgcgtcctcccggcgtaccgcatcttccgcctcctctgcgccaatccctcctacaactacgagatgggccaccgcgtcgacaccttcgccgagcccttctcgcgcccccaggaggccgccatgcgttcccaacgctttgttcccgtcgaaacccagctcggtcgcctcgtcgtttccgtccactacctccccagcctcgccgccttcaacctcgagatcacccccctttcgccctccatgataatcccagactacgtcggcagcccagccgctgagccaatgcgcaccttcccggcctcgcttacagaagccacgggctccggcttcccaccgtcctatgagcagcagcgtccacacagctgggcttcacctgcattctggccgcacacgccggcacaccaggccaggttctcgccacctccagtgttttatgcgtcaccgacgccatcgcctccccactttccgcccggtctcatgaggtgggagtctgcgccaatgcccataccacaggtgagcgagaggaggagccctgcacaccgccagaatatgctgccaccgccttcgccgagaagaggagacacgggggcagcaggtgctctagagtttccatctgagagtggccggttgattgggaggatggaggaacttcggctagctgatctacatgcgacctcgtcacccagacataagggcaaggacactaaagatggatctggcagattctctgcactctcctcatgcgattcaccacggcaagatgatctggatgatgtggattaccatttcgacgttgatgatgttgatactccagtctcccaacctcggagaattgatgggaaggaaacaggtgatcaggttggttcatcatcccataaatctcaagacgcacaagtaggttctctagtcaacctgctgagaaatgccagcccgctgcgaaatcctagcaattcatcacagacatcaagggccgagtccagcgaagtagcctcagcaagctcggtcacgtcccgcaggacatctgacgcccttgaggagctccagtccttcaaggagataagggagcgactgctgttccggagcagcgcaaaacatcaagagccaccaggaaaaccataaggccattctttgctttgtttctcttaacgtgatcgctgatagactcccaaccgggaaaccatatgcacagcgaactatagttgctgtgttcatgtatatacgagtgctaaagttgatgcttttgattgaagagaaggcaccggcttccatttatttcagcggaacaatcactcgtcgttctcaagagtgatggagtgatgccgctgttgatactcttttgtatatgggaagcgaaaccgatacacgtaggtgggagcgagggagcctgtgaattgtgatggatgaaagcaggtctcattgtgtgcgtgtgtttgtaaattatgtaactgctggaaatcaaatgttcattagacgtcaacctttgaagagttgctcgcacttttgaaaaaaaaaaaaaaaaagggccagaaggctgaagatgataagagtgataaagacagcgtgtctggactttgcaagacaagttttatttgctcttgctatttgatctggtaaattgtggattggcgacctgcaggctgcagttgtaaaaaaaaccgtcagttttaaattataaaatggtttgacttttttaaaaaaaaaaaaaaaaaaaaaaaaaaaaaaaaaaaaaaaggaaaaaaananctcgagaaggggg

SEQ ID NO: 87454 - DNA, 229 bp, Zea mays
  Clone ID: MRT4577_179761C.1
gatgacatcctgttattggatgatgggaatcagtagctgcaattggcatgaactcatacatatataagcgttctacacccttggggcgcataatgacgataaatgtacagggtgatatgaccacaattgtttgaagagctgacacaaggcgtgatatacgatggataactcatatgccgaaataccatccggtatttttagtaaccagaacacgggaccgccgcgattt

SEQ ID NO: 87455 - DNA, 203 bp, Zea mays
  Clone ID: MRT4577_179762C.1
aaagactcgccggcggggacgggagcacctcaaacggggtccctcgccgtcggtcgcttctcatctgattgaccgcctcttctctccgcggcgatggcggacggctccagggacatcagcaggcggcggaatccagcggacaagctcaccgaagacctcctcgtcgagatcctgtcgcgcgtgccgtacaggtcgctctgccg

SEQ ID NO: 87456 - DNA, 293 bp, Zea mays
  Clone ID: MRT4577_179763C.1
tcttggattaattgactacgatctctatgagcctggggatgtttcattttgtcgagcgtggtctcgtttcggggggagggggatagtataggatgatcaagactccatccctttcgttaatggacgatcttcgctatattagtgtatagcttacctcttggtactttgctgggttttgtaataatatgatccatctcattgatgaatcaatgcatttactttgcgttctccctctctaaatcattattcacttttaattttctatacgataattcataataattaaaataacg

SEQ ID NO: 87457 - DNA, 333 bp, Zea mays
  Clone ID: MRT4577_179764C.1
ggcctccataaattttcatgaatttttgaggctttttgggtattattaatttttttttacaaacaatcaacaaaatgcccacagttttccaaataaaatttcgggatttccgagaaaatttatccgaaaaaatttccagattttcgatttccgacgaatttcaaacatattgttttcgaattcgatttccgaacaaaatattcgtattcgtatccgttatccgaaaaaagtccggatttccgaaaattccatttgaaccagtgttcaccattttcgaatcctgatccgaacggatattttccgaaccatattacttcctttatcagataaaaa

SEQ ID NO: 87458 - DNA, 141 bp, Zea mays
  Clone ID: MRT4577_179765C.1
agaaatgtaccttcttatttctggggaggcccaaaccttaaaccaaaaaccttattattggacctttacttattagaaattttaaagagggcaccacccatgattggttggtggtagaatgcctcttggtttgtcaaaggg

SEQ ID NO: 87459 - DNA, 390 bp, Zea mays
  Clone ID: MRT4577_179766C.1
gtgtaaaatggtgtcttgtcacgaccaacaaatgagacaaaaccgtcttgaacatgatcatccggtagcgcctattcacttcggtttattctgaaggaaacgtgccgggaactctatacaccttgtcgagggtatgtaaatatagtcttcactggaaagcaatggactgcgccaacgagagggtgccggtgaaccacttgaactgaactctcatgctgacatggcagaggtgaaaactgacgcgccaagctgccgcagccgggtcatgctacctgacagccggcttccggaactggtcatatgggctaacaagtggcagtctgaacgaacagtatgattcactgggcgctgaattagagttgcgcatgctcccgttccttggagactggg

SEQ ID NO: 87460 - DNA, 409 bp, Zea mays
  Clone ID: MRT4577_179767C.1
tgtttattccattttttttgtgtagtggaaaaggtgaagtagattttttcaaaggaaacgtagcaagtatcgggttatatttgctaccaatgcagtactctatgttgtgttctgcatctttggattcatgcttcccaatgtcaagtacatgatccatatcatatctatgttggaaaccttcctgctcagctgtgcatattactgcagaatgtttcatgtttatgcgtcattgggtgttaaatataggcttaattaggtttaataaatccgtctcgtattttagtcttcatctacgtaattagttgtataattaaactatatttaatacctataaatatcattcaaacattccttgtgacaggaactaaactttagttgggtcgaacccaacactaaaaggcaaattcac

SEQ ID NO: 87461 - DNA, 409 bp, Zea mays
  Clone ID: MRT4577_179768C.1
acctggcatgatcctgccacgagctttatgctcgtctcataagattacagccatgcgtgtgcatgtatcgaacatacaacagaactgtgaaacgtgccaatgcctcattgaatgctgtatcggtagcctgacctatcctccttccagacctccctgacggcgagtgaccgaccttttcgtcacactgagcatcgctcgggacagcatatgcaggaccgatatgctgctgtttacctcctacgtacaggatgctgcacgggggtcatgcacacaccacagtccttgaaccatgtggtcctcttccaaggcaccttggacgacatccgctttcggcagatgctgtaaatatgcataggactggacggcgctcccttatgcatatatagggaccctgtatggctatagggcg

SEQ ID NO: 87462 - DNA, 501 bp, Zea mays
  Clone ID: MRT4577_179769C.1
accttgggttttatttattatattttttttatttatttttgaacacattttttttatttttgcaaagaaaccaaagcgagccgccagaactggtagacgcttctaaacaacccaacctaacgcccaccatctaaagaaagcaagactggcattccccatcaccaaagatcccaacccacacaagcgccggaaagggggtgagggtggcaaaacatggacgcccgcacccccgcaccaaataaaaagacaagggcgcggcgccgggccccgaatccagatagctcggacaggccccagccgagaatagggccaaaaccaaaatgagttggggcccttgggggggaggcccaacccgaacgggaagagggggcttgtaatgcgcgtggcccacgttaaagggcaagtggcccacccccttgaaccacgtgcgggggaccttccccgggaacccgtgactgccaaaaagcatgtgggcccctccctgccccttgcgaccccgga

SEQ ID NO: 87463 - DNA, 275 bp, Zea mays
  Clone ID: MRT4577_17976C.1
aaagacacagctccttcttctctctccacttaattgccgtgctactagagttcacgccgttcctttgtgagtctatccaaccgaggcgatagccccaccgatgctgacagcgatggaagacgcgtacaagcgtctgggagcaggctagcacatgtgactcagagacttagaacgacacggcaggttctgatattcgggctcttgcgtactggcaggtgggcgtatgccagagatctatgactagagacgaaacggttactattagaacacattca

SEQ ID NO: 87464 - DNA, 314 bp, Zea mays
  Clone ID: MRT4577_179770C.1
agtataaacagtgttgctgagtaatgaggtgaaaaaaaaaaaaaaaaaaaaaaaaaaggggaaaacatacaagggggagggttaaaaaagatatggcctctaccaaaatccaatttcacggtcccgtgcgtggccgcgctacctcttggtttaactctaccgacacccaatttcattgccttggctttccttttatctcgcctgagataacctaaccgctcccagtctcaaaccgattgctcttgaaaaccctttcccttcctcaattaaaactgttatgaccccttcccctttgcattacccgcggtaacccc

SEQ ID NO: 87465 - DNA, 850 bp, Zea mays
  Clone ID: MRT4577_179771C.1
ctgccgctgcctgccgcagaagctggccatcccgcgggacgccgacgacggcgaccagctggacgcccacggctgcctcaagacctacaacaacgccgccaagcgcttcaacgcgctgctcggcgacgcctgcgcccagctccggcgccggatggtggacgcggcgctcgtcttcgtcgacatgtacgccgtcaagtacgacctggtggccaaccacacgacgcacgggatcgagaaacctctcatggcgtgctgcggctacggcgggccgccgtacaactacaaccacttcaaggcgtgcatgtcggcggagatgcagctgtgcgacgtgggcacgcgcttcatcagctgggacggcgtgcacttcaccgaggccgccaacgccatcgtcgccgccaaggtgctcaccggcgactactccacgcccagggtcaccatcgccaaactcgtcaactccacgctgcccaacgacgactagctggctggccgatcgatcgatcgatcgtcgtcgtcgtcattctgataaacatactgcaggctgcaggcttcatcgatccatatccaattgtccgtagaaatctacgactagctcattgtagatctgtaatgtgggctaagagatgcatcatgcatggcgatcgactagctgcccaactcgtcaagagctggttcaccgctctcgtcatgatcgagctagtttggacgagcaaattccatggcaccgagtaacacaattgatatcctcattgactagtactagtagtcgtactagcaaaaagaaaacagggttggaacttaaaaaaaaaaaaaaaagcggccgggtcggtaggcctttgaggcttttccctcc

SEQ ID NO: 87466 - DNA, 165 bp, Zea mays
  Clone ID: MRT4577_179772C.1
cgcacacaggagcagcactggcgagagaacactgctggtgcgctctgaactggtatgacagctggactcctgcaagcgactgcaagggccgcacattctgctgcgctacctgctacctgcggcaatacagtagggaccttaccgtactcatcagcggaagacagc

SEQ ID NO: 87467 - DNA, 754 bp, Zea mays
  unsure (1)..(754): unsure at all n locations
  Clone ID: MRT4577_179773C.1
gaaaataaaactccttagtaatgtatgtatctgcttgctatatgttntaaccaccctcaacgtataaaattatatcctacaagtgttgttaatcagcatgctcatttaaatgctacgttaacattattataccttctacgtgtgatgaaaatatattacattctccatttcagaagcatataagtctgtgattttgtaaccattcaaagttttacaaatagtgctaaccgcaaatatagactataccaaaaagaaaaatacaatagaaatagaaaaaatattctagtttttagtatgtgcgcatcgtattgggctgaaaccatgcaccctctaaggcccagattttctagcaaagcacgtagcagtctttcagcccatctaaattagtacgaagcccaagtgtcctattggattgacatattagccgccgactgccgtctgccttagtgccttngcattccgatcgtccaaggttgcattccgatcatgggtcatgattcatccagtgctgtatggtaatctctccggtggtgagaacaaagtccatctctgcagaacactatactgagttagtgacttagcgcgacattttgatgagatgataagaaagtgattgtgaaatatcgatcagttcgttcatacttacatgcagatcatccttgcctgacagatgggaagntagggtggaaggttgacctgaccttttgagaagatagtgatgatgagaaagataaaggggggtacgattgacaca

SEQ ID NO: 87468 - DNA, 269 bp, Zea mays
  Clone ID: MRT4577_179774C.1
cacaggtccgggaccgtgggacatctcctcgtgtcagaaatcaggatgtttctcaacatattccagagccaagctactctcattcaggtgactaaaattcctgcctggatagatgctggaatttgaccccacggatatgttgagttaagtgagtgctaaactttccaaaggcttaccagcacatgttcaagatgccctttttgataaccgagaagatggactcatgagtgattaggaaaactatcctttgagtatgcctggcattcatg

SEQ ID NO: 87469 - DNA, 298 bp, Zea mays
  Clone ID: MRT4577_179775C.1
tccttgctgaacgcatagcacgcccgccggacgttttgttctgtctgcttgcgtgacactgaatcactgatgcataatacatgcatgcatgggatgcgatgacgatacgatgcatgcatgcatgggtatacctactaattggatgacggacgatgtatagctgcggagactgctgtatacgcatatctagcagtcgaattactgtggcgaaacgcatataagcataagcggtgcttgcttgacacgccgatgacatgaacaaagggcatgcttgagatgaacaatctacgtctaaagg

SEQ ID NO: 87470 - DNA, 126 bp, Zea mays
  unsure (1)..(126): unsure at all n locations
  Clone ID: MRT4577_179776C.1
canaannagaattngcttaggtgactttggaggttggcaggtccagcgtctgngtganaggcccgctanattgtggagggtaaatcngctgtattgaaagttggccagtgtggccaggtgtggtgg

SEQ ID NO: 87471 - DNA, 661 bp, Zea mays
  Clone ID: MRT4577_179777C.1
gtgcggcgctcgaggcggccggttcccgaaagaagcccactctctcatctctctcctaactgcacgggccagtcaacaacgccgacggaacactccacaacaatgctgaaaagcctgagagaccccgcgcgacgaacgtcttctactccactcattacctccgcgacgcttcacacttctatggtcgcggctctgacgtgggtgaaatggtgatcatgtaacgtatcgccaagaaaacgggtatgatgatgatgacggccacctacaaagtaaacctgattacacagaagaaagtggaattgacccgacgacgactgcactttatagaaaatgcatacccacgacgtgatcgaactgcacatactcctgtatcgagaccgcctgctcctagggcgccgccgagacccacttcggctcatagtgacacgcataacacaggtacatcgaccaccgtcattatcaccgacggatgggtgatcacctgccacgactacactaactctgattgcagcatctacacctatcaggaggatggagtcatacggaacataatcattcatgaccatccatgccatatctctatcactgctgaatggtgaatgtaatttgagaacgcaagaacacgtacagaactgcgttagattcatgtgagatcactgca

SEQ ID NO: 87472 - DNA, 681 bp, Zea mays
  unsure (1)..(681): unsure at all n locations
  Clone ID: MRT4577_179778C.1
gtgcattgattctttagtgaagttattatagtgattccagcgggagagtagggtggggagtagagggttgattctggactgatttcggtggagattgaatggggagcagtgaggagcatgttttttagatcccaccagtgcgcgtgcgccattttgctgtttggctgaggagtgatgctcagggagaatccgttctcaggagctgtgccaaatgtcgccttaggttttatgatatgacctgacttctatgttaatatctgttagatctttattttatttgaggttacaaaggtggtgttctctagctagaaacaaagttgcggctaggtcaaaactagatgatgctcttgaacgtgtcttttgactctgttacttgctgcaggtttgatgttcactaatatgttgttcaactttgagcaggtcagcaattgactggtgttgctggcagcccggcatatctggcacctgaggttctactaggaaattactcccaaaaggtagatgtatgggctgccggggtgcttctgcatgttctgttgatgggcactcttccgttccaaggaaaatctgtcgaagctatctttgatgctataaagactgctgaacttgactttcacagcagtcagtgggcattcgtgtcacttcttgctcatgatctcattggncgaatgcttaatcgat

SEQ ID NO: 87473 - DNA, 289 bp, Zea mays
  Clone ID: MRT4577_179779C.1
ggatgatcaaacttggtctgggtattgatgaagatgaccctactgctgatgataccagtgctgctgtaactgtagacatgccaccaccttgacggagtatctcgacacatcacgcatggaagaagtagactaatctctggctgagggatgacttacctgttcagtactctacaattcctctgataatatattttcaaggatgtttttccttatttttgttaatattaaaaagtctgtatggcatgacaactactttaaggggaagataagatttctgtctactaagtga

SEQ ID NO: 87474 - DNA, 307 bp, Zea mays
  Clone ID: MRT4577_17977C.1
ggtttcgatacctcggttggcgagcatgggacacagctctctggtggacagaagcagaggatcgccatcgcaagggctattctgaaagatccaagaattctactgttagatgaagctacaagtgcgctggacgccgagtctgaaaggatcgtgcaggaagctcttgacagggtcatgtcgaataggacgactgtcatagtcgcacaccgtctgagcaccgttagaaacgctgacaccattgccgtcattcatcaaggaacactagttgaaaagggcccacacaatgagcttctaagagatccagaag

SEQ ID NO: 87475 - DNA, 617 bp, Zea mays
  unsure (1)..(617): unsure at all n locations
  Clone ID: MRT4577_179780C.1
tcctgcnntcggccgnaatggctggnatcagnnaggctnngcagcaaagggtagnntaagtcgcttttctcgtnnatttcccccgtcgnagaaggagggnnacagnnggggggnagnannacccccaaccgnaggtggcgtgggagggggggcgcacggccccggggccgggccttttctcttttgcgggaaacatgnnnaggaagcnnngttgttcatttctccttttcgtcctcttcgctttgtccgcttgcnnagcagttcaacgggtgaaagacgnngtgcgtacaaattggcgtgaaacaaattggcacggccatttgtcgtcggtgcccaaagcgccgacgcagaatcaaaccacgctnngctccggtcgcagaaacaaatcctggcacgtgcgcccttcttacgaacgcggnnaccctggcgaatgctgnnngcggcgcttgtcccaaacaccggncnnatccgcgtcatttcgtgtccccgtgccccaaaacgagcagctnnngctggccaaatcgggcaactcgaaaccgcgacnnggcggccaaaactggggtggcgcgccaacnngtggccgnngcacttttccccgccgtgaaaccatcacgggc

SEQ ID NO: 87476 - DNA, 777 bp, Zea mays
  unsure (1)..(777): unsure at all n locations
  Clone ID: MRT4577_179781C.1
aattcggcacgaggttcgttaggaaaggaaatcgattccccccgcatctgatctcttcggtgctagaggaatataggccgccgctgcctcctcgttcggtgaaaggtgggcagttagggttgggagatctcttgactcacgacacgagcagcagaattcgtcgagggccgctggttgctgcgagaggtccgggccttcgtgggatctgtaagaatctcttgctctccatacatgttcttgttgtgcgatctgatccagtttgatgttcgtttttttgtctggtcttcgattatgctgggatttctaagaaaccctaatcccagtttgatggttagggaagtaataattacttgatttgtgaaaggggattaatttgtgaaggagaatggggtgcctatattccttcactaggactcgattttttcgtttcgtggagaatcttggatagccctctggcgtctgggtttctagttgctttgatctgcatatgcggttttcgtatcgaattctttgtccagcccataactttgctatgggtgttctgcgtagtatggattattgatttctcaattatgcctagtattagtttataagaaattcatttttttcgtccgttgtgtgattattaattttcttctacaatatatgcacgctcttaaatccctactatctggngaagtcgtaactgtaatctaaatcattagttcttttgagatactagtgggatcgttctctgaatttatggatcatgacgtttcttggaatggatatgtcatc

SEQ ID NO: 87477 - DNA, 305 bp, Zea mays
  Clone ID: MRT4577_179782C.1
caggaggattatagggggctgcaaagaggggagcccaaaattttattcagcacaagaagaaaatcccttctacgagtacaaatatagctgaagcgaaaaaaaaagtaagatggggaccggaacacaaggccttaccgctatcgcaagcgaagtggggttgggtaaacgtaagtatgggtggaatctcggtcgggctgctactgcggttgttatgaataggggtacctaccgatccctgctcgatatcaattgttggtaggataataagcgtacgtggcgtttatgctattccaactcgtggccat

SEQ ID NO: 87478 - DNA, 336 bp, Zea mays
  Clone ID: MRT4577_179783C.1
atgtcgagaacgcaggcgttagcgtttttttttttttttttccatttgattattttccgttctattttttgtggtgaaaaccaaaccttttctacctactgccgatttatagatggtcaggcaaaacatgtatatgcaggtctgtctaactgtatttgtactaatgcagttagacaacacacattatcaggggtggcctgaccaataatatatgcatggtgcataataaaggttggggtttcacccaggggttggagcggaagctgtgcagctggaaccttggacgaaaaaaagccacgggggcctgtaccacgcttaggtgcaaattgcaggccg

SEQ ID NO: 87479 - DNA, 424 bp, Zea mays
  Clone ID: MRT4577_179784C.1
ataataagaagtccggttttagactatatatagtatcaaatcatatcatggcggaccaatgaatacatggataccggacacgcaatccgtatcaaccaacatgcaggaagacacacgtacgtacatgagcacaaagactgacgccaaacatgcagagagagatagcaaactgaagaactctgtttctctctctctcacacaccaccacaccagtgacctatgtcatggcaggccagcctcggcctcgtcttattatgggtcaaccaccaccacacgctagatagctgataatcatacccatggtcgctgttcgacgtgatcaccaggtgcagggctcgcacttgcagctgccaccgcatctgcagccgtggcctgcctccccgcactccgtcgctgtcttgagtaactttggcgcggcccgttt

SEQ ID NO: 87480 - DNA, 1585 bp, Zea mays
  Clone ID: MRT4577_179785C.1
attacgatgaacacagtccagtcccagtcgctccggccgggcgtttcctatcgtttcggttcggcgcaggcgccgctaccgcctcctctcgaccgctcgccttcccgttcgccatgtcgttgctcgccgcggccattcccagcacttcctcccacttctccgcacccttcctcccctcattccacatgccccgcaagaacctcaccgccccactccaccggatccgccgtccgcggccgttcaccgtcgtctcctccgtcccagaccccgcggcggggccggtggaatacacgccctggctcatcgccggcctcggcaacccaggcaacaagtactacggcacgcggcacaatgtggggtttgagatggtggatcgcatcgcggcggaggaggggattacgatgaacacaatccagtccaagtcgcttctgggaattggttcaattggcgaggtgccagtcttggtggtaaaaccgcaatcatacatgaactacagtggagaggcaattggacctcttgcagcctattatcaagtaccattacggcacatcctcttgatttatgatgatacaagtctgcccaatggtgtactgcggcttcaaaagaaaggtggtcatggtcgccacaacgggctacagaatgtgattgagcatttggatggtcgcagagaatttcctcgtttatctataggcattggtagcccacctggaaaaatggaccctcgggctttccttctgcagaagttcagttcagaggaacgagtccagatcgacactgctctggagcaaggggtggacgctgtgagaacccttgtgcttaagggttttagtgggagtactgaaagattcaaccttgtgcagaagtacaagttccacagggtttgaatgtttgaggatctgtgaaatacttgggcttacttctgcaaacaacctgatacacatcaatatcatttgaagtgttggatgtggtgatttgctgttctgaactatgcatgagcttacaagttcgatgaatctgtttgttaatcagtatagctgacaattggcaaccttctattgttccttcggtttttgcataacactctaggatctggagaaacggcaaccagtacttagctccacttgactataatctgtagaagccagagataacttgtgatgtgatatatccaaataacaataagggggcttgtctaatacatcgaacaagatgtgatgttcgtcaaaggagtagttctgacttcagtttcaagacataaaaacatctaataatcgcacttccactgccttttgctgttaaagaacatgtgcctagttcttttcaaattgagaagtgggctctaaagttttacatgttacatttataaagccctttcttccaccatcatgttatctaagcactttgctaatccctttcttaaaggcataacacagctagggcgttaagtaattatatatctccatctgttgatcactcgcatgcagattgtaatagttttttttttccaagtgtcgcaatcgtagctgtattagcttattcaatgctttatactggatccctgtgctctaaaaaaaaaaaaaaaaaa

SEQ ID NO: 87481 - DNA, 345 bp, Zea mays
  unsure (1)..(345): unsure at all n locations
  Clone ID: MRT4577_179786C.1
cacccacgcgaaatacaacccaaaacaaagagagcccgggggggcaaaaaagaacaaggggggcccaaaaaaaccaggcgccccgcgccaaccccaccaacgagggggccccaaggacccacngcgcaccaacaccaccgacgaccggacccggagggagaaaccgccaggcaaggcaagaggaggaggacaaaacggaccgccccacaccacaacaacggcgccgaccccaagaacaaccccacacccccgccgaccaagaaaggcaaaagaacagcccacaccaaaacccgaaagcaagaacagcagcccgagccaagcccgcaaaaagccgacgggaaaacc

SEQ ID NO: 87482 - DNA, 566 bp, Zea mays
  Clone ID: MRT4577_179787C.1
ccgattcccgcgcccgcccctacgctgccaaaagcgggggacaccgcccgcccccctccccgtccgggtctccacaagcgcacctgcgcgcgcgccccggcttccgttgcgcggcagggcagggcaggtcgccatttagtcctctgcgctttttggcgttggttcttcttgcacaactcttctgctggattccagtcactcggtcgggacgagatcaataaaaaagcaagaaagaagcagcgcggcaagccggcggcgtcgcgaagcttaagatcagagacaccgttggttgggcgttgcttcagatatcatcttcaagaccaagctcagattccatcagtcggtacgtacgtccgaacagcctcacttcgctcgctcgctgctgcgcgttagatgccggttgctgcgtcgctaatggcgatagagttggagacggaccaactcgcctgggcggagcagcagcggcagcagaataggaggcagaccatggttgtctgcagaaagagcgccgcagcggtggctaaagggcagcatcgtcagaacgcttcgccgtcgtcggccaagcc

SEQ ID NO: 87483 - DNA, 454 bp, Zea mays
  Clone ID: MRT4577_179788C.1
gccggccgggtcgggacgattcccgcgcccgcccggccgcccctacgctgccaagagcgggggacaccgcccgtccccctccccgtccgggtctccacaagcgcacctgcgcgcgcgcgcccggcttccgttgcgcagcagggcagggcagtcaaatatatcctcctggtcctgggtagcttttgggttccggcgccttgccgttctcagtttgtgttcttggtcatctgatctgggcggtattaatctggagacccagtcactcggtcgggacgagatccataaaaaggaagaaagaagcagcgcggcaagccggcgcgctctcgaagcttaagatcagacacaccgctgcttgcgcgacgcttcagatataatcttccagaaccgagactaatctcatattccatcagccccgcacgtacgtctgtacagccatcccttcgctcgatgctgt

SEQ ID NO: 87484 - DNA, 1062 bp, Zea mays
  Clone ID: MRT4577_179789C.1
ccgattcccgcgcccgcccctacgctgccaaaagcgggggacaccgcccgtccccctccccgtccgggtctccacaagcgcacctgcgcgcgcgcgcccggcttccgttgcgcagcagggcagctgggcagggcagggcaggtcgccatttagtcctctgcgttttttggcgttggttcttcttgcacaactcttctgctggattccagctctgttttactttctgctgtcctgctggtcagtcaaatatatcctcctggtcctgggtagcttttgggttccggcgccttgccgttctcagtttgtgttcttggtcatctgatctgggtggtattaatctggagacccagtcactcggtcgggacgagatcaataaaaaaggaagaaagaagcagcgcggcaagccggcggcgtcgcgaagcttaaggtcagaggttgagacaccgttggttcggcgttgcttcagatatcatcttcaagaccaagctcagattccatcagtcggtacgtacgtccgaacagcctcacttcgtcgctcgctgctgcgcgttagatgccggttgctgcgtcgctaatggcgatagagttggagaaggaccaactcgcctgggcggagcagcagcggcagcagaataggaggcagaccatggtcgtctgcagaaagagcgccgcagcggtggccaaagggcagcagcgtcagaacgcttcgccgccgtcgcccaagcctccgcccgcgggcgggctcagcgcggaggcgttcctggttcttgcgtgcgtcgccgtgtcgcttagtcgtgctgccgctggtcctgccgccgctgccgcccccgccgcctctgctgctgctggtgccggtgtgcctgctcctgctcctcgccgcgctcgccaccttcgtgccgtcggatgtcaggagcatgccatcctccaacttgtaactactagttgttttgctagtcaatatccataaattctttttgttcaagtcggcatttatgtctgtgaatatggcataaaatgagtgtaatgaaatggaaatcttgtcttatctttctttttttggcc

SEQ ID NO: 87485 - DNA, 373 bp, Zea mays
  Clone ID: MRT4577_17978C.1
cgtaagctcggatcctctattttcagcccacgcggttagccctgccgcactatttgctggccatccacttcgaacggtttctggctgcctgaattgccttgaccaaaatctgcacacgttgctcagagcgagcgagaagaaggcaatggccgctgacagcttcctgctcacctcgcgactttttttcgaggggtttttacacaagctgcgcgaccaggtgccggacgcggcgctggacccctgcctgccgcaggacccccaccgcaaggcggcctgcgagacctgcaccacgacgaacatggtgacgcgcgtcggccagaccccaccaaggccaccgcggactccgacaagaccctgccccacacctgcccca

SEQ ID NO: 87486 - DNA, 788 bp, Zea mays
  unsure (1)..(788): unsure at all n locations
  Clone ID: MRT4577_179790C.1
cgggcnnaaaaaaaaaaaaaaaaaaaaaaaaatttataacctctctcattctcccgagaggccattctttgacagttcttttcttgaaagaccaattcttgaatgatccaagtgctttgctcgcaacgattctgtagaagcatatgctgtcatggagactgatgaagacgtgaagatgaacacacaaattgatgagatcaatgcatactcttttctttacccggtggaactgccagggaagaaatttgccttcaaatggtatttcagttccctgcactacaatattttgtccaatctactctttttcagtcttaacctgttttttgcgtacttattgccttctcatgggcactaggataaaacttttcgcttacaaattactatcctattattctgttcctagggtagagtccagaaaaccagagcgatattcctctgcagcgccactatcgcgtgagtagcttctggcataacaatgataaggaatggtcttattactttgttcacacgaatgaactagattattgagcacaaggacttccacagttacactttttggaatatccatatatttcgtaatggcgcaagctgactaggtctctatgcagctgatgcaaggcaacgtatcgtatcagagcgagttgacatgatacacaatgttgtcatctcggtctcggtaacttctcaaatactctatgatactaggaaatgcataaatctgcaatttggtggggtgtactaacccatgtcatgttttataattaagntttctgttttttttttttttt

SEQ ID NO: 87487 - DNA, 187 bp, Zea mays
  unsure (1)..(187): unsure at all n locations
  Clone ID: MRT4577_179791C.1
ctctccgagaacaaggtgccattcatttactaaccttacttaaattgatagcccaagcancaccgaanacttccaaatatgtaagtccccatacacccaaaatcatccaactcacacatcctaactacaagtacaatcaaccctaaactgcactacaaaacaataaatccctaccaacagatcaaac

SEQ ID NO: 87488 - DNA, 476 bp, Zea mays
  unsure (1)..(476): unsure at all n locations
  Clone ID: MRT4577_179792C.1
ataataaattgacatcaaaatcagctggatcataaatcatgcatcaatgttttgtttagccatattttacacaaattgcttgggattcatgtgtaccaaaacttcatggttgccagttttaaataccagtggtccaaacnnngcacacacacacatcattcattgcaaattcgagcatcatattagtaagtgttgcctctacataaaagtaagaagttcatttcttcggcagcaacattagcaggagatagcctgcatcttcgctgaatgtagaatctgatcgcgtaaatcccttcttcgttgtgctcaggagtgattataacctctgatatacagggagtagcaccaagaatttattgtggaaaaataatatcataaggtttctagttcaaaggtacttctagtatgctattactgattataggaagaagcaccaaaaatttatcagcactatggatctagttattcagcactga

SEQ ID NO: 87489 - DNA, 2343 bp, Zea mays
  Clone ID: MRT4577_179793C.1
aggtgacactatagaagagctatgacgtcgcatgcacgcgtacgtaagctcggaattcggctcgaggtatatattgcagtcattgtaccatggcacggtctataatacagacaattatcaaaagtggagagactacaaattaaacccttccaccacatgataaagttagattagtatagccctacaggaggcactatacgggaacataccaaagaactcacataaggacatgatcaaaagatagggcccgctgaggcatttatgcaaacagacctccgtctagcaacgggaactccatagtttcattgctaaaatctagatcatcataccagttattctgcaggtccccgccgccacgctgtggcccttcttcgacgccgtctgctccgacaccgccgtcaccttcggctcgctcgtcgcgctccacgagtacctttgagaattcgtcgtcctttaacccgatgctattcactcctatatcgccaacggaaacgccttgaagttgattgccgggcaggtcattaggcagtcaagtataatcagtgttaattaacatacttgcctctacttttgaaagcaaaatatttcagaataatacaggagaattatctgtcatgaatacatatggatgcttattatatagtatcattagacagtaccgcttgtttgcaatatacaatatggaaatactgaacattgattagatttaggttatctattatgatagctacagggaagaacgatgttgtaatcatgacaaagaaaaacgaaaaacggtgtcaaagaaaaataatatatgttcagtgggtcatcaagttaaaaccttttttggttccatgcaaagaagagagctactaaatttaatgtacgatcaccacttacaatttggatgtttgaattttcattgaatgatgtgtttgtatcctatttttgatcttataatatgaatgactttaatataattaaaacataaaagttttgatctcatataatcaataggataaacagtataacacttgtaaatggtaggatcagagtgcttctgctatgtcatcttcgacacttcctggtgtttgcaacaaacaaagtgcttctatgctgtgcagttcttgtttcttacaagtggtgatggtggtagtggtctggtctctatgtgagcattggtctagagtatcgtgaagctatgcggctcttctttcatgttcaagatgaagttcatgaagcttggatcgaatctggatacctttaatgatgatggcaatgaaatcagatgatcgatcgcttcttttaatttggcttttaccttgtttctttaatgttgcctttgaatccttgtgttgttcttagaatctgactgatttttatttatttcaattataaatggtatgatctgactaagaaattcctagacgcattctccctgattgctgttactgttgatggatactagatgattatataatatgtggtaaagttttcccaataagctcagttgtgcagatcgtttgtttcttcttcttagttagagtgaaattatttactttatgaataactagatccatataggatatagtgatgttatttaggatggagggattcttatcgctctttggtgcttctccctataatcagtgctgaataactagatccatagtgctgataaatttttggtgcttctccctataatcagtaatagcatactaaaagtacctttgaactagaaaccttatgatattatttttccacaataaattcttggtgctactccctgtatatcagaggttataatcactcctgagcacaacgaagaagggatttacacgatcagattctacattcaggtatttattgtttaaaccatttgaccagtaagtttgaggctgcttctcatgaaacatttcctataagctttatgaaacatctgttgataaaactttgtttcttaacatgtccagcgaagctttctttcttaacatgttgctattgtgtccagcgaagatgcaggctatctcctgctaatgttgctgccgaagaaatgaacttcttacttttatgtagaggcaacacttactaatatgatgctcgaatttgcaatgaatgatgtgtgtgtgtgctatttttggaccactggtatttaaaactgacaaccatgaaattttggtacacatgaatcccaagcaatttgtgtaaaatatggctaaacaaaacattgatgcttgatttgtgatccagctgattttgatgtcaatttattatacatgtatatatctttgcaataacttcttatgtatatggttatattgcaaatactattgtctctttactgtctatttattaaaaccc

SEQ ID NO: 87490 - DNA, 312 bp, Zea mays
  Clone ID: MRT4577_179794C.1
aaaaccggaaccccaagcattttgattgggttttgaccagggggacaaaaattaaggcccgcccagttaaccataccaaaattctaggggaaatttattaaagggaagcttgcttaaaaatacccgcttgaatacaaagttacattaaaaacaccccaggttcaaacgtttaattaaaaaaacagggcaggcggggttgctcccaagtcccattagtccaaccaattttggaaactggctttttaaaaacaaaaaaaatcctgttgggggggcaagtcggggggcccttccggcggggggggggtgtttttt

SEQ ID NO: 87491 - DNA, 113 bp, Zea mays
  Clone ID: MRT4577_179795C.1
tcttccatgttgtgttcatagctctcttcataccgtgtggtaaagatacttttatataatcccatttcattccctatcattctcatacccgttcaagattatccaatcaccac

SEQ ID NO: 87492 - DNA, 172 bp, Zea mays
  Clone ID: MRT4577_179796C.1
tctagatcgcggcagactgcctttttttttatttttggtgacggtagcaattttataaaatcctgctttggtctgtcggaaattatgtgaaaactgaaaagaaaaaagcaaacctcaagagttttagtcgctggtaaattcaccccatagacccatttctcggcattggtgg

SEQ ID NO: 87493 - DNA, 449 bp, Zea mays
  Clone ID: MRT4577_179797C.1
ctctccctctcttccgccatccccagctcagcccaccacacagtcacagcctccaccgccgcggcacgcgcggccagccagccagccagccagccatgaggcagtggaaatccctggtcccggcgctgcacctgcacgccccggcggcctcctgcttcccgcacccgccgtcgccgtcgccttgcccgtcgccgccccgcggggacgacgccaccacgacgccgccgcgccacctgcaggcggtgcggctggtgggctgcgacgggcgcgtgcgcgcgtacgctccgccggtgacggcgcgggagctgatgcaggcgcacccgcggcacctggtgtgccgcgccgacgcgctgctcatcggcgagaagatccccgccgtggcggttgctcgatgagcttgtgcccggtgacgcctactttcctgctgcctgttcacctgtttcgttccg

SEQ ID NO: 87494 - DNA, 197 bp, Zea mays
  unsure (1)..(197): unsure at all n locations
  Clone ID: MRT4577_179798C.1
gccggggcacccatcaagcccgcncgctgnggccaatgcaccnacannacctgcaacaaggaaggggggcaacangangnaccagcncnaacncagcnagcngnggcaaacccngnngccnacnngcaacagcngcnnngcangcaaccaacnaacnangacgaacacngaagcgaaccaacaacagcgacaacaga

SEQ ID NO: 87495 - DNA, 590 bp, Zea mays
  Clone ID: MRT4577_179799C.1
ccggccgggagaatcctcagcccgcggccaacgcggcaacgcgcagggcgcagcgcagtcccaattcccaatttcgcaatcgcagttcgaaaatccgccacaaaccctagagtcctagacgtcacggcggctcgggcgctcggcggtcggcgctgccttcaggctccactccagtactccacctccactcgaccactccagcgccaccgacgtcacggcggctcgggcgctcggcggtcggcgctgcctcctggctccactccacctccgtcctccactccagcgccaagccgccaacggtcaagcggccaccggcgggcggcggcgtccacggtccactggccactgcatggtcgcatggacgcatggttagtggaactggaatagtggttggctggttgcctccttgcctggttggctgatgacataattctgaatttctgatgttgtgattctgtgaactgtgaatctgtgtgtgatgcatgaagccatgaatttctgaatttcagaactgatgattgatgaatgttgcaggttgaatgtctgattatgaaatttgatttgccaaaaaaaaaaaaaaaaaagcggcc

SEQ ID NO: 87496 - DNA, 436 bp, Zea mays
  Clone ID: MRT4577_17979C.1
tctccctcctccacgcgctgcgcagcatcacggacgaccagtggttcagggcgcggatcaagaggtacggcccggtgtccaagatgtcggtgctgggctcgccgacggtgctgctggccgggacggaggccaaccacttcatattcaccaaccagggcctcatcctcacgcagacgcgcgcgctccgttccctcctccgccgctccatcctcacgctcaccggcgacgacctgaagcaggtgcgcagcgcgctgcagggctacttaaggcctgagatggtccgggggtacgtggggaagatggacgccgaggtcaggaggcagctcaagctcaactgggttggtcgcagcactgtcaacgtcctgccgatggcgaggagccttacactaggggtcatctgctccgtcgtcttcggcgaagaagcagccgccatagt

SEQ ID NO: 87497 - DNA, 360 bp, Zea mays
  Clone ID: MRT4577_1797C.1
atagaggacgtgtattttgaggatgaatcagctgaggttgtcatatcttctgtgcgtccgggagatgaccaggacagttgcctgtttacaaatttaacaaggatcacattccatggaaagagaggcattgatgatcgtcaatctgcctctgaaccttcatcataccccagttctctggagacttcactagagggcgtggaagctgctgatggcaaagtccttcggcactgatgatgaaatggacacagtatatctaggaaatggacgcgctgtagaggttaaggatgtagcataatgtaaagagcagccaaattgttcgactgaggatcacgcgatggacaaatactgaaaggattgaac

SEQ ID NO: 87498 - DNA, 341 bp, Zea mays
  Clone ID: MRT4577_179800C.1
ccgattcgggcctcttttttgatactagccaagtgaaggacttttttccaagccgtgttcccggcattaccttctaaaataggcttacctccaacgacgattcttgcgcctcgcggatagaaaacgagcacgataagcctgcgccagcttccacttggcctctatccaccctcaaagacccttgattgcacatggactagattccgcatcccattccacatcacaaccatgcaacacgacgaagcaaacaactttgcacaattaatgccaactgcaccaacatgttctttactcgacatcctcttcacacaactcccctaccactactatgtccctgagaa

SEQ ID NO: 87499 - DNA, 511 bp, Zea mays
  Clone ID: MRT4577_179801C.1
tcggccgaggtacaagcttttttttttttttttttttttattttttttttttttttttttttttttttttttttttttttttttttttttttttttttttttgtttgggggggggggtttttggaaaggggatttcgataaaaggggggggcgtttttgggggatcctgggtgggatcaaagtttgggttttttgtggttttaatttttttttgggtaaaattttaacccgttaaaaaaaccaaaaaaaaaaaaaggcgaggaaaaaaagggaaaagggggggggaccaaaaaaaaaagaaaactaaaaaaatgggggttggccaaacgggcaactttccagggaaaaaactttaagaaaccggtcaattaaaaaaacgcgccacccgggggaaggggcgtttttcgttttgggccttttttcgctttctccttaaagaaattcgggggccgggaggttcctctgctcagtccggttcctacctactaaaagggggaaaatacggtatccc

SEQ ID NO: 87500 - DNA, 330 bp, Zea mays
  Clone ID: MRT4577_179802C.1
cttcttttctctttttttttgttaaaaattttttttttttttgggcttttggggaaacagaaaggggttttaacccttattttgccaaaaaaactcccttactcataatgaaacacaactgacttagaacatacttgacctacaagccaaacagggtctcaaactacatatttactaaacatacccccgcaaagcatataaaccctaataggcttacgcccggagcgggtgtgctctgccaaattcatttttacatttgcccggaatcaaactaaaaacgggcataaacccgcccaaaaattgagacactcccggacccttgggtggacc

SEQ ID NO: 87501 - DNA, 289 bp, Zea mays
  Clone ID: MRT4577_179803C.1
ggctaaaacagtttattcataagctttggaatatataccaaattaaatcatcagaagatataatgcataaaaacacgctcactcgagcagcacaagacaagagtttcacatggttcatcaagtagaacaggagcaattagtaaatataacaacatagtatcggaatagatccattgtcaccgcaagaatttattctcaagttcttaagccctgaccataaatcaacaacttctcaaaacatcaccatggcacccgatcttcattcatcatctgtgcgcacagggggctt

SEQ ID NO: 87502 - DNA, 240 bp, Zea mays
  Clone ID: MRT4577_179804C.1
caacaatttctaacataatatggctacgttcttatgctccttatctctatctacaattcttcctaccatatctcattatcccacaattctcacaaccttctatatctccacttactaccacatacttctcaacaccttaatcaacaatatcacaaacctcaatttcacaaccatacattatccaacatacacatcacatcaaacaatcttacctttatcaccctttttactccaacaacc

SEQ ID NO: 87503 - DNA, 442 bp, Zea mays
  Clone ID: MRT4577_179805C.1
gcccggggggggtgtttttttttaatttttttttgcgggtttgttttttttttttttttctttttcaaaaaaaaccgagtgtagttcttctcgaccaaccaaaccacacataacaggcttttccaacaagaaaaatccattactccaactcgggggtttgaaggggggttccttctataatccaacacaaaatttccatcctaacctgtaaccgaaaacctaatttcgccttggggccccccacctgacttggaggataaggttgccataaccatacccaatgagctctggaatggccttctccgggccctttttgttaacaaacctgccaaacccaacaccctgtgctacaggcggtgctctgaggcgccctgagtacttcgcgctttccaacggccaagggccctggcgatctcaagggggccagactcgagggtctacc

SEQ ID NO: 87504 - DNA, 106 bp, Zea mays
  Clone ID: MRT4577_179806C.1
cccacgcgtccgcagattttagccatagctcactacttgagtgtgcaacccttgtgttcctgctagtattcaccctctccccggacccaagatcgagcttatccag

SEQ ID NO: 87505 - DNA, 367 bp, Zea mays
  unsure (1)..(367): unsure at all n locations
  Clone ID: MRT4577_179807C.1
taaaaccaatacgaccgttatatttaaaaaatatcttctcacaaacaaaacncacanattctttctcaatatcacatcttcttctatcaacacctactatccttcacacccaccattctacaacaacctatcttatactcttcaataaaacaaaccttaccttctttcacaacatcttcctcctcctatcttatccaatcatcccaatcttaacaccaactttttacccacttcttcccagcatctcctgcttatccttctagtactgctcctttaactaaccctctatcccctacttcattaatactcttacccctacacttacatattaacaaaacaattattctcttttccaactttttcatat

SEQ ID NO: 87506 - DNA, 518 bp, Zea mays
  unsure (1)..(518): unsure at all n locations
  Clone ID: MRT4577_179808C.1
taaatatttgttatttccatgtatggtaaccgatttctccaaagggatacatttgtagaactaatcatttactcttgatggtttgtaggcatttcgtttgttactcatccatcggacatgcatttggtcncaaaaaaagggtcaagctcctatcactgttcatcatttggaatctttgagaactacaagtttgtagcggctcatttatctcttcaaaatcctaccagcacgtggtagtaaaatatagatgataatttagttgtttgtcaggatgaagcttgctaacgaacaaaactagatatctccgccactagcactgatggcgagaccgccccggtgcatcttaaggggcgagagggcaggggaaaagcagcagcagcaaaactggtcaggggccagcacaccgagatccaagcatttcactatcgagcaacggagaaggacaacgattaatgacaggtatgcatcttgactagctcgctgagggggatggcttggtggatctaatgttcgtttgc

SEQ ID NO: 87507 - DNA, 322 bp, Zea mays
  unsure (1)..(322): unsure at all n locations
  Clone ID: MRT4577_179809C.1
ccgtccgctctactgggtcacacacanctatcacagacatagtgtgctttccaaaaggccaagtgggtgtgtacctanngcaacgcagnnntagctcgggcccgtctgcaggggcgagctcatcaaatgtcggaggggagaaagcnnaccaccgacttgcttctaaccactcanncaagaagggtacgatggagcacgctccgctcgagcgaggtacgcggtaccctccgagaaccgaggtgggtcaactcgccaccggcgtagggctgagtaccgagaaggtactaagaaaggaaggagaaggagcacnaagcacnaagca

SEQ ID NO: 87508 - DNA, 537 bp, Zea mays
  Clone ID: MRT4577_17980C.1
aagctttttttttttttttttttttttttttttgttttttttttttttttttttttttttttttttttttttttttttcttttttttttttttttttttctttcccggtccccctacctatttttttcttttttttttttggggggcgccagacaaaaaacaaaaaacgggaccccccacttttaataaaacccaaaaaggaacccaccccaccaccaatttttgttttaagggaaaaccccccttaaaaaaaaaaaaaaaaaatggcaaatggtaggaaaaaaaaaaaaggaaaaaagggccccccgcagggggctgggaaaaagaaaaaccctttcgtctgtagaagaatgtagaagggaaacacctgataccaggtaaaaaaagaagggggcttacttgaggcaactggcaaaaaaaaaaaaaactcactggtggtagaaaaaaaaaaggacggaaatcccccccgtaggtaccaggaagaaaaggtaaatggtggtgcttgaaatagcaaaaaaaaaaaaagctcccggtggg

SEQ ID NO: 87509 - DNA, 469 bp, Zea mays
  unsure (1)..(469): unsure at all n locations
  Clone ID: MRT4577_179810C.1
ggtaccctcggagctggccggcgcatccccacccgtaccttgcggattgttgcgcccttccgttcggttccttcctccgcgcccgccccacgccaccaagttgtagttgtagccgatgaagggcggcgacatgagcagcgtcagcccgctggtgtccttcgtgctgggcgccgccatggccaccgtctgcgtcctcttcttcatgtccgccgcgcccgcgcgccgncttgtngacatctncgccttcacctccaactccaacttcaccggcgacctccttcttgactcctccacctccttcgacttgncgggagagggggaccttgccgaggcgacggggccggctcccgcgcccgtgcaggccccgccgtgttcgtggggcgacctggaggaggtgctggcgcgcgcggcgaccaaggaccgcacggggatcatgacgcagatcaacgcggcgtggacgcgcccgggc

SEQ ID NO: 87510 - DNA, 402 bp, Zea mays
  Clone ID: MRT4577_179811C.1
actgcttgtcactcactcaatgactcacagctcgcagctggtgtataatgaccactgctcgctgctacagtgaatctagagagagataggggaaatggagaacaatgcgtaggcaggtatgggctccgcttctctcactccccgccgcgaaggcgctattgctcctggacctgctcgccggaacctagagtcgctaggtccagttcgacgacgcggacgccggatcgcagaacttcaacaccttggaggccgccgatgtactggggcccctgtcataacgtccgagtcacctggtacaagcaagcccaacgtggctcgtgcccggacgacaacgaacggggtgtgcgtcttcaagcacaccaagcaaataccccttcatgatcatgcactcctgcggaatac

SEQ ID NO: 87511 - DNA, 720 bp, Zea mays
  Clone ID: MRT4577_179812C.1
ctcgaggccggccggggtgttaaaagggaactcggattgcctcgttcctccgcatgccccccgtaccttgcggattgttgcgctgcgcccttccgttcggttccttcctccgcgcccgccccacgcctccaagttgtagccgatgaagggcggcgacatgagcagcgtcagcccgctggtgtccttcgtgctgggcgccgccatggccaccgtctgcgtcctcttcttcatgtccgccgcgcccgcgcgccgcctcgtcgacatctctgccttcacctccaactccaactccaccgccgacctcctcctcgactcctccgactcgccggcagcggcggaccttgccgaggcagcgccgccggctcccgcgcccgtccaggtacctccacgcacgcgcttcagtttcgtctcggtttccgcgtacgtcctgcctgcgtgcgcttttgttgcacgcaattcaacagcggcggttagttcatctccgcagaccattcacaaacccccaaccatttctccaggctagttttcaaactcaaaccgcctccggaattggagtggatcgatgagttagttcagagaatttcggtttgctcagatacgacgcgtacttccttcatctcatcctcaatcatctgatcatctctcgtctccgaggacagcacgaacaagagcccgtgaaatggagtcggtgccctactacccatactagcctggccatct

SEQ ID NO: 87512 - DNA, 418 bp, Zea mays
  Clone ID: MRT4577_179813C.1
tcgccgcgcccgtcccacgcctcgcggttcttcacgcccgccccacgccttcaagttgtaggcgatgaagggcggcgacatgagcagcgtcagcccgctggtgtccttcgtgctgggcgccgccatggccaccgtctgcgtcctcttcttcatgtccgccgcgcccgctcggcgcctcgtcgacatcttcgccttcacctccaactccaacttcaccgccgacctccttctcgactcctccacctacttcgactcgccggcagcggcggaccttgccgaggcgactgcgccggctcccgcgcccgtccaggccccgccgtcttcgtggggcgacctggaggaggtgctggcgcgcgcggcgaccaaggaccgcacggtgatcatgacgcagatcaacgcggcgtggacgcgcccgggc

SEQ ID NO: 87513 - DNA, 1669 bp, Zea mays
  Clone ID: MRT4577_179814C.1
ggccgcttttttttttttttttttgtccttaaattgatatttatatataaaaaatagtgtatggtaggtctatttctggaccatatcgatcactgttctcacgtggaagaagccctgcccgtacttatagctatgaaattctaactatctgttactagtatatatataacctttaatttgttgatgatggaatcaaaagaatggatcttttactaccaaggaggcgagaggccggctgagaaagaatggatatcagtggatgcagatgcccggtagcttccactggaactttcccgcgcgtcgctcctcgggtgtgccggcggtgtagttcctccagacgtcgaggaccccgcggaggtcgtggagcttggcgccgaggccgacgcagcagttggcatggagcgtgcagatcctgttgaggtccttgctgagctggcagaagccgctgatgtaggctgtgtcgaggaactggatggcgaggtccagcctgggcgcctcctcgtgcttgatgaggttgaacacgtcctgctcgtgcttccccaggaagcgccaccgcccctgctgccacgcccggtagaaggcgacggtcttgtccgacgcccgcacgaagaggaagccgccgttggggaagttgcgcaggctgtaggggtcgcccatgtacacgtcgctggagatggcgatgtcggccgccatggagatgtggcggaacgggtcgcggaaccacatcacgtcaacgtccgtgaataggaagttgtatcccagctccagcaccgtctgctggaagcggttgcgtccccacatcatctccaggtagtccttgctcatgaacaccttctctgatcggtagtcgacgccgttgcccgtgcggaggaagtagcagtggctgtgcacggccctgcagccctcgtaggcggccgggtccatggtgacgatgaccaggtggtccaggaggcgcgccacgccgccttcccccgtgcggaagctctcgaagaagaggtccagcagcgagcccgggcgcgtccacgccgcgttgatctgcgtcatgatcaccgtgcggtccttggtcgccgcgcgcgccagcacctcctccaggtcgccccacggagacggcggggcctggacgggcgcgggagccggcggcgctgcctcggcaaggtccgccgctgccggcgagtcggaggagtcgaggaggaggtcggcggtggagttggagttggaggtgaaggcagagatgtcgacgaggcggcgcgcgggcgcggcggacatgaagaagaggacgcagacggtggccatggcggcgcccagcacgaaggacaccagcgggctgacgctgctcatgtcgccgcccttcatcggctacaacttggaggcgtggggcgggcgtggcgaaccgcgaggcgtggggcgggcgcggaggaaggaaccgaacggaagggcgcaacaatccgcaaggtacggggggcatgcggaggaacgaggcaatccgagttcccttttaacacgcgagggatcggggggggccagaccaagtggtagtcaaacgaaacggaacccggtgccggcggggtaggttaggtagcggcggcgagatgcgaggggtttccgcgcggccggcggggggttggcttggctcatagtgatgatggttatggccaaccttcccggccgg

SEQ ID NO: 87514 - DNA, 262 bp, Zea mays
  Clone ID: MRT4577_179815C.1
cgcacagatgaaatattatagacaatcgatttacatccggaaaaggggatttttacagccccaaattgaacaaatgatgaatttttgcacccatgaagggtgatacaaattacacatttcttaatcctataagggagcgatactcattttagcgctgcctgacttgtactcttttaagtgaattatttgttacttaaaaaaacaaatacccggtagatgatgaaagggtagtttaatatcttttgcttcccaagattattaa

SEQ ID NO: 87515 - DNA, 744 bp, Zea mays
  Clone ID: MRT4577_179816C.1
ggcgtgggcccgttcgggctgtgggtgctcgcctccggcgaccgcggaagagaggaccgccggtgtcttcagggtgtttcgcggcggcggcggccacgacgacaagcccgtggtgctcatgtgcaccgaccccaccaagtcatctctggacgcgaacctgtaccagccgacgttcgcaggttttgtcgacacagacatttcgaacgggaagatatctctcagaactctggtattcatatataattaagttaagaatttctttattattatatactaatttatctcgtctgcagatcgaccggtcggtggtggagagctttggaggcgggggcaggacctgcatcctgtcgagggtgtacccgtcgctcgccatcggcagcaaggctcgcctctacgtgttcaacaacgggagggcggacgtcagggtgtcccgtctcaccgcgtgggagatgaagaagccactcatgaacggcgcttgaaatgtttttattgcgtgatatggaatggtgctcgcctttgtacaatatggtatggctagatacatatatatgagagcttccacgctcggtcgtcgtgtggaaaaaacctatgatgagtgtgtacgatcttagggatgttcgattcagatgccactaggggcaataactatattctaattcatgatttaaaaaaaaaaaaaaaaaaaaaaaaaaaaaaaaaaaaaaaaaagggaaaaaaaaaaaaaaaaaaaaactcgagaagggg

SEQ ID NO: 87516 - DNA, 452 bp, Zea mays
  Clone ID: MRT4577_179817C.1
gttttgtcgacacagacatttctaacgggaagatatctctcagaaccctgatcgaccggtcggtggtggagagctttggagccgggggcaggacctgcatcctgtctagggtgtacccgtcgctcgccatcggcagcaaggctcgcctctacgtgttcaacaacgggagggcggacgtcagggtgtcccgtctcaccgcgtgggagatgaagaagccactcatgaacggcgcttgaaatatttttattgcggatatggaatggtgctcgcctttgtacaatatggctagatacatatatatgagagcttccacgctcggtcgtcgtgtggaaaaaacctatgatgagtgtgtacgatcttagggatgttcgattcagatgccactacacgggcaataactattccaattcatggttttctataactgttgttaatatggacactctgtttcc

SEQ ID NO: 87517 - DNA, 592 bp, Zea mays
  unsure (1)..(592): unsure at all n locations
  Clone ID: MRT4577_179818C.1
gggtgtggggggggggggtgtttttttttttttttttttttttttacccagcaaaatccattcccacccacaaattaaacattaccaataccggcaaagtcagaatgcttcgccggccctgggaattacctatcaaaacggcaaaagctgcccgaaagggggttcgacggggcctgcctaggccgcgggggaagcgaggaaaaagacccatccaattccaatggctatcctcccccaaatcctccactctcctcacccccgcctaaccggcggcggcgcctcccccttttgcgcattctgccgagcaccacgccacctccatgcctccgcctcccgtacccgggggcagggacgggctggtggagctcccgctgttcccgctcccgctcgtgctcttcccggacgctacgcacgcgctgcacattttcgagttgcgctaccgcatcatgatgcacacggtgctgcagacggacctccgcttcgggatcgtcttcgccggcaactccgggtcccccgccnaggtgggctgcgtgggggaggtcgtcaagcacgagcgcctcgccgatgaccggttcttcctcatctgcaaggg

SEQ ID NO: 87518 - DNA, 711 bp, Zea mays
  Clone ID: MRT4577_179819C.1
gaaatatgaattagaattagttattgcccgtgtagtggcatctgaatcgaacatccctaaaacgtacacactcatcataggtttttccacacgatccagcgtggaagctctcatatatatctagccatattgtacaaaggcgagcaccattccatatcacgcaattaaagccaagttatcgcacgtaataaaaacatttcaagccccgttcatgggtggcttcttcatctcccacgcggtgagacgggacaccctgacgtcagccctcccgttgttgaacacgtagaggcgagccttgccgccgatggcgatcgacgggtacaccctcgacaggatgcaggtcctgcccccggctccaaagctctccaccaccgaccggtcgatcagagttctgagagatatcttcccgttcgaaatgtctgtgtcgacaaaacctgcgaacgtcggctggtacaggttcgcgtccagagatgacttggtggggtcggtgcacatgagcaccacgggcttgtcgtcgccgccgccgccgccgcggcgccctgaagaacacggcggtcctctcctcgcggtcgccggaggcgagcacccacagcccgaacgggcccacgccgccctccacggtcgcgccccgggcgccgcacagccgctgcgcgtcgctggccagtgccgggtccagcagcgtctcggggcccgccaggcctgacacctcga

SEQ ID NO: 87519 - DNA, 789 bp, Zea mays
  unsure (1)..(789): unsure at all n locations
  Clone ID: MRT4577_17981C.1
ccggccgggacatcacgaataccatatcccggccctctactttcgacaccattatagcgagtctcacgacgaacatgactggcgtgacagctgaagtgctcttgtacatgctcctagcatttgtgctaagcgcggcctggggcgctcctcacaaagctaccccaggtaataatgtcacggcccctgaggctagccgattagaatagatgcccccgctagatgacatggcaacgcgaccaccgctgtccccgacgatgatgcatcagcgtgcgctaacaaggatgtgactaataccgctttcaacaccatgctctgacgcgcgctatcttccaccatcttacgaggacgagcccatgtgcccctgcatcctgcttcgacatcaagtggcactgagcatgagagagctcttgctaatgactgcggcggtgcttttactctatgaactacaagtcccttgcgccgataccagcttctacctgatgctacacatgagcttcttgtactgaattcaacgactgaggacgagaagtcgcgcaagagccattatcatggacatgcaattataaatgggtgagcggaaatatgtctctaatggcaccttccaattgggccaaggggtgcaatcacagctacctgtcacttggtgtgctactactgcaacattatgtggccacacttgtgatgaagtaaatgcatgtgaatagtctgcgtctctgtctctgcctctaaagcactcctggggcgacattctgggaggaaggacagcgacaagccgatcaaggnacccat

SEQ ID NO: 87520 - DNA, 431 bp, Zea mays
  Clone ID: MRT4577_179820C.1
catttagttcccgggctttattacatctgatcgtgagagtctttcattcagaggtccaacagagcgtgttagagattggaaggaagttgcaatcgaatgtacgcctgctccactgttaaatacacaatctgctcgttgcatggactgcggcactcctttatgtcattacgaaagctcaagtgctgcttgacctattggaaataagatcccagagttcaatggattagttcaccataacagatggcccacagcatcgacatcgactactgtgagtagcaaacaagcttcacctgaatttactggacgagtttgccctgcatccttgtgaggggctatgtgatcttgggattattgagaatgctgtgtgtctcaaacgtctagattgtgcactcatacacgaaggctaccaagaggtatggatgattccacaa

SEQ ID NO: 87521 - DNA, 256 bp, Zea mays
  Clone ID: MRT4577_179821C.1
gactcatgccggttatttacaacgggatcaaggaatggtgcgcccggagctactactactagcggagcaacctgcaccgcgtcgacgcgacacagcgtgggcgcccgtactgtcgaaagcccggagccacatgctgaaaaccacggggagtgcgcttccgactggggcagggcgcgcgctgaccgggcagaggctctggtcaatcgcaatcagcgctcacacgggctgctgccagcatagtcggacggctcggctt

SEQ ID NO: 87522 - DNA, 456 bp, Zea mays
  Clone ID: MRT4577_179822C.1
atggatcagccttaccagagcgggcatgacgctggtgatcgtggccggacttcgacaggaacgcgggaaagtgggcaaggcacggctggaacaggcggccagcggccgaactcgtcggccagggaccgcgccggggccatggcggggcggctgcgatggccaggcttgtcggcggccggacagaatgccgcacgaggctgtgcgacaacaccgccgcgctaccgtgggttggctggccaccgctgccgcgagctgttgcgcgggtgcagcgcaggtcgtaaggctgctcgccggggtggcagcgctagccagggcgaagccgcgacgtcgagaggagaaagaggaaagagatacgctcactcgacggacgactgcgaggactccaggcggacagcggggaggcagcgttgcgacgctccggcgagcgctatggtggaggcgggatcggcgtcctag

SEQ ID NO: 87523 - DNA, 167 bp, Zea mays
  unsure (1)..(167): unsure at all n locations
  Clone ID: MRT4577_179823C.1
attaaaatgtatgncaaggaaacgcaatgagacagtgacctgttgtctattctattggaccaatctttaaacaggagttccagtgaagccttgcgtttactacaagaggggcaggtatagaatccaattaaagtctgggtttgttaaaaaattcaaaaggggcgact

SEQ ID NO: 87524 - DNA, 402 bp, Zea mays
  Clone ID: MRT4577_179824C.1
gttctcacctttttttttttacgcgcaacggtttcctctccaaaccggggatctaccactggcaagagagcgcacacttatcatgacacccgcagctaaagaagaaacgggccggcacgctgcagaaccctatacatataggcccctaacatgtgactttttaacaaaacgtgaaaaattcatccacccgcgttccataaaatatgcacgctctttgcctatgaatataactatatatatttgtgtacatatataaactgtgcaaccctatgaggaggagaaggagcgtacaccagcttaggtctcgacgcggctatctacttagcttactgaggggacgacgaccatcacgactgccgtgccgccagcgtaacgctcgggaaccctgaacgagtagcccac

SEQ ID NO: 87525 - DNA, 128 bp, Zea mays
  Clone ID: MRT4577_179825C.1
cttttgctggtctgctgagcttaatcatgcttttatacggcttgtacatgtggggagtcgtgattgatctgcaccgcgctaatacgttgtcttcgactgccctaataagtggcgcttatgaggactga

SEQ ID NO: 87526 - DNA, 3096 bp, Zea mays
  Clone ID: MRT4577_179826C.1
ctatttggtaatgttcttctcaggagcaaccgacgaagagggacgactcgaggaatcaggagcagcattcacatctgccactatgtcgtcaggaacaaccacgccgggtctcctcatcaggatccgccccgcgcgaatagctttgtccatagctttgttgcgctgggccctcagagtagcagaagtctcttcaacagccttgacagccaaccgagcagcttctagctccagagcgactgatttcttgaaagcacgcagatccttgatgatagtatccttgttcgacaccacttgcctgaggcgaatcatatcgtccaaggactcttgcagcttataacgatgagtatccaaatcttccatggtgaagcgatgactcctcttttcagagtcgagctgagcatggagagtggagttcagcgtgttagcatcattcaaagaagcagaaacccgggctagttcagtctgaccttgagaatatttttcttcaagatcggagtaccgccgggccatatcagcatttgccatctccaaatcagacacccgccgctgaagcagcactggattccaatgtgccagagatagagccctttccgggacagaagcaccctgcgacctcagctgaccaaccatttcatcaaccaatgtctggaggttggaaaagaacgaaggaactcccaagtcgtgggaagttaattgatggctcgatgaaggatcatcaaccggaacaacccgcaatgcatcagtggggaccaggtcagtatcattagcagaggtcaaaactctgtcatcaggagcgctggcctctaaggcgacttcctgacccgaagcttgagctgctgccatgcaaccagaatgcggaagagaagaccctacgtgaacgtccatggaagtgtgagagggagaactgactcggacaccctcgggggctgggtcatagatcgcgctgcccatccgagccgagtcatccccggcaacaccctcgggggctgggtaaacgctagcgccatccttgagggccgagctctccgtaatagccacctctaaggctgaaggaccttcacccacttccatgggagcagaacaatccagaccagcctcctgacccttaagacagcgctctaaggtcgacgaggcacgggacgctgctcgagataactccagcccggcatcaggcacatcagcacaaatatccatcattccaccatctgccagttctgacaacagatcttctgggaccatatcttcaagagtctgatcaaagttggccagagacaattcttgcagaccaatgagggcagataaagctggagaaggaacaccactgctttctccgctggctatgtagcgtcggttgttcttccgaactagagggatttcatcctcctcttcctcatcttcatcaacaatgcggacggtacacccattggggtcagacccattggggtcagtatcatctaagtcacacccattggggtcagcttcagcaaaaactggtactggcacttcctcagcagaaggactagcatcctgatccaagcatgacactcgacgaagacgtctctttttctttttcttcccctcagcaggagaagttggttgagtggctcggcgaggacgcttcgggcgaacactatcagacctctgagtatccaaagctttgtcagcctctgggatgggtgctacagctagtgtttcagcaggggctgcatcagaggaatcttcagccaacatatccagcatggcacttatctctgcatcacttggattcaaaggcacctcgaaatgaacctgcctctcgtcatcagggacttcaccaagtgaggcaaccaaagcactaacctcttcgggggagggtcgcactctaaggcccaaaccgctatcaccagcaggaggattcgacacaaaactggtaaaagccctggaaggaggcagattccaggctgagtatgcaacaggagcaccgatgttcgacaccttgcccctgagtatcatctcgagccggctgaccaagtccacagcaggaattcttctgttggtaacccgggtcgaatcagcgaggcctcgatacagataagtcgggtatgctctgtcctttaagggctgaatgttcttaaaaatgaaatcggtgaccacaacttcttctgtcagacccctctctttcaacaatccaaccttagcaagtagagcccctgcctcagccacctccagatctgtgggggatttggtccagctcggagtgtgaacatctggctgtctccctgaccgtggggggagggaattcccgtggttctccacgataaaccactccaggcgccatcctttgatgttgtccttgagtgggatgtcgaggtagtcggtcttcctcccacggtgcatctccaaactcgcgccccccacaagctggtgctgccctccagccatcccaggccgacagtggtacaagtacttccatagaccgaagtgtggcaaaataccaaggaaagctgcgaaaggcaaccggctgttgggatcgatggggggaatgactgcggcagacgaactctgggattttcgcttgggtgccatctcaaccgtgctggcgaacagagcgaaggcagtattgcaagatagcagagaaggcctggatgcagaaaagcaaaacttgttgctgcccctgctgctgcccttgctgccgccaccgccgtcgccgctgccacctttgtcgccgccgtcaccgctcttgtcgtcgcctccgccgccatcaccatcgcctctgtcattgtggccgtcaccgccattgccgtcgccgccctcctcggacgagtccgaggagttctcctcgtccgaggagtactctgactcatccgagccctcgagcccggcgcgctcgacggcccgaatgtaggtccgcacctctgcggcgatcccctgggagtcgtctgagtcatcagacgacgccgggggagaggcaggagccggtgaaccctcggactcggaggagaactcctcctccgagtactccgagtcgccaaagtcctccgagggaggagtcggctcacgcttgcgtttgtcgccggagtgatgcgaagaactaccacccttcttgttcttgcccat

SEQ ID NO: 87527 - DNA, 1291 bp, Zea mays
  Clone ID: MRT4577_179827C.1
acaaataactcattataagttgatgacctccccattactacataatatttcactacactatactactagctactactacattatttcactaatactacttctactactaatctatactaatatttaaaaccagtggcatctagccactggccctgctgctgcccctactgcttcccttgctgccgtcaccgccgtcgccgttgccacctttgccgccaccgtcaccgcccttgtcatcgccttcgccgccatcgtcaccgtcgccgtcatcgccatcgccgtcgtcgtcatcctcggatgagtccgaggagttctcctcgtccgaggagtactccgactcatccgagccctcgagcccggcgcgctcgacggcccggatgtaggtccacacctctgcggcgagcccctgggagtcgtctgagtcatcagacgacgccgggggagaggcatggagccggagagccctcggactcggaggagaactcctcctccgagtactccgagtcaccgaagtcctccgacggaggagtcggctcacgcttgcgtttgttgctggagtgatgcgaagaactaacacccttcttgctcttgcccatggtggagtagagagaaagagaagaaagtaaacaacgagcagtggtaagagatgtgaaaatgtcggagaagcaataacactatttatagaagaagaaggcaactgctcacctcctaccacgaccaccgaacagtcgcaaaaattcaatatataattcaaaccgtctgaagacacgtcagacggctgacgtcgttccacgtaacatgacacccattgggacttcagtcaactgcttgggcgatatgattacacccgcggtcacatcaagttactactcagaagcagtttgctaaacgctcagcgcaccaagtcgtcccttgcctacacccattggggggacatccaggaatttttaatagattttcccaagcagtcacatccttacagtatatgcaatgaataccccaagacaaaaggaggatatcaacagatatcagaggaaagccaaatatagccgatgaggtacaagtctaattgacagaagcattgaagcacgaagtgatatgaagactagccaaaggccacctatcgaacatccaatcagtcgcagatcaaataaattgccagacctagcaagatatgggcagatcgtgtactcggattcaaagacaaaaatgtatgctgacctctaaagcataacgttgatgacataatgctgacctctagggcatccggcaaaagagaaggatcccggcc

SEQ ID NO: 87528 - DNA, 504 bp, Zea mays
  Clone ID: MRT4577_179828C.1
atgggcaagagcaagaagggcggtagttcttcgcatcactccggtgataagcggaagcgtgagccgactcctccctcggaggacttcggtgactcggagtactcggaggaggagttctcctccgagtccgagggctcaccggtccatgcctctcccccggcgtcgtctgatgactcagaccactcccagggtatcgccgcagaggtgtggacctacatccgggccgtcgagcgcgccgggctcgagggcttggatgagtcggagtactcatcggacgaggagaactcctcggactcgtccgaggagagcgacggcggcgatggcggtgacggcgacgacgacggaggcgatggtgacggcggcggtgacggcggcgaaggtgacggccagggcggcgacggcggcggcaagggtggcagcggcgacggcggcgatggcagcaagggcagcagcaggggcagcaacaagggcagcagcaagggcagcaacaaggccaatggctag

SEQ ID NO: 87529 - DNA, 301 bp, Zea mays
  Clone ID: MRT4577_179829C.1
gcgggcagggggtttaaaaacttttttaaaaaaaaaaccggccctaagggacccccaaaagcaacccatgctaaatcacattcaaagaccccttcggggcctaaaaaggggggaaaaaatctgggagttctgaaaagatctctgaaaaaggcggaccaactttttaatcttcaccaaaaattggaaaaaaagttgggcaaccctggggggctccctccccaaaaagaaaatggttttcctttttaaggctcacgggggaaccacttggggcggaacaaaaggggttttaaaaacttggttt

SEQ ID NO: 87530 - DNA, 674 bp, Zea mays
  unsure (1)..(674): unsure at all n locations
  Clone ID: MRT4577_17982C.1
gaagctttcatagaagtggttgtgcagtagtatttgatacattattaattgcgcactttgcacccatccttctctacccccatttattttagttagtttagtttagttcttgcatttgtcattgcntaggtgcgtctttgtttggaagatttcatgttccaagttctgagaacataaagcattgttttgacataagttgtttgatgcagatttgtaaggggccatatgttgattaggttataaaggcgacgaccaggtttcctttgtaacatagctctactatgtgtttcataaaaaaaaatatgtggcagcgagatcgtgctttgttgattctgcccagcatcgtctacatttcttgctgggtatgtcttgccgcatctcattttggtccaagctgcaccatgatccagcacagcagtatgtatggctcgaactgttctgggtctcataagactaccgcaccctgtaaatatagtagtgggtctatattttggtgaaatgtctgcaaaaaaggttatctagatgttgcagatgtcctgtcaaactgatgacattattagcaacgagtgtcctctgatgcactagtaccactgtaagattgttgaactctggttgtaatccttgttaagcaaaaaaaaaaaaaaaaaaaaaaaaaaaannactcgagaaggggc

SEQ ID NO: 87531 - DNA, 558 bp, Zea mays
  Clone ID: MRT4577_179830C.1
ccgcgctgaaggctcttctagagtaccacattgtcgttgatcagacactttacactgatgctttctacgatgggcgtaaggacgacaaggagactgtcgaggagcgcccaggaggctaccactacgatctccctactgctctttgccacaagaacctcgccgttgacgttggtcgctacggaccttttgtcgagatcaggatcaatggcttctcgcgtgtcactgttcatgacggtgtagctagcgacggtgtcatccaggtcgtctccaacgtcctgatcccacccaagacttctggtggcgagcagagcttttggaagggtgaggagctcgacgtcgaggacctcaaggagcgtctccagcctcttattgagaacatggagttgtagatcaacaactcttatgcgagccctgaaatttgtcacgttcttacttcgagacgatctttacgacatatcccttgtataataacttttcccttcaagtggagtggtcacttcacactaccttgtgtatgactcagatagcaaattaacaaacgaatacaaacatgacacc

SEQ ID NO: 87532 - DNA, 540 bp, Zea mays
  Clone ID: MRT4577_179831C.1
ccgctgctgctacgggcagctgcagaagcagcaggaggaggagcagcagccgtcgctggggcaggaggaccagtgggacgacgagtcggcgcggcacctgctgatgtgggacgatgaccaagaactaacaccgtccaacctggaagccatggaaagtacagctcactccctcctttttatgggaccaaatgaccatacatgacgaaaaagctagcttattattggtgtgcatgcgcatctatccccctctcttcttgatctgatctgctacctctagctctctcacccgatctgctgatctgtgtccatacatgcaataatgaggttgttgtccaaggagcataatttatttttgctggatttttcatttttctcatattgatttaacctttattttttttggtttttggtttgggctttgtggagtgaattgaagactaaaaggctaagagtgtgcgtgttaaatggggttttattttttgtaaagaggatttgcatgctcttgcatggcgttgcgcttggagtgtaatttgattgatg

SEQ ID NO: 87533 - DNA, 1550 bp, Zea mays
  Clone ID: MRT4577_179832C.1
cccccccggccgcccgcccggccccgcccccccgcccgcccgcccggctgccgttggccgcggcccaaccccccccgccacgctcaggactcgggccgcccgcccgcccgtgtgccgtttaccggagcacaacacaacgcggccccctcacggcgtggagtggattgggccgacgccgatcgagagcagaggagaggagcgcggtcggatagggtttgtctgggtgaggttttgagcgagagcgcagggcgagggaaggaggaggaggaggactggctcctggaggaggaggccggccggggcttggatggtcgcggagcgctcccgtaggtggtgtccatgggaaggtcgttcagggactcgctcaaggtgctcgaggccgacatccagcacgccaactccattgcttctgaatttcggagggaatatgatggcgcctcccttcagatgaggatggcatattgccctgctgcccactttttcctttttcttgtgcagtggacagactgcaaccttgctggtgcacttgggctgttgaggattctaatttataaggtttacgctgatgggacaaccaccatgtgtactcatgaaagaaaagcaagcattagggaattttatgctgtcatatttccctccttgatgcaattacatgaaagaatcaatgaagtggaggatagaaaacagaaagcaatatgtctagagaggtacagaagacgggatgaggatccgaaaactgtggtatcagagattgatgataatatagaggaggaatgtggcatatgcatggaaataaatgtcaaagttgttcttccaacctgtagccacgctatgtgcattaaatgctatcgtgaatggaggtcaaggtcccagtcctgtccgttctgccgcgacagcctcaagagggtaaactctgctgacctgtggatatacacggacagcaatgacatcgtggatatggcgacagtccgaagagagaacctgaggcgactcttcatgtacatagacaagctgcccaccgtcatcccagaatctgtatttgacgtctacgactcccatgtaaagtgacgcagttgagcacgtctgccagttgttttatgtatttgctacgtctactggtgctgattcctgggcctctggtgctgttgtgccttttttttaaagagtttcgaagcaactgggagccgaggaggctaatttgtatacactgaatgtacgtagaacttgttctatcatcttgtgccatgcgatttcggcctgtatggtggtttagggtcctagcatttgacgctgtatatgtcagtgggggtatcatggttatgggcttatggcaagaaaggtataggcgttctcctgatgcatattctgatccatgatttttttactcatggatggatggatggactttgtttgaaggtcaggctatgcaaatgtgaaatgtacccatcttcatacttatattcaaacttacattgcaaaacagtataaaaacagtgttatgtgacgttacttgctaaaaaaaaaaaaaaaaaaaaaaaaaaaaagcggcc

SEQ ID NO: 87534 - DNA, 477 bp, Zea mays
  unsure (1)..(477): unsure at all n locations
  Clone ID: MRT4577_179833C.1
cncggcnncgggccgaanaanaaaaaaaaaaaaaaaaaaaaaaaaaaaaaaaaaaaaaaaaaaaaaaaaaaaaaaaaaaaaaaaaaaaaaaaaaaaaaaaaaaaaaaaaaaaaaaaaaaaaaaaaaaaggcccctagaagccccccagatccccctttggttccctttttgggggcttaaaggggggtttaatggaaccatggccaaaattgtttcctgggggaaattgttgggcgattagaattccgcccaaaatttccacccgaaaaaaaaaggggaaaacccaagggggaacaaagggggggccaaacgcagataaatatgccatgtaattagggccgggtttccggccggaaaacctgtcgggaaacttgttttaaagaatcgataaaggaacgggaaaagggggtttgaaaatggggtgctttttcggttcctcttccagtgactccttaaataagtcctttcgcttggggg

SEQ ID NO: 87535 - DNA, 1486 bp, Zea mays
  Clone ID: MRT4577_179834C.1
ctttatgaacttagatttgttcacaggttgctgcttttgtccccttgatgtatatgtgcatttgcacatattattcattattcaagattggcatgttgatgttctattctctgactccaagacaaaccagctctgtcagcttgcttatgatctgttcaatggttgcaagatatgcacctcctatttcttataactttctgaatctcatccgccttggtggcaatgctaaaactacatttgagaagagaatggggaacattgatgatgcagttcctttctttggcagaggcttcaacaagatctatccactgattatggttgtttatacactattggttgctagtaatttctttgttcgtgtgattgactttttgggaagatggaaaaggttcaagttccaacgtgaagaagagaatatagatggtttagatccatctggaatgattattctacaaaaagagagatcttggatcgaacaagggtgcaaagtgggcgagcaggttattccattggcaaggaatttcaatggtgtgaacgctgatattgaatcacaaaatgtgccattggttgaaaacactgtggagatgaaagtaggggcaacttcttccagaaatgacgggagagctggccagttgaagtatgcaaacaacagggagactatcgccagcaaatacacttctattagagaacagaaccggcagtcagggaaggtagtgagaaaggaaatttcaccgaactctatatctttgctcgaagaaagaaattcagagcaggggtccaatgctggtgtaccaccaactggtgtgtctgcaacatgggcctcgatgaagattggttttcaaaatttcaaagcaaatatgggttctaagaagtttcttcctttgcgccaagatccaggatttgttccaaatttgaatgtctcttcaccagaatctcttgatgacatattccaaaggttgaaacggcggcctgcaaatgtgcctgtggattaccttgacgatgacgatgatgacaacataggagatacagatcttcatttccaagatcaatgaaataggttgtgatattcttttaggtttagaatatgcatacacagaaaaactaaaagaattggtagcaatagatgttcaaaggaagatacaggatgtatagatctgatgatggtttggtgtgcttcctggaagctcatgacgcctgtccatctggaaaactgcaaaatgtaagtacgatatgatgacagcctttacagaaaggtttggaattctcccgccgaaaagggttgggactaatctactacgtaccactatattcaggtaaccttgttggtttctctcacctttttttttggaactgtattggagatgctgatatgtgatggaagccaaaaattgtaaatgtgtacctacaataccatatgaaaattaacgtgcttgagttgtaaccagtaaaaacatactattgaatctatacttgatcgggaggatac

SEQ ID NO: 87536 - DNA, 350 bp, Zea mays
  Clone ID: MRT4577_179835C.1
gaaaccggggcggaccaacccttccgccaacccttccgcttaagccgggtgttaatgtccggttcccagggccccaggtcggggcggagggttacaaaggccagccggggcccccggccctacttccgttgttctttcgccccggcctgcccagcaaaaaaaaaggtgcagcgcagggccaccaacccaacaatcttggtcgcaacttccaagggcaaccacaacaacggccagcccccgcaacaggcccaggccccgaacaacggttcaagccttggccccagaaaaaagccgccttctcctccaaggccgttcgccgccgttccggggcggttccacaacaagcaggt

SEQ ID NO: 87537 - DNA, 306 bp, Zea mays
  unsure (1)..(306): unsure at all n locations
  Clone ID: MRT4577_179836C.1
nacaatgattagcgtagtagctcgaatcgctcggatgtctgtagatgcagagatcagagacaccagcaagtatatcatacgatcagtgatcagagtcactgcgccatctcaagcctactgagagacagatgcatgtcatcagacgacgagnantgatcgataagagacatcgatccagcgctcagatagtgatgacatactctgacactcgacaagcatcgagaactcagtcagatgtgcatctaaggattctagatgtgagctagagagtgaatgcatgatgctaatacgcatgagaatatgacg

SEQ ID NO: 87538 - DNA, 431 bp, Zea mays
  Clone ID: MRT4577_179837C.1
cggggggggtgcggggccccgggaaccggggcccggggccggccggggtccccctttggcgaggggggggccgggtgggagggggggggggcaaaggtgttcccggggccaagggggaaaccgttttccggtccaaataccacacaacccaaaagccgaaaaaataaaggcggaagggcggagggactaagggagcacccaacaaagaaaaagggcgcagggccaaatgcccagttcccaaaggggaaacggggggggcaaaaagcaataaagaaccggccggcgagaggggggaggcggtttgggcaaaggggccctgggtgtttttaaccttgagccggcaaacagggaaaaggcgttggccccctgcccccgggcccggggggggttgcggcccacggtgcgcggggcctggccgcaagaggccaaaa

SEQ ID NO: 87539 - DNA, 570 bp, Zea mays
  Clone ID: MRT4577_179838C.1
acttgacgtcctgccgcgtacgtagctcgattcgctcgagtggattcttgcaagatgtgaccctcgacccatatcagcactgtccagtgtggcccatatggagttcagccagatctagatctatggctcaacaactgacatctgacacctggagcggtgagtgttgaatgggaaggattctcgtgtgacagtaaatgcttattattgcaggctcgaggccggacgatttcatcagggaatgtcacctggagtttagtcagggcatcagttcacaacttcagattggtgcacaccgctgttgtgaagattggcgaggtcagcttggttaacaatttactgcctgattggtaacctgcagctatttagcttagccgacactgctcccggcttctgtgactttggtgttgtgctcattcatccctgctccattggcttgccaagctattatcataccagaccggtggacctccactgaaaaatgctgcacaatgtataaaacatcaggtcaaaacggtgcacagtgcatggggtgttggcgttacaaaaccattgggtgagctatcaatgtaa

SEQ ID NO: 87540 - DNA, 276 bp, Zea mays
  unsure (1)..(276): unsure at all n locations
  Clone ID: MRT4577_179839C.1
gtgggctcaccgcanctgatcctntanagcacgagcgcgcccgtgagagtggtagagagggctaaccccnccagcctgatcagatcagcggaaggtacaccgagctcttgcctgcctgcctgcactccacccaatggcgatgccgagggcggcagacgcagggtcactccacttcctgggcctgctgaagcagccacagtccgacgccgcctccccattccagctcgaccagcgcgacgtgttgtggccgaccggcgtggggcagcatgacggttg

SEQ ID NO: 87541 - DNA, 1065 bp, Zea mays
  Clone ID: MRT4577_17983C.1
gtggcaaaacatatatagaagtgttttctggtccaattggttgacaaaggtcaatgagtgttgtagcagccacctaatcaacaattggttagcagcagggatgtataaaccagttatggtagacctagcatatttaaaaaaacaaaaatatgaagcctattggcatgtaatgcttacggttcatcaaccaatgaagcaacccggacccgacgcagcgtgccctgccgccgtccgtcccccttcgtataatggacgccgacgaggcaccggagcccgttgtatccgcacgcctctgccgccgattccgaaggtaggatttcgccctcccgcgcggcaatggggtgcacgacctcccacgacgtcgtcgccgccgctgtcacctcctccaattcccggccccatgcgcgccgctcgtccgcgtccgagccctcaccgcggcgcggagaccccgccgcgctgtgccgcgagcgcgtggcgctcatccgcgccgcggccgaccgccgatacgcgctcgccgccgcgcacgctgcctacttccgctcgctcgccgtcgtcggtgacgcgctgcggtgcttcgtggcgtccgcgctcgcgcccgccacgcccgggtcctcgccggtgctcacgcttccgccttcccccgccaagctggtcgctgccgcgtccgccagcctcccgccgtggtcgtcgtccacggtctcgccgctctcgcactccctcgcagagaagcggtggatctttagggaggcggcgttgaagggaagcgcgagagagaggacacggtcacggactcaggccaccgctgctcacagctgcattagaatccgatttcgggtccgcgatcacacgtgtcaacgccggatacgggacgctcccgtgaagtgcggacggggcttacaaatatgtagatactgaaggttctatggtgtcaaaatcgcaaccgtgctcatacaaagctcaaagaaaactacctataaatgaaagaggatacaaaggaatcagagaaatgtcttataccaaagaatagaaaacaatccaccataggcagcaaacatgctaaaatcc

SEQ ID NO: 87542 - DNA, 302 bp, Zea mays
  Clone ID: MRT4577_179840C.1
tatgacatttctgccaacagcagctacgatgttgagaagcccttcctttacctcgctaggaagctggcaagggatcagaactttcactatgttgaagctggggctctgaaaccgccataggagcacatagacatggccctgcccaagcaggatgaacctgatcttgcaggtgccgctgctcagcccctccccgatgactatgatgacctgcgcgaatagagatgatatacatggaccttgatgatgactcttgtctaaaaaccgtggaggttcaaggcttgatagtgcttagcgggacctgc

SEQ ID NO: 87543 - DNA, 1313 bp, Zea mays
  Clone ID: MRT4577_179841C.1
actatcgtagggactgcgcccgtgcgtgcgctcgtacattagctccgagggaaaactgggctatcctgaattcagtgcaaagcattcatggcatatgattttcactcctgggtattgctagggaaacctgtgggcatccacacagtaattttgaagagcattggtctcttagatttcaacttctcttaaaaactagacccctacgggaaaggcctcccacggtgcattgctttaagaagaggatctcaacacagggccgagataagggactgaaggctggaccgtccaggaacatgacattgcatgacgaggctcttttttgtgcgactacaggtttgaaccctggttgtctgttggtggcatcaccactgggcatacctctgttatcagtgtgttgtcaatttctcatttcctggtcccttcatttgtcaacctcttcctttggtgtccttaactaataagcttatatctttacaagcaaagacatcaattgtctgtattatgcttagccagaccaacctagagtttaaccatgaaatgtattatgcttgaactttcgatgacctctattttaatgattaagagccttcttatggcatattgttgcgatgttcttccgactagattccttacatgtgaagtttctgattcggaatattttctgacctcttgctaaaataagaacttggctggtatttttcaacctactgctcgtccagggttggtgcagaccagtggtctttacagcataaatcaattccagaaaaattgcaaagactgtacgatgatggttacaagctggtcatattcaccaatgagtcaacattgagcgctggaagaacaagcgacaacaagctgttgactccaaagttggccgccttgataactttattgaatgtgttaaagcccctattcaggttttcattgcttgtggtttagggaaaggaaaaggtattccagatgatccataccgcaaaccaaatcctggaatgtggtggttgatggctcagcatttcaattctggaatcaaaattgacatggatcaatctttctatgtcggtgatgctgctgggagagagaacgatcatagtgacgcagatatagaatttgctaaggccatcggtctcaagttccatgttcccgaggagtacttcggtttctaattacctgtgaccagctagtaagatggttacactacgtcgtttagtgtttggatattatcaatactgtggctattctggtatggtgatctacatgtctgtttaaaccgtcaaataatatcccagttattcacttaggtcctgtttgtttcc

SEQ ID NO: 87544 - DNA, 423 bp, Zea mays
  unsure (1)..(423): unsure at all n locations
  Clone ID: MRT4577_179842C.1
gagaaatggatgggcttgagttattctcacaagacacgtgatagattaatcgtctaaacagagtggtcttatagctaagacagatgatccttgatggttatgccaccttagagatgcaaaaagcttttttttacactctctgttaaaccaccatggtgtttaatgcaggattcagtaaaagtctcatgttttattataaacttggaattttggatggctgcaaattttgtgcacacatctttgcgatatttttgttgatccttaaatctagcttcgatgttgtcttaaaccgcggaagagcaaatcgttgagtcttaaaactggggttctgtgttcttttatgctgaggtgcacttgtgttgcttaaacaataaacagtttttcattgcttgcccctttagccnctgcttttatggaccagat

SEQ ID NO: 87545 - DNA, 256 bp, Zea mays
  Clone ID: MRT4577_179843C.1
agagttttgtactaaaagcttaatcagaagagattataatttgtacaattaagaattagttaaaatatgatcaatgatcaatggcaacaccagaaaaggcaacataagttgtacagcataaaatcttgtacacgaaatctctaggcaactcagaagtaagtgttgtcgataatatctgtacaagatggggtatattgtatacgtgcatacggtaactcaacgatgcattggaagagattttgtttatgccgtatcc

SEQ ID NO: 87546 - DNA, 680 bp, Zea mays
  Clone ID: MRT4577_179844C.1
ccggggccgcccctcctctctcctccctcgtctcctggctgcttgcttcattgcacagccgcccagctcctcgccatgccgcgcggtttctctatctctctctgctcgctctggacgcgcagctcccttcgtcgcgcccaggctgcatccagctccagctcgtcgaagtccctcccacggccgtctccctcaagccgtcgtgagctccatgctctgaaattcgtgccgtcgattcgcccgaccgtcatccccatggctgcaacgccgtcctccactcggtctctctgcaccgcgccatggtgaccgctggaccggtcgtccctgtgcctcgcgcccagatcgacctggccccttgctcggctgcccgccatcgaatccatctaggcatcgacgtcgacttacctgtggcgtggtagcgacttcctgtgttgtcccttggttcgcgcactggtgtggggaatcgctcggtgctgctggccgtgtcgagctcagggccctgctcgctgtcctccagctcgccccggccacgggcgccattgagctgtcgaaccccatcctcccctgctcggccatgtcccagcagctcgatccttggcccctcgccatggccacagtttcctctccccgtctgccaaatcgccgcgcctcgctagcgctcctcgacatcggttaatcgatct

SEQ ID NO: 87547 - DNA, 438 bp, Zea mays
  unsure (1)..(438): unsure at all n locations
  Clone ID: MRT4577_179845C.1
gttttctttggcgtgactcatgttctatactcctgcactgaattatgtggcgcatcaagtgtgacttatactgggtataccgtgcaacatggtctgtgctgctcattcccctaaggctcaggggtcattttttggtgctctctttttcttgtttttctggctcattgcttttccttgctatggtgggatgttcgccgtgtcctgcctcgggctctggatcccgatgggttcggattcgattggcctctgtctatgggcctcccgtttgtgcaagaaccggctctttcacggtggcctgctatccttaccctgtgcgttcctgggggggttacgccgcgccttttcgggccctgctcgaataccgcngctgcctacttgccgttgtgtcttgggtgccgatttctggcttctggttttgcttggctctgtcttggtgtg

SEQ ID NO: 87548 - DNA, 267 bp, Zea mays
  Clone ID: MRT4577_179846C.1
cagacccacgcgcctttactttccagacctcccccaaatccaccgggcggggccttcttttcaagatgcacctctttgtgaaaaccctgaccggcaagactatcaccctcgaggtggagtcgactgacaccattgacaacgtcaaggccaagatccaggacaaggagggcatccctccagaccagcagcggctcaaattcactggccaacaactggaggacgggctgccgcttgcttgactaccaactcccaaaggagagcaccctt

SEQ ID NO: 87549 - DNA, 981 bp, Zea mays
  unsure (1)..(981): unsure at all n locations
  Clone ID: MRT4577_179847C.1
attatataatctgattataatctaaattatataatctagattataatatgtctagattataatctatatgtaattgtttggtagtctagattatacaaatgtagattattcataaagacaactgtacccttatttctttatttggggtgangaaaagaaggatgacatatattgtaatttctatttacataagcatgggtagtgagtcttttgccaaaataatctcaaataaactactcttgaggatattatgagattatcataatctagtctttagattatataatctgaacccataatctatgtgtttgtttaactgttgtattatttgcgttggattatataatctagagagattataatccgaattaaacagggccttactgtacaactcattattaattagagtgggaacttgttctttttttcctccttactgtacaactcattattactacaactcctttccttgtcacatgtcacttgcataagatttttatttttctaagaaaaattagttcattttcgtttagtaaaataggaatcgcttaactgttctacatacccaagtcttctccaagtgtagctatattttgatttctgagacagagttagattatatgtattatcttggtggaaaaaacacgcaatatattgtgcttaacagataggagaactacgttaccgatttcattgaatcattgagctgttttgttctcaatgaaattcttgcacacagacagcatacccttattttccctgcttacacgcaggcagtgcagggaagccgttggtggtaaagaaccacctctcgatggtggccttcaacaacatcacgcggctggccttcgggaagcggttcgtggacgcgaccggcgagctggacgaagcaagggcgcgagttcaaggggatcgtccacaacggcatcaagatcggtgcgtccctctccatcgcgcagcacataccgtggctgcgctggc

SEQ ID NO: 87550 - DNA, 247 bp, Zea mays
  Clone ID: MRT4577_179848C.1
atttgttttatgtacatatatgttatgataatcttactttatttttgaattaaaataaaactaaatgttttattttttccaacaagaaccgtactgatgaacaacaattcttagtgggagataaagttctgatatgactcatccatatacatcgtcttcggtcgccaatcgcctctttcctaaactcttctaaaagttctttggcccacacaagagtatggataaactcggagcagtttcttacagc

SEQ ID NO: 87551 - DNA, 648 bp, Zea mays
  Clone ID: MRT4577_179849C.1
ccaagttcccaggattatgacactatggacaccttttctcaatcttttgtgcacctttatatgcgcattgctccaccacgcagcaaaggaggtctcatcactatcaggcgtgagatgtcccaacatcaaaggcgaaaggatgatatgccaaaactgtctagcaaaactgcacgtacacaataggtgctggacggtttcaaactcctggtcacataactgacataccactgggtgcggtagtccttttctttgaagcctatcagcagtccagcacttactgccaaccaaaggaaaaaattgcatttagggggagcccatgacttccacaaccttttccatggttcaaaggagatggatcccataaaaaacgccttataacaagacctggaagagaactgtccagaggttgtatgtacccacacatgtctatcatcttcctgggtaagcaccacccttctaaagagcatcccataactacaagaactgctgcagtctccaatcagggagagcggatgcacaatgtcagaaacccactgccaattagccagcacctgggcaacagttctgggacgtgatggtcctgctgcccaccatacatataacctcgggcgcaagatcttgtactgtcttcccatttaaccatctgtc

SEQ ID NO: 87552 - DNA, 282 bp, Zea mays
  Clone ID: MRT4577_17984C.1
tcgagggaactgcaaatgtccgaggtaccagacatcggtacctctggcatgaatgaagagaacggcgatgactatattagagaatgggagagtgaataattggtcgatctgtaattaacaacttgtatttcgacatcgtaggcatattaatcaggtctaagatatggtgtaatatagacgtgcctacgttggagacacgtttgttatatagatctgtttgatttgataagagaaaaaagaatgcgacaaaaagcccgggccgaaccgaaaaagaaaagaggg

SEQ ID NO: 87553 - DNA, 153 bp, Zea mays
  unsure (1)..(153): unsure at all n locations
  Clone ID: MRT4577_179850C.1
caagcaaataagggtgaggacagggggattggttttaccgaggttcggttcttgcaaacctactccccgttgagggggncacaaagaccgggtctctttcaaccctttccctctttaaaacgggcacctaaaccgagggagcttttctcctca

SEQ ID NO: 87554 - DNA, 428 bp, Zea mays
  Clone ID: MRT4577_179851C.1
aggcttcgagcgtgcatcgcataggcaccgcggctctaagggtgaggtgccttgcggttgtgtgacacatagtctggcataccataggcgttggtgcgctacacatggaggatttatgtccaccgcgggtcatatgggataggccaactgaggatgaggactgtagtaaaatagtgcacattaactggcacccaacgttgaggatcatctgcatgatgaccgctgaaagactaaccttctattaccaatttaccacttcaacccttacgggtatttcaatatacccgtgcacaacattattgactcttgggaggccacatgcaccgcgaaagcggaaactcaaaagaagagaagtgacaagaaacaccatactggatcacatatataaaaaaaatatgccatatagagatcctagccgaagaggactt

SEQ ID NO: 87555 - DNA, 832 bp, Zea mays
  Clone ID: MRT4577_179852C.1
gacctcgaggcggccgggaacttatattctctaggtctcgcgcatcgcctaggcccctagtccatcgagtagcaacgaagcttgacagcaacggagaagaccatgaacagcagtagcagtgaagtgccggtgtgcgtcaccggtggcgccgggttcatcggctcctacctcgtcaagaagctcctcgagaaaggctacaccgtccacgccacgctgcggaacaccgaggacgaggagaagaccgggctgctgcggcggctggtccccggcgcggcggagcgtctgcggttgttcgaggccgacctcttcgacgccgccaccttcgcgccggcgatcgctgggtgccagttcgtcttcctcgtcgccacgccatacgggctcgaagccgccggatccaagtacaagagcacggcggaagctgcagtggccgcggtgcgcgtgatcctccggcagtgcgaggagtccaagacggtgaagcgcgtcatccacaccgcctccatatcgaccgcttcgccgctcaaggacaaggaggcgccatatctacaagaacacaaacttttttttttcttttgaaaaacttcgctggacaactttggatttttttttttcgatgcccatcttatttcaaatattccaagtaccccataaaattacagagaaccatgaaaagtttagtactcctatgataatcctttcaaccaagttcctcaagaaatttaatcccctcaaatcaccttggatccacttttaatcgaataatccctatgtggcattttgccgtattttttttttgccctgcggctgatttttaaaagatcaggaaactttaaaa

SEQ ID NO: 87556 - DNA, 225 bp, Zea mays
  Clone ID: MRT4577_179853C.1
gaggacttaatttttttcatatagattgatagatggaaaacaacgggaaccagttacataaacaggggcatggaacaaaaaccgggggcagagaacaatacaaggacaacagcattaaagccctttgtggtgcatcaactttaatataggggtgccgactcctactgggctatttctaaaaaaaaaaagcttctgaatctcttccggtccctgaaggctgtacca

SEQ ID NO: 87557 - DNA, 824 bp, Zea mays
  unsure (1)..(824): unsure at all n locations
  Clone ID: MRT4577_179854C.1
gccggccgggccgggatcagagcagctcgcaccatgccaacataccaccataaacgcaacagcagccgggcagtcgagagaactcctggagccgtgggtgcctgggtggctagctgtaggtcttccttcttgcttccctacacatccgatcccttaccctaggggcacatctcgcgctcttgcgctgcgacggcgaattggcaatgagtgagcaagacgggcagcacgtcgggggcagcccgccggacgcggccatcgagtccttctcacagctccccttcgtgcgccccaagcccccgcagccggcgtcctcgtccagtccgtcgtcgatccggctgttcggcttcgaggtcccacccgacgccgccacgtcctccaccgcaaccagtgacgctaccgccgccagcgccaccgtagcgggccaggcggcggcgtcgggcgcggcgggtgcaggtgcaggtgcaagcgatggcaccggcggagggcgcaagttcgagtgccactactgctgccggaacttcccgacgtcgcaggcgctgggcgggcaccagaacgcgcacaagcgggagcggcagcacgcgaagcgcgcgcagtaccagagcgcgatggccatgcatcacgcccactacccaggccacccccacgcgtaccccgccttcactagctaccaccagcagcagcgcttcggcatggcgcgctacgagcccccaccgccgggaccgccgccgcantaacccctcgtggtccccgcaggctgctccgccagtggtgccagatactacgggaggggctgctccctgtcgcagcccatcacggcaccccat

SEQ ID NO: 87558 - DNA, 211 bp, Zea mays
  Clone ID: MRT4577_179855C.1
ttccccctcctccccgcccccccggaattattaagtatcctgacggtcgtgccgggctttccataaaaagagcgtaccacgcagaattacagcgcgagatatccctaagctcggcccctctctctctctcctccactcgcagtttgaggcatgaggggccggcgctttatccgaacggggcttacgttggatctcgcgtcacccgaaaccc

SEQ ID NO: 87559 - DNA, 972 bp, Zea mays
  unsure (1)..(972): unsure at all n locations
  Clone ID: MRT4577_179856C.1
gatacatggatttggtgtcccgcccaagaaagagacccaagtcctaataatcccgctaagtggtgattcaacatggattctacatcttggaaccaggccaatttgggagcggctttgtgataatggaaccaaccggcaaaaagcattaacgatgcaaaaatcaatgcaccaattgcggtacaatagagttgtaattcactagttattccggatgctcgccaaatctgaaaaaaaccagaggttatttggattcctcggaaacccccgcctacatcaccattcaaaatttcttgtcctactattggccaaactacctgagcactgggtccaatgtgagtaggatcgcttagccatgcttcataattggaaaaacgggcaccgtggaagtacatgccactcaaccaaagaaagataatggagagttggccgaaatgagcactaaagacttttcgggagatctcctccaaatcaccggtatgactatcgaaatcgtgagcatcagcatgtaggttccagatccaagtggtagtatcggggcccttagctattgttcttgagaaatgcccgggtctggcccattcctcaaaagatgtttttataggatccctatccacagcaattttaacttctggttccgacgaacgaataatcattaagtcctcctctttccggacaagacatacaaagagacccgccaactgtctttttattgaatcttttaaagatagatattatgattagtccttttctttactatctaccgtccttctattttttttttttagttattcactggagcaattatatattgaagtcaatccgaggcaaggggccgaaannnnnnnnnnnnnnnncttttaaagatagatattatgattagtccttttctttactatctaccgtccttctattttttttttttagttattcactggagcaattatatatgaagtcaatccgaggcaagtgttc

SEQ ID NO: 87560 - DNA, 280 bp, Zea mays
  Clone ID: MRT4577_179857C.1
tccggcacaaacaagttgctaggtcctttgaaaccacatactgatgcttcctcgtacttattatagagtaccagtaagcaacgatggcatgttaatcttaagtgggctcctgttgtagccctcgttgttaacgttgactgccatggttgggaccacgaagcgccggcaatatattcagagaagttgggcatgaacgggacgctaggcttgcttactgatgcctgcaagttcggagtatatgcataaagctagttattttgattgtaatcataaaaatata

SEQ ID NO: 87561 - DNA, 1806 bp, Zea mays
  Clone ID: MRT4577_179858C.1
cgggatgcgaacaccttgcagtgagtgacacacctcctgctcttccatacgcctccagtagtccagtgcagcctgagctgagctgcactgaggtacgagtagctcacgacaccactcggtgataaactaatggcgtcggcctccgccgctcccgcgccggacagggaggagattgtgttcctggacgtggagacgtcgaccccgccgtgcgtgctcctcgagttcggtgccgtagccgtgtgctcgcgcaggctcgtggaggtctcctccttcgccacgctcgtgcggcccgccaacctcgacgcgctcccggacccgaccgcgcggagcaacggcatcacgcgcggcaccctcgcggacgcgccgccgttcggcgacgtcgccgacatggtctacgacgtcctgcacgggagggtgtgggcagggcacaacatcgtgcacttcgattccatgataatcatggacgcgttcgccgagattgggcgaccacctcctcaacccaaggccatgatcgacacccttccgttgcttacccagtgtttcgggccgagagcaggggacatgaagctggcaagcttggcaaactattttggtctagggaagcaaaggcacaggagcctggatgatgtgaaaatgaatattgacgttttcaagaactgtgctacagtcctgttcctggaggaaagccttcgaggtgtgcgtgtgcctaccgttcagaacatgtcgtcggggggtgcaacaatcagaacccaaggaataacaagtgatcctgcaccgaacagggataatcccaacgagtcgttgctggtgggatcgtccactgtgcatgtggaggaaatgatgctagacaccactgtcactgtgcagacggatacaaggagctcaggtgccttttctgggttcgcggtgctagacgacgtgtcaacggagagtatcaagatctcagctccgttgttcctacgcccgttcggtccgagagcaatcgtccagcacaagggttccccgctccagctcatctgtccaggtctggaagtcctctgggtcaacacaaaggggttcccaaacagcccacatcgaccaaaggtgggcataaaggtcgacatacctgagaaccttagtaaggtactagggttttgcgacgatctagcgcagagctcgtcgtcgtcgccaggaccaggagcaatatgcagtaattccagatggaaatccctgattgagagagacgcggatcggcgtccaacggtctggctgaagattcctacctttggcagtggcgacaccgcagcctgccggacacatgtatacgaaaaggagtgcgacggtgtcgttccaaggcttgtttccgaaagggtcgatccatcggaactggcctcgatgcttcaagggaacaaggtggtggatgcgttcgtctcggtggaaacattcgaccactaccaaagcgctggcattcggttggttgccaataggctggatgtgcacttcaaaaggcaacagcaggcctagctagttccttatggtgctctccggtcaggccgaggctggattgaaggggattgacccatccaattctcctgtgattctcttgttaccgaatcgatccaggactatataaataagtaagtttatgtcgtctccgtatgtgcttgcaaaacttccgaccatattttatatgtgttcagacttcttatttgatgacgctagctaggagaatgctaccgttactatcgacatggcatttttttgtttgtagtcgacgatgtcaaacatctttgcagacttaaaaaaaaaaaaaaaaaaaaaaaaaaa

SEQ ID NO: 87562 - DNA, 344 bp, Zea mays
  Clone ID: MRT4577_179859C.1
ttttcctttttttggggtttttggggttaaaaaaaaaagggtttttgaaaaaaactggcccccctcaacaataaactcaaaccaagatgtttataataaacttagtttccaacaacatttttggaataaacttgaaggggtaaactgggtttccaacacaaacttgaccaggtgagccccttccctttcccaaacttaaaaactggacttttaattttggtgaaagccccaatggtccaaccttggacgctcctattggggggcctttgggaaaggggggccccaatttaaggggcgagggacccaaaaacgctgccaattggtaacattgatgtcattttttt

SEQ ID NO: 87563 - DNA, 603 bp, Zea mays
  Clone ID: MRT4577_17985C.1
ggcggcgcctgcgcacgcgtgcaagctcccgtccagatccgcgttgaggagaggtgctccccgtcgtccaggtccgctgggcagaggagatccagcggctggctggctcgccgacgcgattcttgctgccgccgctcaccgcgtgggcacgctcaccgtcgccgcgcactgctcctgggcgagaaagacaagctccggctgaccggctgcaccgtaaagactgtcgcgtcgctatcggccgtccaatcacctgctgctggtacagagcaagagcgcagggtgggccggggtgtggagagacacgagcaagagcgccgggttgctgctggtacagagcaagagcaagagcgcagggtgcgccctctcggccctctcaacaaccccagaagcagctggccggcaggcaagcagcgagatgtcaaggtttggaactagagctcgtcgatggtgggatgaagaggacgaatctgactaaattactaagcatggcaattcatagttctagggagttagtgatttactaagcatgtaatccctacttcggatgtgtaggtttgcaggaaagactaattatgtaatattaatttaactatgccagcttct

SEQ ID NO: 87564 - DNA, 395 bp, Zea mays
  unsure (1)..(395): unsure at all n locations
  Clone ID: MRT4577_179860C.1
gaccggctcggaatcccggttctacccacccgatgaaacccccgagaaccagggaccacggggaggtttggaaaccaacccgcggagcaccacccaccagaaaaagccacgcgaccccacggaaggacacaaaaacagggacaccccagagagcaagaaaaacacacaaaaaaaacaaaaagaaaaaaaaaaaacaaaaaaacagggcggcccccccaaaggacccaagcgcacgcacccgggcaagcaacgccagagcccgacgagaggggcacccaaaggcaaancacaggccaccccccaacaacgcggggaccgggaaaaccccgccgaaacccaaccaaaaacgcccggaaggacaacccccaaacggcaggaggggaaaaaccaaaaag

SEQ ID NO: 87565 - DNA, 631 bp, Zea mays
  unsure (1)..(631): unsure at all n locations
  Clone ID: MRT4577_179861C.1
ccccctctcgagtttttttttttttttttttttttttttttttttttttttttttttttttttttttgggcgncgnnttggcccctggtgcctgcttttctttctggcnncctcccccggtccgacgctttgtttgtgcatacagatcatgcagtcgatcgtaccgggttacaacttccaaggtcatccattttgggagccccgtccttaataaagaaagaaaagaatgtagactgtccattaggcacaagagggcagcaaagggccagtgccccataaagcaacgacggggggggagcctgcaaaatctacaccaccttggttgaggaaacgctttcgttaccaccggaaaaaaacaaacaccaagttgcagtacagttcccaaaatatgcacatccgcaagatcctgacaaagcaaactacaaatcaaaagtccactttgtttcaccctgcaacggggaattcgggcacagctcaaaatatgggggggagcattcagtgaaaaaaaccatgtgatgggggtgcgcttaaacttttcaatacaagcatgccagagaatggacaaatacaaccactctgagtctttgactaatgggggcttggggctgggggatctggcatcaactatttg

SEQ ID NO: 87566 - DNA, 585 bp, Zea mays
  Clone ID: MRT4577_179862C.1
ccgggtcgacccagcgttcgctcccagcgatgaggatgaggacgacgacgatgaagatttcgacaactatgaatcagatatgatggtcgatgaagagacaattcattcagaaaaacccgatacagctgaaggcagttccgagataaatgacataaacaacatcaccctggacctgaaaggctcgagggttaaatttaagggccttcagcaagtttttgggccaatcgagaggcgacacctcaatgcgctagaaaggcaactgagcagatacgtcaaggttgttgggaaggagctgtctgatcgaatggtgtattgtctttcttgatatgcagccggtcccgagatctcaattctactgtgaaagtcttcatggatggcttatactgaagagaagtggcgattcggtacgcctaattgtgcttatagggcaattgaaccggcacagtaataaagttgcagcgaatgggcttctgtcgaaacagcagtctttacgtgcacagcgaccgctcgtgactacacaaattctcgtcgtacgtccactgcaaaaggccgcagcgcaccggcgctcagtagggggctgcatct

SEQ ID NO: 87567 - DNA, 203 bp, Zea mays
  Clone ID: MRT4577_179863C.1
gatcgtccatctaaaactgtgtcaaggtcaaggcagggcataaaaatttaacccaagctcctggatatggtggtcaagagatggcaagattatgggtagtaggttaatttcctaattaactattcttccaggctccgtgtttcgtccagacagtgcggcgttcttattcttatcttattaattagtggcaccgatgcgtctct

SEQ ID NO: 87568 - DNA, 2402 bp, Zea mays
  Clone ID: MRT4577_179864C.1
ttttgggtccctcgaggccggccgggcagcacacccaaacccagcagctgattcgcccggccgcatcgcccgagccttctaacagctgactcgtcctcgtcgctccggcgcggcgacaaggcacgcagccaccgcgcgatggccgacggcgccagcagcagcggcggggcgcagaacgggggtgagtcggtggtgattgactacggccggcgccgcactacctgcggctactgccgatcctccgggcccacgagcatctcccacggtatgtgggctaacagtctgaaagctgatgactatcaagctcttcttgatcgtggttggaggagatctggttgttttctttacaaacctgagatggaacggacatgctgcccctcatatacgatacgcttgaaggcaaatgatttcatttgttccaaagagcaagctcgggtacttaaaaagatacaaaggttccttgatggcgagctcgatccacagattggaagccctcagtgtaaggcaagtccaacaaagcgctcactgggtgaacctctgaattcaccaacctcgaaagtatcaaaggtatcagcggaagagtttcaaaaaggcacaagtccaaatatattgaaagaagatgacatcatttgttgcctggcaaacaaaatcaatgaggccacagctacatgcttccgaggtggggtatttggttctgttcaactccccaaagctgttgtgaagaccgttaaacctcaagtcaaaaggaaagttggagaagcagtgcaagaaaagaaagtaggagaagcagtgcaagctttggtttatacgtgtaatataagtttccaaatagtggcagcagttagacgggcattgcctaaagaaaatggtgctactcaaactgaagtaccagcagatctttctccaaattctgttgcagaaaagctatccgtggcaatggaacgtcttggagaactagctggttttgaagtaaaagcttgtaatgggcatctaaatttctatttggcctccaatcaggcaatgcagaaccataccagcgttgttgtacctgtgcaagcttcagacaaatctagtggttcaaagccaagctctgtgaaccaaactaatgcaaaatatcctctgaaaaggaaaaacctggagattaggttgagcacatctcattttgatcctgaggagtttgctctgtaccgaaggtatcagacaaaggtgcataaggagaaggcagttacagaaagctcatacaagagatttctagtagatacaccaatcctgtttgtccccccaaagactggtgataatacagttccaccgtgtgggtttgggtcttttcatcagcagtacaggattgatggaaaacttgtggctgttggtgtagttgatatccttcctaaatgtttgtcaagcaagtacttgttctgggatcctgaccttcctttcttatctcttggaaagtatactgctctgaaggagatagattgggtcaagacgacacaggagcactgtcccagccttcagtactactatctcggttattatatacattcttgcaataagatgagatacaaagctgcatatcgaccatcagaacttctatgtccactccgttatgagtgggttcgctatgatttagccaagcctctactggatgccagtcaatactccgttctatctgattatgctacaatgcaaggtgaagtgccccagcctcagatttgtggtccctctgatgactcttcagcaaaagttgaccaccatgagtctcccagcgatgaggatgaggacgacgacgatgaagatttcgacaactatgaatcagatatgatggtcgatgaagagacaattcattcagaaaaacccgatacagctgaaggcagttccgagataaatgacataaacaacatcaccctggacctgaaaggctcgagggttaaatttaagggccttcagcaagtttttgggccaatcgagaggcgacacctcaatgcgctagaaaggcaactgagcagatacgtcaaggttgttgggaaggagctgtctgatcgaatggtgtattgtctttcttgatatgcagccggtcccgagatctcaattctactgtgaaaggtgcacatgagagttaaactagtttcattcagaaagaaaggtcatattgctgcgtgtttctgcatggttttcgttgtaaaggtacgagagctgaggctgacatagaacattctccggtcgattttgtatgtgtattttggcactaaagtcttcatggatggcttatactgaagagaagtggcgattcggtacgcctaattgtgcttatagggcaattgaaccggcacagtaataaagttgcagcgaatgggcttctgtcgaaaaaaaaaaaaaaaaaaaaaaaaaaaaaaacccccacc

SEQ ID NO: 87569 - DNA, 311 bp, Zea mays
  Clone ID: MRT4577_179865C.1
acattgtgtggggttttcgtaccagagtaagacaaaaccggcgttaactccataactatggttaaatcgaacaaaattgaaaaccccattaaacacatgcgtttttgaaataaaattcaaacccccatggaacctttttgtgaaaaacacaacacattaaaccttggtttttttccccgcccttccgttgttttgtccacgcccgccgtaattttgcgcacgaccccgttgttttgccgcgctcgaagcttttttggctcgctggtttcacgacgacgtcgttttttcaacataggtggatcaatggatca

SEQ ID NO: 87570 - DNA, 229 bp, Zea mays
  Clone ID: MRT4577_179866C.1
gggggggaacatattatattaatttcaaacaaagccaaaaatgcaccggttttttagaggagcaagggatcaaaataactaacaaccgaccccagccagatcctcttcagtttagcaccaaaactacagacctaccccctttaccactggacccgtgacctacatgtttaagataacaacatttatggattctcgaggctttcagatagtgccattgggcccaaccact

SEQ ID NO: 87571 - DNA, 239 bp, Zea mays
  Clone ID: MRT4577_179867C.1
tgtactcgtgcgacgattacccgtcgcgcggttgctgtggtatagcgtgatgctgacgcctcctgctccttcggtagaaactgctagggacccatcgtccaacaccgatgctctattcagatctgcaccgtcaacatcgatagggctctgctaatacacctgaaggcccaggccttgcacatgatctaggtttgggatgcggacattaaaagaatgacatgctaaagaaccatctgctg

SEQ ID NO: 87572 - DNA, 305 bp, Zea mays
  Clone ID: MRT4577_179868C.1
tttaggaaacagccgcgacctttattcagtcgtgaagatccctgaccagatcaaatcttcactaacttcaatctacaggacttcatacactgctacatttaatgctttgatagcttgctcctccatcgactgggccccttgcattccatgtgatataatccaacatgctggcaagaacacttatttgagacctacaccccatctgtatctactcaatcatcacatctttccctacaagaggtgatagttgatatggtcatgaaatttaacaagcgcatgtcgctggattcatctggatcaattag

SEQ ID NO: 87573 - DNA, 564 bp, Zea mays
  Clone ID: MRT4577_179869C.1
cctcgaggtctcggccgggaaaaaaaaaaaaaaaaaaaaaaaagaaaaaaaaaaaaaaaaaaaaaaaaaaaaaaaaaaaaaaaaaaaaaaaaaaaaaaaaaaggcgaactattcagggttccccttttgggaaaccagcaccctattggagttgaaatcacgaaagctgcgatggagttgggtcctgaaaaactttccgggttggccaacgatgcttacaaggatgcaccccaacggggcgtccaggccatgaaagataggatggctgacttggcccaaagcctggaaatgcctgtggccctgggcgatggtctcaagtgatgccgcatttcggaaaagctttccaataatcctttttcctcaattttgaatgctagccgggtgagtagtaagcataccccctccgggacctctcataaaaagggtccttgggagcactggttttttttcagctttagctgccttttgctgttctgcgcacgctgatttttgcacattaacttaacgtctggtctacaaagttccaagatgcggcccaaaaaaaaaaaaaaaaaaggggccctg

SEQ ID NO: 87574 - DNA, 348 bp, Zea mays
  Clone ID: MRT4577_17986C.1
ggggccaaggtgtctttaaacgggagaaaggttgtttgaaaggacttaaaccgggggatttgggcctccaactccaaggttgcccctgccaaggggggtgtttgtttaacctcccaggtaataataatgaacccccctggccgaattgccaatggttttgcccaagttttggactgcccaacttaaacaattgttgtaaagtttgttgacctggttcccaaaattgttggcgatccggcaaggacctggaaaaggagcccaaatttttaaagaacggggatgctggattggggaaaatggttccaactaagcccatggggggggagaccttttttaagatcctccttt

SEQ ID NO: 87575 - DNA, 264 bp, Zea mays
  Clone ID: MRT4577_179870C.1
atgaacatccatcagttatgaacattcgcgaaaatagtaaaataaaaaacgggtattgtccgttaccacatacggaaatcctgcaaccctccaggaacgctatgcggtctgactgaggttaagttacgcatgcataagccgactaatcacccacgtacgtcgtcgtacgctctacacatgaaggtattacttctctgttgcttagtttcgggcctttctgcgctttcgggacacataggggtggttgtctcagaggacttaagt

SEQ ID NO: 87576 - DNA, 251 bp, Zea mays
  Clone ID: MRT4577_179871C.1
ggctcatgcatactcctggcctgtatataggtaagccgacgaggctgacgacgccgtcgagctgagaccctgtgatccggcacgtggcaccggcagataatacaacgaacacaatctgacacggattccaacttcctgagctaaatgcagcgactacgcaagcactacaaggacgccaacgagcactcgaaccaactgttccaattcaaggccaacctacgacgcgcacgccaacaccagatgctgcaccc

SEQ ID NO: 87577 - DNA, 201 bp, Zea mays
  unsure (1)..(201): unsure at all n locations
  Clone ID: MRT4577_179872C.1
cccgggtcgnaccagcgtccgcgccanaataggnactcgcgtttctccaccgtccgtcctgcatagtgattgggcagcatcgtcatcgnacgaacgccatgagctccgcggcgtgctgcgcctcgtcctcgcgctcctcctcgccgccaccgccatcgtgccggtgctgctccttagcgagaaacgcggcggcggcgtcgc

SEQ ID NO: 87578 - DNA, 341 bp, Zea mays
  unsure (1)..(341): unsure at all n locations
  Clone ID: MRT4577_179873C.1
ggggtacagnatgctgctggggtaccagccaaaccataactatcacagggctgacggggggggacaccggcaacttccttacggaccgcccttcgggcaaagaccacgctggtcctggcggcgcaaggttaccagagaatgaggcgcggagggcagagtgaggatggaaggtggtaatcagacgcctggaaatagaaaccagagcagctgacccttgggggggggggggcacacctatannaaaggaaaaaccacccactacctgctggacctagccattatacgacgttctcggnagaacggaagtaacgggaggtcgaggcctacgcgagagtggctgc

SEQ ID NO: 87579 - DNA, 434 bp, Zea mays
  Clone ID: MRT4577_179874C.1
ggggggaaaacccggccccctccctcaaaccaaggggggggggacattgcccgggggatgtaaatgagcggaaacccctgccccctttcatgccccgggggttaaattaaggaaaactaacggaccccaacacccgccggtggggggggggaccggttttttttttttttaaagccgggttttcccctttttaaaatttcccccctttttggggggggggggcccaaaacccatggaaatggggggcctttcccaaaaatattccaaacttgggcctttggaagggacccccccgggaatcggcgtttatggaaacaagaaaaggcccggactttttttaaacagaaaaaccctttttttttaaaaattttgccccgggcacaaccgggggtttgggcctttcaagggggggaaaacccacaggggcggggggg

SEQ ID NO: 87580 - DNA, 415 bp, Zea mays
  Clone ID: MRT4577_179875C.1
aaaaaaccctaactaggattaaaagggggtattgatagctataaacatatatggggtgagcctaagcccattacaggacacgttttgggacaaattacccttttagaatttatacaggaaacaagcttacatgtgcggtgatctactttgggaccctaaaccactggccactgattttgggattttttgaacatcaaattgggaaacttggaaaaatcagcaagacctatgtacaacagataacttgggaaacttgaatcaaactaaaagcttcttcacgggatgagcaggtttgcaatttcccatgggttttgatctggggggctaaataaaaaaaccggggtcatttcccccacttggtcctccgggtctttccatggttaaatggagccaattttcaaagatgatataatat

SEQ ID NO: 87581 - DNA, 283 bp, Zea mays
  Clone ID: MRT4577_179876C.1
gctatggactcccgatttccccaggcaggcgccgaccatatcaaggatgctgctgccccgaaagaatctgcgtagggtcagtaagatggattccgtctcacgacctgctgctgctgatgttgaggcacgaccagaaccagaaccgtcggcctcgattctgatacatcatcttctagcagaccttgtgttgacggcgtcgtcgtcgtcacccccggcccgccgccgtatgcggaggaagctgccattgctgctgttctcattcaagattctacatgttataccg

SEQ ID NO: 87582 - DNA, 260 bp, Zea mays
  Clone ID: MRT4577_179877C.1
ttttgttttttttttttttgtttttttttttttggggggtggggtttttgggtacaagtctttttttggtttaaatcaaaaacaagttatttccattgtgaatttcacaactgaagtggggggcaaattcactgcaccctgggatcagggtttcccggctcaagaattattagcaacgggttttggggttccagctcgtcggtccacaggggtagtttttctccagggtagaaattcctttttaccccttttcctctttt

SEQ ID NO: 87583 - DNA, 693 bp, Zea mays
  Clone ID: MRT4577_179878C.1
atgcaagccattgagcggacaccaccgctggtctgggcatccaaaatagcacctattgcaagtgccgaggccactgccgaagctggtacttctgccgaagccgcagctactgccgaagctgccaatcttgaaagtacgctgtcagggattgataaacttcttttgaatatggctgcagaagagacagctacggctgcagagaaggtcatggtcgcagtgcctgacaaagggaaaaagattgctgattctgcttcagaggaaagggacttggaccttcgaaacctggtgggtcaagaattgtccaaggctgagaagaaggagctacaggaatatggaatatcctgtggctaccagccaggagctatgctctttggtggaattgacgaaggagccttaggatgcattcgcgatcgcgccggtgcaaaaataatcggcactctatcgaagagtgtcggtttcccgaagcttgaggctgacattagaggctaccggagacaacatatcgtcgacagtctattttattccaatttcaagagtatgatgctaagtaaagcattgaggatgcaacaagacctcaaggacaagaaaaatgaaattataattgaaggcttggagagtaaaattaaggattacgaagcttctctagagaagaaggacttcccgcttcaagcaacagagggttcgcttgaataa

SEQ ID NO: 87584 - DNA, 338 bp, Zea mays
  Clone ID: MRT4577_179879C.1
ggaaatgtaactacttatcactaggcggccacatacatcagccaacggactgcattattggattacaactaataagcaatctaacagatggcaccggcaatgatgtgtggctggtagaaggctgatgggttcgccaaagcaaggtggacaaggggcagcaactgccgcagttgaaagagggttgcggggttagtcacatactgctgggacaacggaagcaattgtcgctgcttcaaaacggaagaggggctcgttgatgctagctcgccaaatggcattagcattagctgatggcaataagcagaggggctcagacacctcaattggcaaagtggaag

SEQ ID NO: 87585 - DNA, 313 bp, Zea mays
  Clone ID: MRT4577_17987C.1
acccactcgagcgatcgactatctcaacatccaattttcatattctcagcttccatctaatacaacatgcaaaagtccaattatactttcccaaccacttacccaaccctaacatgacacaatcctcttcctcttcgcagactccgtacagcatcccatcaacttctatccctacatatcacaacattcatctatcacacatagactctcacacccttaaccaaacctgcaatgactaccagaacaccactcatctattgtcgtctcagtacgaattcttctgagaaaccatctttaccattatccaaccacc

SEQ ID NO: 87586 - DNA, 284 bp, Zea mays
  Clone ID: MRT4577_179880C.1
acccaccaccccaatttggggagtttattggaatctggggcaatgcaaaaacaccccccaaaagcacaaaaatctttaaaaccaaaagtgcttaaagggacagacttcaattacaaatgcaaatactaaagcagttcaacaagggatgatggaaggaaacacccaaacattacccagggggggcaggacacaaacaaaggtttttaaacaccacaacctgggttgacaggcaaacaaatttatgcaagcgagatcaatattcctccttcttaggaacgaaccct

SEQ ID NO: 87587 - DNA, 1305 bp, Zea mays
  unsure (1)..(1305): unsure at all n locations
  Clone ID: MRT4577_179881C.1
gccggccgggtccggaaaaaaaaaaccccagaaccctagcagaggtctcgagcacgagcccgcgatggcgtcggacagcgtaacgagcacgacagtggaggacggtggtgcgcacgagagcaagcaggaacacctcaatggcgcggtgggcacccccacggttgggcaggaggaagagataatcgggccgggcccagcgccggcgaagcagcggcggaagcgccctctccagttcgagcaggcgttcctcgacgccctcccctccgccgccatgtacgagaagagctatatgcatcgggatgtcgtcacgcacgtcgctgtatctcctgctgacttcttcatcactgggagcgcagatgggcatctgaagttttggaagaagaaacctgttggggttgaatttgctaaacattttcggtctcatctcagtcccatcgaaggtctagctgtgagtgttgatggattgctttgctgcacgatatcaaacgatcggtctgtgaagatatatgatgttgtaaactatgacatgatgttcatgatacgtctctcatttgttcctggggctattgagtgggttcatcgagaaggagatgttaaaccaaaacttgccgttagtgaccgaaatacacctttcgttcacatatttgatacccattctggttcaaatgacccaatcatgtccaaagagattcatggtggccctgtcaaagttatgaaatataaccacattcatgatgttgttatatctgctgatgccaaaggactgttggaatattggtctccatctaccctcatgtttccagaaaatgaggtgaggtttcgcctgaaatcagatacaaatctatttgaaattgcgaaatgcaagactactgtgtctgctattgaggtaagcaatgatggcactcaatttgctgtcacatcccctgatcgcaggatacgtgtattttggttcaaaactggaaaattaagacgtgtatatgacgagtccctagatgtggcgcaagatcttcaaagaagtgatgttccattgtatcaccttgatgctattgattttggacgacgaatggctgtggagaaggaaatagagaaaacagaaaatgttccacaacctaatgctgtctttgatgagagttgcaattttcttatttatgctacccttttgggtgtaaagattgtgaatttgcacacaaataaggtttcccgtatcctgnggaaggtagagaacaatgagaggtttctgagaattgcactataccaaggagacaaaggcaacaagaaggttagaaaaattccttcagtagctgc

SEQ ID NO: 87588 - DNA, 670 bp, Zea mays
  Clone ID: MRT4577_179882C.1
gccggccgggctgcgatccctccatcacgatagctagtgtacagaccaataatctcttcttcacctcactagctaacaccagctaacaactcaatcgctctgccctgacaataagggtcgctcgctcctcctcccagcatctggtcacatcggcgatcctggcagcgacgatgatgctgctggcggaggggagccggaacggcgtccgctctcgtgagctgcgcacaactgactgcatcagagccaccatacctcggtgactgcgatgggcagcacggcgacaccctccgcagcacgctgcaccggggtgcactcgctcaacagccgcgcagctccggcggggatcgtgaggccacctgcaactgcctcaagagcatgacctccccattctggtggcgcaagtcaatatggccaaagacgccaacatccccggcaagtgcagcgtcatccgtatgcgtgtccatcagcccctaccgcctactgcacgcaacataaactgatccatggaaccataacggaggtatctcgctcggcggaaactatggtacgtgaccatcatcacgatgcagacgacgtcatagcagacatgtcctagctacatgagaccatgcatcagactgccacatcataaacacagtgatcttgtccccactactgatcacttcgtcta

SEQ ID NO: 87589 - DNA, 735 bp, Zea mays
  Clone ID: MRT4577_179883C.1
ccggccgggatcctcatgtagtagcttgcctctacgtacgttaactagtagtaggcaattaataagcaagcaagcaagcagctcagatatatcttattagcacgcagcagcaatagcaatacactcagcatgtctacatgcccgccctgcatcgtgtactgcgatttcggcttctgctgcggcggtgccagtgacgacggcggccttgaatgtcacgcgccgccgccgcaacttctgccgccgccgccgccgccgccgtgccatggccatacagaggtcacaacagtggtgaacgcgaccgtgcaactgcctcctcctcctcctccgccgccgccgccgccgtgccatggccataaagaggtcatcacgacagtggtgaacgcgccaacaatgcaaccgccgcctccgccgctacatccacatgtactagtaccatacagtacccagctgccaccgcctgttccggcaccaccgcacccgcctcgaccgccgacgattacggtatacgacacgccaccaccgctgcaggcgataatagttcctcgtcgtcagtgtgtgccgccgccgccgccgccgccgccacctgccaataaggtgtatgatgctggttcttcgtcgtcgccactgtcagttagcaagagtacgcaacttgccaaacctgatggcgatgtaccatcatccacgaccacgaggtacgagtacgaaacggatgatgatccatcgtcgtttgcactg

SEQ ID NO: 87590 - DNA, 407 bp, Zea mays
  Clone ID: MRT4577_179884C.1
ggccgggaagacttccaaaggcgcctcgggctccgggccttccttccctccctcgctcaccgagagccagagccagtggggcagccaaagccgagccgcaaccgcaaagaacgtgggcggcctcctttcccgagctcgcgacactcactgtgacgctcgaggcatccaccctcggctcacccaaccaacaatccatccgccaccacaccccgctgcggagatgcgcggcggcgccatcctctcgggattcatcccgccgcacggcgtgccggtggaggcgggcaagaacaaacagcagcggcgcgcgacggtggacctgctgaggccggggcccgggaagaatgcagcgtcccgggaggaggacctgcaggcagactacccactacccctagagcggactcagagac

SEQ ID NO: 87591 - DNA, 352 bp, Zea mays
  unsure (1)..(352): unsure at all n locations
  Clone ID: MRT4577_179885C.1
tcggcagggacataattttttattatatggaagatattgtgcttcaaatttgngctaatgactataataactgtngttgagtacttgaatgtacaagctcgcgagccgagcgagccggctcgcgagcctatatcgagccgagcctctttaccgagctcgcgaagtgactgggccgagcctggctcgtttccagccctagtaagaaagataatctgatggataagcagttcttgaaagatccaagtgaaatcacatgggatattggtgataagaaactcaaggagattgtagcatcaaggggaaagaaaggtcctggaaggttcaagcgtgttgaacaattaacatttttgac

SEQ ID NO: 87592 - DNA, 533 bp, Zea mays
  Clone ID: MRT4577_179886C.1
tctcttacttgtagcactgccacattaattagactcaacaactgtaatacagtactgtctcttatcaaaaacactcaattactaccctactaccgacaggatggatggtacatcgctgccttgttacaaaaaccacgatggctgactggcagccatcgtgctatgactaatacgacgccattattacgcgcacccagctggtagaacggcatcatctgtagttgtataaagaaagtactgtggctcacaccatctaactgtctgaatggcaacctctgatgctgctgtaaataaacatgaaagttcaatgctgccagttggttgaatggaagaaattgctgggggtaggcagcaggtagctggctgaatggtagctgttgttgctgcatataagaagcatagttcaatgcagctagctggttgaatggaataaactgctgctgctgagagtaagcaggaaggtttgctagcacaagttgttgtagttgttgtgccctgatgctgtgagccccttaatgcaccaaaggtcccgc

SEQ ID NO: 87593 - DNA, 721 bp, Zea mays
  Clone ID: MRT4577_179887C.1
gggaccctcgaggccggccggcaagcctggctcttcttgttcctccatctcttccgtcgccttgcgcgtgtcggcggctgcgtacgcgaggccgccgcgtctggccggatggctcacgcggccgtcgtcgccttgctcgccgtcgctgtgatcttggcctgcttgccgccgcccgccgcctcgtcctaccggggagcggctgcattgcgacggctcgagacagcggagcccatggacaccgcgcagggcttgcgggagaaggcggacgtgaacaagggcgcggaggaggacctgagcacgacagggttcggcgccgagtcggagagggaggtgccgacgggaccggaccccatccaccaccacgcccgggggccaaggcggcagtcgccttgatcgtcatgcgcgcgcgacacggcggcggtggatcctcgcttcctggaagtttgtggtcttgatcaggcgggcgtgaaccggattccacgatgatcctgctctttctttgttcttaaatgtatctgccatgcacctttggttctaattccattgttgtagtagggaagcagcatccacctatcaactatcatcaaaacccccctatgttttggcgtgccaattagagaaagggaattacagcgcgattcatataataagtgtgtacaatgaattccacgtatgagttgttcttttcctcgtacaaaaaaaaaaaaaaaaagcggccctc

SEQ ID NO: 87594 - DNA, 458 bp, Zea mays
  Clone ID: MRT4577_179888C.1
ccatccacacaaaaaccatacctttttttccatttgttttccatccacacacaaacgcccacgcccgcggggattatttttttttttcctttaacgtccggacccgacgacccgggggaatttttagtttggggggctaaattcccggccaggggaatccatcaggggggggggggggggttaatcctgctcgggcttttgaggaaagaacgtgcttttggggatctcgcgggggggcttgttggaaaaccggataaagttgtaggcccaccccccggccacgggccccaccaacggccccaccacgtacacccaggatggacgtgtactccccgttaaccagcgcggggcccacgcttcgggccgggtttatggaccccccgaaaaccggccccgaaatgagccctttaagcagggaggtttggcccacggacagcccagcagatttcccaattgtt

SEQ ID NO: 87595 - DNA, 603 bp, Zea mays
  Clone ID: MRT4577_179889C.1
tttttttttttttttaacactagaaaatataattatactcatagttttacagaccacatcagtgtaacatcaaattaacacaacttatcactcatcaattcactattcacacatatgttcagcagtttaacccacttatattcacatagaccaatttaacacgtagacacaattcatcgatcattagtttaactcattggtcatagacatcacacatatgtataacatgttcatcaattattacgtacatgatatgcatgtagttttgttttgctgaaacgtgatagctcgtttagctcacgagctggctcgttaacgaacagagctatgatgtcagcttagcttgtaaaaaaattcaaacgagccgaccatgaaccgagcgagccgacgagtcaagagcatttcatccagcactaactccaacagactatctatgtagtttggctagtcaaagtggctagccaaatttgatagtgagggagctaatttggagagtcgaatagattgacgagttagatagctagtctattaattggagagttattttttagcagcgaaaattagtttaatgagctatttagcttgtctcttgaagatgctcta

SEQ ID NO: 87596 - DNA, 459 bp, Zea mays
  Clone ID: MRT4577_17988C.1
gggcgaagaaaaaaaaaagcccgcggggggtttttttttgcgctgcgcaatccatacagggaaaacacaggaggctctttcctatgcgcgggattgggaaaaaaattctctgggggcgctctccccaaaatttatcccccccataggggagaaacacaggggttcccccgagcaccccttggctcgcccctttgcgcatatgggggggggtttggggaaaacaccccgaaggtggcatacaggggcccttttttgtggcgttggggagggggcccacaggggggggggccccccaacacggccccctgtgtgccccccaggggtggggccccccggggggggaagtaaaataaatccccccccgcgggtttccctcttttccccgggttcccacaaacacgggggggccgtggcaccccacggggaaaggggttttaaaagacacccgggaatactggg

SEQ ID NO: 87597 - DNA, 539 bp, Zea mays
  Clone ID: MRT4577_179890C.1
tttgccccccccccccccccccggggtttccacaaaaacccctaaacacagtggattttaacaggaacggcttgtgggcaaaagtggaaccactcgaaacatgtctaacacctaggagcttattatcgactactctgcgatccacatttgtgatataaactcgcagggttcacctgtcctccccgtccaacatttacaagctgaggcgatcatgctgcccaatgtaacagactggcattcatattgcccatgaccaatgatttacttctgcatggattaactgatgatgcttagccaaaagggctcctccgttaaatagattatggtgcctcacaggtctatagatgaataccataatagtatgttgttgagagggtgataaactcgatcggcctttcaagcttgccatgtctaacccttgatatggactctggggacagccttgttcagcttcttttattgaccctcatcgatccatggttcggcatctataaaggcggaggattgaccactttatttctttttgaaaaaggccttgt

SEQ ID NO: 87598 - DNA, 537 bp, Zea mays
  Clone ID: MRT4577_179891C.1
agcagtggtaacaacgcagagtactttttttttttttttttttttttttttttttggttttttttttttttttttttttttttttttttttttttttttttttaaaaaacagttccaacctggggcacccttaattaaccgccggggtttaaaagggcaaaggttcccaggctaaaagcagggaaataataacaggggccctgggccaaactttaaaagggaaacaaatccaagggttaaaaaagggaacaaaacaaacgggaaacgagcccgggaaaggacacacaaaaatgggcccctacaaaggcccaaaaacttccggcctgcccaaagccaaagggaaaacccttccaaaaatttgaaacaggtcacgggaaacaaaacggaagctaattctgggctcggaaccctgggggcccaagcaacacggttgggggctttaacggcgccaggaaaacggtaaatcttgttcagggcgctaaggaaagctctgacacgggacaccaaaaggccaagggagccccccttccccctaaa

SEQ ID NO: 87599 - DNA, 396 bp, Zea mays
  Clone ID: MRT4577_179892C.1
cccctattttttttggggtttttttatattttttacctttctaaccccaataaaccgggttcagaaaaaccagatgctccaggccctcagaaggcctagaacgagggcaaagaaaagcaaaaccccgggacagaaaaccaccaagttgaaacaacagaggaaatgcccaggggcaatggacacccacaaaaaaacagtcagggggggggcccaaaacacgggaggtccatcaaaaaacaaacaacacccgaggaaacacactggaatgcccggcataggggacataaaaaacgccctcgctttaggggggcccccttaggcacatacaagaaaacgcaagttcccaaaggggggagcttataactctaccccccctggcaaaaagggggccatcac

SEQ ID NO: 87600 - DNA, 787 bp, Zea mays
  Clone ID: MRT4577_179893C.1
ccgtcctcgtcgcttccttgggtacctctcgccgcattccggtgcgcgctggcggcccgccgacaccgacctccccgtcccgccccacgccttccccacggccgtccccgcggccgtgaccgcttcttcttactccaacgccaccgccggcaaggagctctcctttctcgacgagaacggccgccccgatgacccctcctccgcctcagcatccagctccacctccggcgccaccccggccgctggtgtcgtcagatgtgacccccgcgacgccgtcagggtattcatgtacgacatgccgcccgagttccacttcggcctcctcggctggtcgccgccgtcccctgactccgtctggccagacgtcaccgccgcctccccgccgccgcgctaccccggggggctcaaccagcagcacagcgtggagtactggctcacgctcgacctcctctcctcctcgcccccctgcggccgtcactccgcagtgcgggtctccgattcccgcgatgccgacctcgtcttcgtccccttcttcgcgtccctcagctacaatcgccactaccggcccgtgccgcccgagaaggtcagcagggacagggccctccaggagaagctggtgcggtacctcgcggcgcggccggagtggaggaggttccggtggcgccgaccacgtcatcgtcgcgcaccaccccaacagcttgctgcacgcccgggcggggctgcaccccgccgtgttcgtgctgtcagacttcgggagggaccctccgggggtagctagcttggagaa

SEQ ID NO: 87601 - DNA, 2268 bp, Zea mays
  Clone ID: MRT4577_179894C.1
tagcgggctcctcgctcttgcgccgcgcttaggcccctcccacaacccgagaacatccgccgcacgttgcgcgatcagacgagaacaccgcacagcctgcacctcggggacgccggcttttaaggtgtaaaagccaaaaaattcggcaccggcataggggcgggctcctcgctcttgcgccgcgcttcggcccctcccacaacccgagaacatccgccgcccgttgcgcaattcgacgagaaaaccccacagcctgcacctcggggacgccggcgcggagggatggagtgccacgccctacagtgatttctcccccgctccgatccccggcgcatgaccgggtcggctggcctatgcatcgcagcaggagttgtcgtcgattgcccctgcctgccccagttaatcccgcccggtcgcaatccagcattagaggcgccgatctcctgccccgtcctgccctgtggattatcgacagcggcgccggataccacggaagagaaggaagacaaggaaggggccgaaactaacttgcttgtgccggggcaaggacgagatcgagggcagccgagccggtacccgaaactctaggcgaggttcccacaatagaagtatacccaatggatcgtggaggttctcaaaagaaaagacataaatctgttacaaatgttgacatcatcagtaatctacctgatgttattaaagacaaaattctctgctgtttgccaataaaagaagctgtaagaacatgtctcttgtcaaggaaatggaggtacacatgggcttcaatgactgaattgatgttcagagaagatgattttgctttaggcaatggtaatgaagacggtgacagcgacagatttgtttacttcgtcataacgtttctctccctccatgatggccctattttgaagtttgaaatgaatgctcgacgggttcacatgttttctcctggaggacacatccacaggtggatgcttatgctgtcaagaaatggaataaaagaaattcaaattaagacaaggatatggaggaattacaaaatcccttcttctttcttctcatgcgtggaattggaatatgcttgcctgcaaggatgtatattccagttgccacctctgtttgcaggctttaagcgaatgcgtacccttcatttcgttgagttctgtgcaacggaaaacaatattggggaattagtagcgagctgcccgaacttggaggaacttattctctccaggttgctcagctttgctgatatcaccatccactcaacaaagctcaaagtcctaagagttgatggcatgtttaaacatctcaatcttgtgacgccgcacgtctcttcagcagtgattaacctgcaagttaacactggttatgtcaaaagggctgggtccaactttaatctttcccaattcattggttctcttttggatattgaaaatatttcattgctcgggcacgcttttgagtgtgcagcacatggaattgtgcctggtaaactaccaagatcgttaaatcggctgaccgagataaccctggagcttgaccttggtaacctgaaggaagcaaacgcggctcactgtttgtttcaaattgctcccaacttgcgacgcatggagctacagcttatgcacaggggctattctgcacccacctcgagtttctgggactcggttgatcgtcaggattgtctcttcaagaacctttacacagttgtcatgaacaacttcactggttcctgtgcagagtcaggcttcttgaaacttctgctcgatgacgcgcctgtacttagaagtgcgcggatagaagacaacaacaaactggacaaagaatccctcaaacgcctcctgaagatgagaagagcatccaaggacgcagaaataatcctcctttgaggcgtggtcccctggctccagtagatgcccactgttctttcctggtgaagcgatttggtctgctgtgttataggttttattcaactaggcgtttgggcacaacttcgtctgaacaaaagttgtgtcttcgcgtatacctgtgtttcagtgtgtcaccttcagcaaagctaaatgttgcacccgagtcagagtcgtgtttcttttagcattttgtgttggtacttcgaaattctcttgctgcgctggccaacatgggtttgcttatatggctttggaatgatggacaaaatagtgcttgttagttgtggaattgtccatttaggcaacaaagtttttgaaaaccacaatatttaaaatactacattatactttggtc

SEQ ID NO: 87602 - DNA, 364 bp, Zea mays
  Clone ID: MRT4577_179895C.1
gttcgacctgggatggcaaggatcggactggcctatattgagatagaggatagcatgaactagaagcacaaacagcgggtgcgtatgcggcccacgaggagacaaatggatatatgattatcaggttctgcgtgagcgcggcatgaactatcagacacagaccaagacgcctaggcatggtgcactttattattaaagcagataatttgagggtaaactgagggaaaggacgccaggcatgctgcctcgcaagcttaaagatcctcttggtatgcgtgctagttcccctcccacatggttgataaacatgcacagctatgtttcaccttcatcttatcctcaaatgaagatctcaggggtaaat

SEQ ID NO: 87603 - DNA, 721 bp, Zea mays
  Clone ID: MRT4577_179896C.1
gccggggagaacatccgccgcccgttgcgcaattcgacgagaaaaccccacagcctgcacctcggggacgccggcgcggagggatggagtgccacgccctacagtgatttctcccccgctccgatccccggcgcatggccgggtcggctggcctatgcatcgcagcaggagttgtcgtcgattgccccggcctgccccagttaatcccgcccggtcgcaatccagcattagaggcgccgatctcctgccccgtcctgccctgtggattatcgacagcggcgccggataccacggaagagaaggaagacaaggaaggggccgaaactaacttgcttgtgccggggcaaggacgagatcgagggcagccgagccggtacccgaaactctaggcgaggcgaatccggagggaggggggaaagattgggaaaaaaatacattttcaacaactagtttttggcgacatggaaaacataatgattttgggaactcatggagatgctctgatatatctcccctgatacccgtattgccgaattaaagatgggggccaacagttgtgtgtggtgcatgtgtgtgggttgggagcagggtgaccccaatatgaggagaaggttctcacaatagaagtatacccaatggatcgtggaggttctcaaaagaaaagacataaatctgttacaaatgttgacatcatcagtaatctacccgatgttattaaaga

SEQ ID NO: 87604 - DNA, 402 bp, Zea mays
  Clone ID: MRT4577_179897C.1
aaaaaccccccggggggatttattaaaaaaaaattaggggcaggggctcatgggtaagggaacaccgggaaaaaaaaaaaacttaaatacgggccactttttttacaaacttccaccattaaagaaaggggtgacaaaaaaaaaggggctaaaaccaaaaataggcgagccttttgggggtgactccctcgacggaccccaaaaagggaaaggggcccacaaaaaaaaaaacaacccttaatgcctgaagggcgacccacgtccgggtccaagggaggaccccgcgctggacccaataaattttgacggggaggtaaatggggaggggccaaaaaaaaaaggggcccaaaacgcccaaaacctttttaaaaataggggaaaaaggagggccacccccggggg

SEQ ID NO: 87605 - DNA, 111 bp, Zea mays
  Clone ID: MRT4577_179898C.1
ctaatctgttctcgtttagaacctgtaaaaggttccgcactcgccagtcgcaggcagcactctgtagcagccatgtacgcctgcagagaccggacaagatgaagaagcggg

SEQ ID NO: 87606 - DNA, 162 bp, Zea mays
  Clone ID: MRT4577_179899C.1
ggggtggtggttttgaaacgatgcaaaatatctggcaaattcatcagactggcaacagtttaaacattcccgttaaaacaagtttaccaacttcgaaatgaattctggaagaaaaaaaataatgttgggccaccataatgttgttcacaaaccggaggcctt

SEQ ID NO: 87607 - DNA, 607 bp, Zea mays
  Clone ID: MRT4577_17989C.1
cgaggcggaagcgcccgcagcccggtaccggctcctcctgggctccctctagcgccttccccccggcccgactccgctggtcagcgccaagtgacttacgcccccgaccctgagcccggaccgctaggcgaggaggatcagatctccgctcgagaatctgaagggccgccctcctgaccggccggctcccggttcggatgggcatgtaccctggcgtcctggtgcccagctcccgggggggcctgcccctggaggaggtgaccgtggccgaagtcctggctgcccgaggctacctcacaggaatggccggcaagtggcaccttggggtggggcctgagggggccttcctgcccccccatcagggcttccatcgatttctaggcatcccgtactcccacgaccagggcccctgccagaacctgacctgcttcccgccggccactccttgcgacggtggctgtgaccagggcctggtccccatcccactgttggccaacctgtccgtggaggcgcagcccccctggctgcccggactagaggcccgctacatggctttcgcccatgacctcatggccgacgcccagcgccaggatcgccccttcttcct

SEQ ID NO: 87608 - DNA, 376 bp, Zea mays
  Clone ID: MRT4577_1798C.1
agtgccaaatactggtgtgtagattttttttcccaaggacgaaacaacttttaactcgggaaatttcgccacccacatactcgtactactaaggttagttcagaacattaacaggcaacctacctataaagaataaaaaaactagtctaggatctacacgcaaattccaacatttggagtatcatggcctgatcacgtgacgcttgtgcaacactgctgaagcccacatgcagcaaaaacaaaaacaaatatcgtagaacacgacacggacgacgagctcggccgcgcgacgtacgttcaccgtcggcccaccgggccgcatgtcctggagttggatggtcaggaaaggaggacatggagcgaggcgttcttggtg

SEQ ID NO: 87609 - DNA, 575 bp, Zea mays
  Clone ID: MRT4577_179900C.1
agccttggttttcctttttaaaccggaaaattacctgcaagcagactggcttacaatatgctgatgtactattaactagactggaaggcaacacacatgaaaatagtagatgacagaactacctaaacggggaatgacacggacaccatcccaaaccaccagagaataactgtaataagctgacacgacatatgcgacacccaaaccatattaagactcgactggggactgaaccttgcacatgccaggaagctgtgcgcaccattgcattgaaccccaggggacgtgacagcgagacaaggatgggaagttcaatgctaaagcagcaatagagacatgactcgaatgtctatgcagcatcgacaatccattgtttctgttaccccaatggcccctcgctatgagatcttgacaagcttctccgctcttcaccactggattggccttggccatagcgaccctagctgaaggtcgatagtaaaactggcagtcttgtttgtcggagtatcccagcatcgaaacatacgtgttcacgcatatgcagttaaaacccgtgaacccaacacgcttcctac

SEQ ID NO: 87610 - DNA, 378 bp, Zea mays
  Clone ID: MRT4577_179901C.1
gttatgttttctaatctgcttcatgttttatttctagatgatacactgtatgcaaacagctatgtgttgctccaaaaagtacaatgaaaagttgtcacagtaatttcggtcctaattaagtgccggtgcagattttgctcgctggcatctggtgataaacttatgatatgttttacacagggttagtactagcactgatggtacttgttagggtggcacactaaaggctctgttgaaaccctaagaagctaaatccatcgattatacactatttgtgattggcataattttatggattttttcccctgcaactctctctgcggtacaaactcattgctgcaattggttaaaacaccaaaaggaaattcgttttccttc

SEQ ID NO: 87611 - DNA, 301 bp, Zea mays
  Clone ID: MRT4577_179902C.1
ctgacgagaggagtggatggcgatgcacatttatcaaggcgtagagtgcagcctaagggccacgggtccgtatagtgatgccaaaccttgaaccgaagaacaacaagcacaaggtactaaggttgatatataaggccttgtaggacggttcaaggcataagactgtctgcaaggatgtttttagagagcatcaggtcaagtcaactgtgttgaatgacggtaggaaagagcctccaatggatgaatcatgactggtgtgctggcagaaaatgatctatgtgctgcactatctagggcatat

SEQ ID NO: 87612 - DNA, 206 bp, Zea mays
  Clone ID: MRT4577_179903C.1
tcgtcttattctttattcatgcctcatcctcatattcatgtgaggcctcataggctttcaggatggtctacatctcacagaggcggagggaaattattctttatgagatcatggttcgtacactctaggcgcaccgacattgcgagttttatggccacacatgagggactcttatactactgttgatttatactccattattaact

SEQ ID NO: 87613 - DNA, 333 bp, Zea mays
  Clone ID: MRT4577_179904C.1
gggcagggggggccaaaaaaaaaacggtttttatttttttttgaaaacaattttccccccatgcagagaaaacaaagcggggacgggaacccccctttttggaagaagcgggccccacccccacaactttttttacctaaggttaaaactttaattcaccaaaagaaaggggttaccaagggggggggggggacttatttttgggaaccataaaattacacacgcatgccgtacaaaattaaacaggggttttggttgtgtgcgccaaaactagcttttttgggcgccccctggcttgtattacgggtcagccaaagaggggggggtgctttt

SEQ ID NO: 87614 - DNA, 1795 bp, Zea mays
  Clone ID: MRT4577_179905C.1
ccggccgggaaaaaaaaaaaaaaaagaggttcagttcagcagccagtcagtcagtcctcgatctgatatcctctcctccctgcagcgactccagctccgatcgattccattccatccatcgagctgcagcagggccatgacgatggcagctacgacgacgatgatgtcagcagcagcgcaggcggcgacgtcgcagctgccgccggggttccggttccacccgacggacgaggagctcatcctgcactacctccgcaaccgcgccgcgtcggcgccgtgccccgtgcccatcatcgccgacgtcgacatctacaagttcgacccatgggacctgccggccaaggcgctgtacggcgacggcgagtactacttcttcagcccgcgggaccgcaagtaccccaacggcatccgccccaaccgcgccgccggctccggctactggaaggccaccggcaccgacaagcccatccacgacgccgccaccggcgagggcgtcggcgtcaagaaggcgctcgtcttctacaagggccgcccgcccaggggctccaagaccaactggatcatgcacgagtaccgcctcgccgccgtcgccggctgcaccagccccctcgccgcctaccgcccgccctccaagttcaggaacgtctccatgaggctggacgactgggtgctgtgccggatctacaagaagtccggccacgcgtcgccgatggtgccgccgctcgccgactacgagcacctcgaccgcgacggaccttctcccggcggcttcttcgacgactacttctgcggcagcaccagcttgtacgccgccgccgcgccggccatcggcggcggtgctgctgctgctggtactacaaacactactacgacgccggccgtcgtcatgcagcagcaccagcagccggcggcgctgccgaggctccccaagatcccctccatctccgagctgctgtgggacgagtacgcgctcgcgcagatcttggaccccccggccgacgtggccgccgaccacgcctcgttcgccgtgcacccgtccctcaaccagctcctggccgtcggcgacgacggctccgatctcatgatgttctcgccgcccccggccgccgcagcaggcgggaagcgcaaggcgatggtggcgatgaacatgagcccagctgacgagtgcgccgccactgcccaccagcaccagtctccggcggccaagcggctcaacggtggctcctgcttcgacgacgcgccgcagccggccagcggcttgccggcgacgatgtcgtccgtgcttggcggcggcctcaaccaccacatgctcccacagttctagatagacgacttctggtagctgactttgttgggggcacatcttccgtgcatgtactgcgtcatcaactgatcaatatggtggatcgtctacgcggaatagctagcaacctgcggcgacatggaaagcaaggatcgagctcgtggattggaggccattaataaagatgggtcgtgcggtgaagaacaattgtagcagtacgtagcactatttgtactggagccagtgttgatcaacgttaggcgtaaccatggtatgtatcccatttttttccctccgttgtagagtacaggtactctatattcatttcaggcgcagtgcgaaggtagctggagcttgatgggtccatgtactactacactagtactcttatttattattcaatatgaagtatatattatattgtcttgctagataaaaaaaaaaaaaaaacagcggaattttaattccagatatatagacagattattaagt

SEQ ID NO: 87615 - DNA, 266 bp, Zea mays
  Clone ID: MRT4577_179906C.1
agccggccacaaatttttaaaaacgggaattgtcctaacctaatttttcatggccttttggggctcaacaaaagaccaggtacttaaacattttcggtggccaaaataccaaaacaagggtcctttttacatgcttgcgggtattcatcaccccagtgaaaattttcccattgttaaccacttttaaacccttagtttggtaagggaggccccacaaaatttcaggagggaccgctttgggccaatatcttttttatttttagggg

SEQ ID NO: 87616 - DNA, 446 bp, Zea mays
  unsure (1)..(446): unsure at all n locations
  Clone ID: MRT4577_179907C.1
ggcacgagcctggactcatttctcccagtgggatcttacaagaagctgtacagttacacgcacttgattaatggatttgctcttcatgctgaatctgagaagacagttagaattcttagtggtgcaaaaggagtaagacttatccaagaagacatcaaaatggccaagatgaccacacatacaccaagttacatcggagctactggagtctggccgctcctaggtggtgctgagaattctggtaacggggtggtgattggcatgatcgataccgggattgaccctaagaacccaagctttgctaccagcaacacgttcaagccaggcggaaccaccancggctagtttcaaaggaatatgtcgtaccggcaatagatttcctccggattcatgcggtggtaagatagtaggagctaagtggtttgcgcgttctgcccaagcgactg

SEQ ID NO: 87617 - DNA, 864 bp, Zea mays
  Clone ID: MRT4577_179908C.1
tgggtacctcgaggccggccgggccgggagcttcgagcccactaaaagcctttggcaccccaagaccgccggtaccatgccggtcctccgctccccgttcgccgggggcgacctccccgccggcgacgccgacccggactacctctatttcctcgaacacatccgcatcgacggtgactcctacaccctcgagctcccctcccacggcgactccccgccatcactcatcaagtacgagaccccgttcgccagcccctccgacggcgagtgcgtctccgatccctcccagggccgcctcagcggcaaccgcagcgcgcaagacgagagggaaccggtggagtcggcgtcattggagacgggacccgcgtggtacgattgtctccatgacgtcgacgaggactaccgcctcttcctgcagcacacgcgcgttgtggacggccaattggttctggagatcgggggcgtcgtcgtcaactacgataacccggttgctgtggaatctccgggggagaaggatacgcagcggggggaagaggcggtttttgcttcgccgggggaagggatcagtgttgcagcggggagcgatcaggtcgcctccggtgctccagcgacggctgtttcggagcagaacgcgtccgattggcgtgcggatccatcaccacggcgtgaggtgaacgatggcggagatgaggggctgtcggatgcaagcgcgctgaagggcgcgtattgggaggcgagctcaagcgatggccgtcgtgcaccccctactaattcggggggaaaggtagaaaaggaactaggtattatatggcctacacatatcacaagaaggccagattcagatttcaagcgaaggttgatcaa

SEQ ID NO: 87618 - DNA, 399 bp, Zea mays
  Clone ID: MRT4577_179909C.1
atttacctcgcgccgccgacaacgcaacccttgcagccccaatccctcacagcaaccatggctggcgcgcaggagtccctctctctggtgggcacgatgcgcggccacaacggcgaggtgaccgcgatcgcgaacccgatcgacaactcagcggtcatcgtctactgctaccgcgacaagtccctgctggtgtgggacctgaccaacccggtccactccaccccggaattcggcgccaccggcgactacggcgttcccttacggcggcttaacgggcacttccaattggtgcaagaccttggtcttaagttcgaagggcaagttggccttttccgcttctgggagggagaggttcgccttttggaacttttcaacgggcttaacaaccggcggtttgtt

SEQ ID NO: 87619 - DNA, 128 bp, Zea mays
  Clone ID: MRT4577_17990C.1
ggatttccaagaatagtaagctaaggttttgcctacatggtattacatgaacaattccagcgtccagatgaatcgaacccatgccctttctgccgaacagccaaggaattgacaggcttccttcacca

SEQ ID NO: 87620 - DNA, 2241 bp, Zea mays
  Clone ID: MRT4577_179910C.1
caaaaatctccctcgtcgggcgtcgctggccgtactccgaaatctaccattctacccccactccctccggcgccgctgcagtgccacccctccatcggtccatccccaatccgctatgcaactgctgctcctactgatactcgcttccttcctcctccggccgcctgcggcggcggccagcgcggcagactcgtcatcaggctgctggcccaagacatgcggggacctcaacgtcacctaccctttctgggtggaggagcccggccggcccccgtgcggaccaccgaccttccagctcaagtgcgacagtagcggcgcgttcctgatcagatccgtctaccaggcctcccaggtgctcggcatcttccccgagaacaactccttccacgtggtggaccacaacctcccgctcgccaccggctgcccagcgccaacggtgaacatctcgctcttgttgcccgggacattcgtattcagcagggccaacagagagctgctcttcctggggaagtgcacggggttcccgccggcggagtcggccgggtttcgcagcctgccttgcgacaacagctcctttgtccggctcggcgacggccggaatttctccagccaaagcatccagggcggcgtgccacaaggctgtctgttcacagtattgccgactctcggggctcctgatggaaatggggacgactacgtcgccagcatgaggaatgggttcctcgtggattggaaagcggtgccaggggattgtcccaagtgcatggcacgcggcggggaatgcacgtacggcggtcccgacgccgagttcgcctgtgattgctccggtggcaagtgcggtaccaaagggaatggcaggaagattccactaatagtttcgatttcagtagctgcaagcttgctcctaccatgtatatatgtgttggtatggcataggaaaaaactggagtttttcctatgcaggaagaccagcagtgccatagaagagaacattgaggccctaatattagcacatggatcactagctccaaaaaggtacaggtactcagaagtaacaaagataacatcttcctttaatattaagcttggggaaggtggttatggcatggttttcaaaggaaggctagatgatggtcgtctagttgcagtgaaattcctgcatgactccaaaggtgacggtgaggagtttgtgaacgaggttatgagtattggcaggacatcacacattaatatcgttagcttatttgggttttgtttggaaggctcaaagcgcccacgagtatgtgagtatatgtcaactggttctttggataaatatatatacacagagaatccgaaggcagttttaggatgggataagctctataccatagcaattgggattgctagagggttggaatacttgcaccacagttgtaatacacgcatagtccatttcgacatcaagcctcataatatccttctggatcagaactttcacccgaagattgccgattttggtttggccaagttgtgtcatatgaaggagagcaagctttctatgactggtgctagaggtacgcctgggttcatagctcctgaagtgcactctcgaacattcggggttgtttcaacaaaagcagatgtttatagttatggaatgatgctgctagagatggttggaggcagaaaaaatgttaactcagcggctcaagagtcaagtgaaaagtattttccacattggatttatgaccactttggtcaagaggatggactgcaggcgtgtgaagtcacacgtgaaaatgaaggtatcgcaaaaaaactgagtgtgattggcctatcgtgcatccaaatattaccaatgcatcgccctaccatcggaaaggtcatggaaatgttcgagagaggatcggatgaactggacatgccaccaaggcaaaacttcagccaaatattccaagatccagtacacagtttgaatgcggaaaccatgagcatgattagtggcaccaaagcaaaagcttctagtgaagtgctaaagatgaaggggataagcgtcgtgaactcaaaaaccatacaacggttgccaactctgtaaaacagttagttacctacgacattggaaatgaacattaaacatggagcccccaccaaaataccgtatctacatctccaaacaggtgttggattagaataatgtaaaatatatcatggttgtgtcatgatattcggtgaactatagtgttataaatagtggttttg

SEQ ID NO: 87621 - DNA, 344 bp, Zea mays
  Clone ID: MRT4577_179911C.1
tatagcatgagctagccatgctagacatcgttcttaccagacatttctgttcataataataacaacaataaagcacatgagacagtggtaattcctagggagatgcatggaatagatcgttccacgctttggtgaatcgagcccatctgaaatgagggaaacattctaggctcattccatgaatccaaaaatgccaagcttgttcgcgatatttgtcattacaagatcattttacactggtccaaaataaccgttctccttccacaattaaagttgttgcccatgtgaccaaaacaacggataatatggttaaactcaatttccgaccgtacaaaatattttct

SEQ ID NO: 87622 - DNA, 405 bp, Zea mays
  Clone ID: MRT4577_179912C.1
acggggtcttcagaccattagctttatctactccagagcgcacaagaacccgagcgacagcatgagggtgttgctcgttgccctcgctctactggctctcgctgatagcgccaccttcacgcatacaagctgcggctgcagatgccagccaccgtcgacggttcatctaccgccagaacggagcatctgccacctacgaggaacctgccacctacggcacatctcacatcgccggtccaactgacgacgtcggtccacctgacaccgccggtccatgtgctgccgacggttcatctgccgacgccacgatgccactaccctactcaaccgccccggcctcagcctcatacgcagccacacctatgcccgtgccaacagccgcattcaagcccgtgccagctgcat

SEQ ID NO: 87623 - DNA, 185 bp, Zea mays
  Clone ID: MRT4577_179913C.1
cggacgcgtgggccgacgcgtgggactagttatacatcgtgagcggacgccctgcgcccatttgataacagtatacacccaagagtattgtcaagattggaagatccaggacaacatatatcatggatacaacatctggatcaaagattgtcacataacatatagtggacttgggtgtatgattt

SEQ ID NO: 87624 - DNA, 389 bp, Zea mays
  Clone ID: MRT4577_179914C.1
tgcctcggctgccaccgccgagatcagccgcctctccccaaagttaatcgatggacctgcccccaaaccccgagagcccgggaggcggtggtgatggcggcggaggaggcggagccggtggatcgagcggcggggcgtcttcgtcggcgccgggcggcggcacgccgcagacgccgagccggtacgaggcgcagaagcggcgggactggaacacgttcgggcagtacctgcggaaccaccggccgccgctgagcctggcgcagtgcagcggcgcgcacgtgctggagttcctgcggtacctggaccagttcggcaagaccaaggtccacacggcggcgtgccccttcttcggccacccgagcccgcccgcgccgtgcccctgccccgct

SEQ ID NO: 87625 - DNA, 546 bp, Zea mays
  Clone ID: MRT4577_179915C.1
atggactcgcccccgccatcgtcgaccgctccggccccaaccagcagcaccctcggccacgccaccccaaccccaagaacagtgcgtccgcatccaagcttagatgatccacatgggcaagatttagataaactagagtctgatagtgatgattgtcaagaagtagctgccctcagtgtaactagtagccaaatttcttcatatagtatcaaggctaaaaagatgaagttcaagttgggtgagtgctttggaatgtgtgcactcgataaaactaagacttccatgaatttaatatcaacaactaaggaccaatgtagaatagaatcttgtgatgatacaatcaagtacgaacatcagggacaacgacaagaaggggaagaaaaagatggagaagaagaggtactacagaagaaaggtggcgaggcgcacatggggcaggaatgggactccgacgagagctccaccgactcctcctccgacgaggatgccgccaacatcgccatcatcaaaggtctcctcttccccaacgtcggccacaagttctaa

SEQ ID NO: 87626 - DNA, 381 bp, Zea mays
  Clone ID: MRT4577_179916C.1
aaaaaaacaaatggggggggggggcaacccaaatcatcagttttttaccaaaaccgcttggggacaaagggggcccccaacccccccttaaatgatttttggaaagccgtttttacccttcttccccccgggggttaaaagggacccccccccctaaaggtacaaatgggactcctccatcccccccccgccattggggccgggcgcaaaaaacccctacccgccctccccggggatgcggggggcaaactggatttttttgggcatgagggggacccccttggcggggatggcccaaaggttggggtcccccaacaaacccacagggggggccccgggggcttcctggagggccagaacgggggggttttggaaccgaaa

SEQ ID NO: 87627 - DNA, 570 bp, Zea mays
  Clone ID: MRT4577_179917C.1
tttttttttttttttttttacaggatgcggtttagtatcagggaggtttattttacttctcttccaaacttcttcgaacgaccgtggctacccttaccaaaacggcacaggaaagaaccactcgtgttcaagctccggtttttttttttcatgtggcctcgcctcgccctcgaggtcctaacaaccacaaaacgtttcttgctggtaatcagtgcatcactcatctgcaaacagcacaaaaaacgaaaaaccatggccggaacaaagacatgaagctaaagagacgtagtactcgttacggtaacaggttacacgctcaggaagtacattgcgcctcgtgccccctacttcttcgaacgaccgtggctacccttaccaaaacggcacaggaaagaaccactcgtgttcaagctccggttttttttttcatgtggcctcgcctcgccctcgaggtcgtagcaaccacaaaacgtttcttgctggtaatcagtgcatcactcatattgcgcgccatcacggtagcgggaggtgacggggaggtcggcagcgcccgccatcgggatggacatg

SEQ ID NO: 87628 - DNA, 446 bp, Zea mays
  Clone ID: MRT4577_179918C.1
aaaaaaaaaaaaaaaaaaaaaaaaaaaaaaaaaaaaaaaaaaaaaaaaaaaaaaaaaaaaaaaaaaaaaaaaaaaaaaaaaaaacttccggggggttgcccttgttgttaaccgacaaatcccgaattttaagggttttgaagggggccttgagaaaggttgaggaccccttgccccccttacaggttgatccccattcttttgattttaaccaaggtttcaagaacttggttttgaaaaaggttggggggatttgccttaaccggccacaggaaattttccacctcttttggaccctctggggggcccaaaatccgcccaccttgaaaaagttcttggaaccaaccccaagggggtcaaaggccgttatcctctcccttaagggttacttcgttaaggctaaggtttggggttcccctgacccggggggccaggtggtttacttt

SEQ ID NO: 87629 - DNA, 410 bp, Zea mays
  Clone ID: MRT4577_179919C.1
tccccatgctgctcatcttctatcctccgcgcccccgatccacatccagatacgagggcttttcatggcatccaaacgtatcctcaatgaataaaatgactttcaaaaagaccctccaacataattcagtgcatgtcctgctggtgatgatatgttacactggcagacaaccattatgactcctcctgatagtccatatgctggacgtgttttcttggtgaacattcatataccgccagactaccccttcaagcctccaaaagtatctcttaacaccaacgtcttccatccaaaacatcaatattcaatgtaagcatatgtgttgacattcttaacgaccaatgcagccccgctttcacaatttctaaggccttgctttctatatgctccccgctttctgttcccaaccc

SEQ ID NO: 87630 - DNA, 243 bp, Zea mays
  unsure (1)..(243): unsure at all n locations
  Clone ID: MRT4577_17991C.1
cgaaggcgagccacgatgtcaggaagaggaaagtgcggcaagggtttgggaaaggcaggagcgaagaggcaccgtaagcttctgagggacatcatccagcggatcaccaagcgtgcgattcggtgcttggcgaggcgtggcgacgtcatgcgtatcagctgttaaatctacgaagagacacgtggcgttctcaagatcttcctcgaaagngaattcgcgacgctgtacttacaccgagcacgc

SEQ ID NO: 87631 - DNA, 166 bp, Zea mays
  Clone ID: MRT4577_179920C.1
gggtgcaacaagaaggaaaatatggggaggaagatgtggatggttcatgtgtatcaaaaaaaaaaaattgtgactgcgatgtaaatcagcccaatgcagcggacatcctttccccataatcacccattgcccgcgcagcacttgcgctgctgtcaaaacagacaca

SEQ ID NO: 87632 - DNA, 266 bp, Zea mays
  Clone ID: MRT4577_179921C.1
agaaaaggacttccctacttcggggaaggcacaaacattaaacaaaaaactttttttttggaccctcccccccaaaaaaactaaaaaagggccccccccattattggttgcatagaaaacacctgtgggtttttcaaaaaaaggtggttgaaaagcaacaaatttttcctttataagaaggggccaccccttggcgccacattgaactctccctttattttcaaaggacgccgggggtgacccccgtatttccgacccggccctgg

SEQ ID NO: 87633 - DNA, 159 bp, Zea mays
  Clone ID: MRT4577_179922C.1
gagagacagagaagcagagaacccctcctggacctcggacttttctgttactgcttcggtcccaaaatcctaagggtttgctcgccggcgcgcgatggaagccaacttgtcagcgtcgatcgctccgcaaacgtgggaactggagaacaacatttccgc

SEQ ID NO: 87634 - DNA, 1215 bp, Zea mays
  Clone ID: MRT4577_179923C.1
aggagaaaatttgaccgtcattttttaagttttttcccttgattatggaaagggactctttaacgtgcaaggttaattaaacatatatatggtggggcatatgcaccaggctcgatcgatctatccacaatggcacagcgtgcagactgcaggctacattaaagaaactagaaaaaatagcgccctatcgggcgctgtatcacctagcatggttaaacaacccgagtccatgcttaataacgcctccagaacctcacagcgtcgtcaagtcgtcatgacaaagcagtggcgcgttccgagagctcgagcaaaccaggggacggcctcggcggcattgctttttcctgttcctgggcgtccaccatttccaagatctttcttacggttgcctgtaacctctcgtgaccaccttccagtgtggactgaccagcagttacgttcggttggatggccatagcctccttgtttccgagacccatgtttgacggcttcgttttcgactgtgctttcgctgatgttactgcattggtaaagacgtcgggttccttgaggccacgaatgataggctgaacaaaggtaatcatcagaccaatgtgatgatctctcttaattcaggtaggatagggaggaatggtcgatgcttggtacacggagggctaagggtgttaccagttccccatctcctcctcagttgctgtcgatgcaattataaaggcctcagtaaaaggatccttaatgtcatacagtcaatgctgctttcataattggggaagataaccatgtcaacgttgtcaggaacatctaaaagcaatcgcctcagggagtactctcgggcaccagccttgccataataatagccatttccatgtttagtgattgcttgacaaatagttcgtaattacacggcttgtaaaagaaacctgctagccaagtctcattccaaatgcggctgaatagattcaagaacagaggtgacagctggctttgcagcctctccttcaactaatagaaagaaatgtgaaacaccaatgacattgtgataatacaaccatggaagaatctggtgtaggccagcagatgtgcttcccgtgatacagatctggattccggagaccacgtcgagggaggagcacgagctaaatcgcgaaaagacagaggatctttgtgcaaaactgcgaccgcgaaacgccccggccggcctcgagggtcccaatg

SEQ ID NO: 87635 - DNA, 416 bp, Zea mays
  Clone ID: MRT4577_179924C.1
ggcagatcttctgttgcaaagtgaatagagatgcaggctaccattgcaggagtacaggaggatagatgtgtctaaccccgtacggaagttaggagtctactctgcatatggcgtctgctctgaaccagtttgagatcctctgagccctgacatatcgatttctgattgctccaaacgggggcggaatttcgagaagcagacagacatgaacgcacaaaatggcggaagaagtgctggtgcattctggcatcggcataggcgagtgctggtgggcagctataccagtcggccgagttcacagctgctcagccaagcatatacagaatggggtcgggacctaacatgtgctccatgtacacaaaaagctgggcccggatgttctctctatataaagaaaagaaataatattttatgtc

SEQ ID NO: 87636 - DNA, 464 bp, Zea mays
  Clone ID: MRT4577_179925C.1
attcattaatgtttgtttcctatatttggccgatttataaggcatttcctttaaagccaactgttgttgtttgggcctcaataaaaacaaaaatgcgggcacgatcagggcgaaagcaaaagggtcacactctagcaaaccggcaaaactagaagggaaacggtgggccaccacattacgagggatctggctaaactcctaagagagcatgcccaccaccttgggcaatgatttgttattctacctaccagaagcagccaaaacaaaggggcccagttggaatgatctaaaaaaaagtatcttaattaccaggcggggggattcccccccacaataaccgatcggttcttattcccccaccaagtgtccccaaaaagaaagggattaaaggtagggggaggaatagccattgctgaaaacccggggcaaatgggatccccgcagaattccgacaacataccagc

SEQ ID NO: 87637 - DNA, 519 bp, Zea mays
  Clone ID: MRT4577_179926C.1
tcctctatagtggacccactcgttctgtatgcgagcgccaacacacggacggaagaatatgacgacccgacgctgcgctgtagcggagagaacgctctagtctttcctcttctggcgccatgccacggtacccgtcagaggtcctgttggcggcgctggcgctcgcgaacttgactactactccgctcaggaacggagccagacggggccattactactctccacattattagtcgatcggatgcgtatctgttatactgaaacagccacgcgcacgaaccaaaaggcggaccgagatgatcttccagtatctggctcatgccgtgaagaagcccaacactaatgagctcgatgactagtactaacctaaaagatatcccgctgtaaacgccaccaagcctgctctttctatactcggctctgacctgctgtacagccatatctggatgactggtgccggtcctcgcatcaaaccttgccctgagcgtggaagccaacaaaggtgagctagaccttgct

SEQ ID NO: 87638 - DNA, 845 bp, Zea mays
  unsure (1)..(845): unsure at all n locations
  Clone ID: MRT4577_179927C.1
ctcgnagccggtcgtccgagacgcatggagtaataagagtagacgtgcgtgccatgggcatgagaggagcttgaacagagagatcggagcactcatgacggtttatccatatgcaccacccccgtgacgaggaatgaatatgccacaccacccctctcatgcgaacacagccatagcaggcacgaaattgataccttcggtatctgcatgacacatgtacctcctgtgctcgcctgtgatcaatctaccgatatatagcttacatgcccggctcctgccctatacaataacatccggctctacacttcactgctacctccccaaaaccaacagaccgaacagttagtcaatgcaatatgtactgcgaacccaatgccaacggtcataccaacacctgaggcagtatccgaatatgtatctctgagcagaaacacaatctggatacacaatcactgcaagtgcaaccaaccaatggttacagtgatacaacctcaacttgtgcatactcaactcacagcaacctctggaatgtcgccataataaccctcaccatacacaagccattgtccaaattcgactactgctagcagccacctctggttcaaaatcacaccaccatactaggtgtccgttcaacaaatccacgttctgcagcaacagcaagttcagcagtcagtgcaggaacaacagcaaataaagatacagccttttcaggcacctaatgatgccaacatggtaacacagttatctgatcagatgacaatacnactattgaaggctctacagccacagcagcctctggtcatgaaacagcagaaaatgatatttgatttgcagcaacagca

SEQ ID NO: 87639 - DNA, 611 bp, Zea mays
  unsure (1)..(611): unsure at all n locations
  Clone ID: MRT4577_179928C.1
cggacgcgtgggcagccggggcagccatccaatccaaccaacgcgttgatactcgctcgtatatagacgccccgacctcgtacaaacgcgggtagtactagtaattgggcgcaatccgccgtctccccaaccgcccgatacagcgcggcggcggcggcagctcgacaattcgatccccaccggattcgccgcggattcctccggtaatcgtcgccgaatcgacccgggattgggagctggatgctgctcaaagccgagatggtgtagtaaagatcggttctttggcgaccgccgacgatggcggccggcgggcgcgtgcggttcaatgtgggcgggcagctgttcgagacgacgaccaccacgctcgccaacgccggccgggactccatgctcggcgcgctactcgacgcctcctggaacgtctcctcctcgtccccgggcggcggagtggccgagtacttcatcgaccgcaacccggcctgcttcgcggtgctgctggacctgctncgcacgggcagcctccacgtgcccccgcaccttccggagaagctgctctaccgcgaggcgctctactacggcctgctcgaccacgtgcgcgccgcgcggtgggg

SEQ ID NO: 87640 - DNA, 431 bp, Zea mays
  Clone ID: MRT4577_179929C.1
cggacgcttgttttgctgttttcgcatcactggtcactggtgtctcagagacaggactggctgaacgagtattgaaaaagctgagaagaatgaaccaaacgaatgcgaatgaagacactggagctgacggtcttcacgaatcaacatgcttggattggatccttggctacaccgaacggcctgcatagtagaattattctggctgatactgaatcctgaccgggaaaagtgaaggaacgaatccactgaatcttggcctggatccggtctcgggctgccgaacgtaccgtcggtaatgattacaagggaacagaatacgccatttatttggttggctcgagcatggggacacggaaccgagaagacgggcatgcaagatcagataggccgggtggtgagcggtagagtttgtatggtccatatccgatgac

SEQ ID NO: 87641 - DNA, 163 bp, Zea mays
  Clone ID: MRT4577_17992C.1
ttttctcttgggctaatcgtgcgcgcgtgggtcggctcgatactcttgtgcatccgtgttatcgtggctggaatggagactgcgagcgtcttatgaggacgaataggttctcagcgtaatgctaccatttccttgcgccagtgagtagtggctacaggttatg

SEQ ID NO: 87642 - DNA, 269 bp, Zea mays
  unsure (1)..(269): unsure at all n locations
  Clone ID: MRT4577_179930C.1
acactcgagcaagcgtataactacaacttcaacccngaacaacagggcactccaagcactttttaacaccatcaagcgccccccanccacacacacacccacctacaagaacttcacaaacaccaacaacggattccacataacaacacattcctatcctcctagcaaggacacaccaatgaccccaaacaccaagtcaccataccaatctaaaccgaacaaataccttaacctccaaaacaatacctttaacccgccccactaccttc

SEQ ID NO: 87643 - DNA, 428 bp, Zea mays
  Clone ID: MRT4577_179931C.1
ggggggggggggggtgttttttttttttttttttttttttttttttttttttttttttttttttttttttttcattccaattaacttaaaacccaaaaccaacaaaccaaatcaatcaacaaacccacaacccaaaatccaacacaccaaaacacgggggggggggggggcccaaaaccaaaactcacaaaactccctaaacctaaaaaaaaaaaccacccccaaaaatgcacagtttcccacaaagcaaaaacccccacaaccaaaacggggccacaaccaaaacagcaaaagggcctcactcggaaacaaacagcaccctagaaaccccaccaagggatccccccttgcaaacgaccaccccccccgctatggcccaaacccaaagggcaccaaaagcacaaaggcccagacccaccctggggccc

SEQ ID NO: 87644 - DNA, 372 bp, Zea mays
  unsure (1)..(372): unsure at all n locations
  Clone ID: MRT4577_179932C.1
gcggaaatnccgggcggaccaacgcttccgccaacgcttcggttaaaccttcattttacttttggccggaaatctttgccaaacggggaggtttgaatttggcccggggaggacaaaatccaagccaaaggcataataacaaggaaacccaagaacttaaagcaaggccgaagccggtttggtccaaaaaaccgaatgttaaattggtcctaaattttttgcaagctaagttgtacttcggaaagaacgccaagctaaaggcttctaaaaggaagttccaggatgtggccaaagattcctataaccctaataaccaaagtaccttccatagggggggtcctgaaaacctgcccaagtatgggaccactaaca

SEQ ID NO: 87645 - DNA, 287 bp, Zea mays
  Clone ID: MRT4577_179933C.1
ccactacggcggcgccgctgtgggcggtttcgacccggcttcctgagccgcgtcgggccacccgccgggccgcccgggatgcaccaccgcatggtcggcggcggcgccgggatggggatgatggcgcccgcctccttcgccgacgagatggacctcggatcccgaggcggtggcggcagcggcagccgccgcgagctgacgctgttcccgacgtccggggaccactgagcgccgccggccgggggctccgaccgacgacggcgatgggcatcggaccgcgggcgggc

SEQ ID NO: 87646 - DNA, 437 bp, Zea mays
  Clone ID: MRT4577_179934C.1
cgcggcacccggcctcacatggcgcaggcgcgcgacccagcgtgggcttggccagccaggggcgtgcctgtgcgggcacgcggcctcgccacaggcgtgcggccccggccaggtcccggcgcggtctcgacgctcggtgtgccgctgttaggcgggcgaggcctcgacggcacgggtgcggctggcatggccccgtccggccgtgggtgtccccggcgtgggcacgggcccagcagccccggtggcgtggcgtggccccaacagcccaagcggagcgggcgcgagactcctctggcgcaagttctggcgggcagcgctaccaccgtctgtccgcaagattgcagcacacatgtgtgcaagaacagcgccattgcagatgaggaccgacagatacataacaaaactgagtaagcataaatcgcataccatttttaatc

SEQ ID NO: 87647 - DNA, 302 bp, Zea mays
  Clone ID: MRT4577_179935C.1
tgaaagtagaaatttgactgaagctcctacttccttatacagcctttccttctgtgggcttgtcacttttcagtacatttctagtggggtagagcagggcgacccctctgctgggtatctccttaaatgcgaagcaacataaatttatataatggaatttggtggcagtgtctgatgtatgtgcatagctaaaaccaactgtttagttgactgcttagttataggacaagttggaagtccttgtttactggaatatattatgcttgtgttaacacactagagtaaatagaatttggtattct

SEQ ID NO: 87648 - DNA, 289 bp, Zea mays
  Clone ID: MRT4577_179936C.1
ttatttcatcttttatcagggttttggttcattttcacttgctcttgttcacattcactatttaactcaccaaaatcagcatcacacacaaatacaagctgactcacaaatacatacttttcaagatcataagcaaacctactccatataccgacctcaactagatcaacctgttcatgctcatgcacccaactcacaaatactatcacacacacctttagactctaattagttgctactaccacattgttgttgaacatgttaaaagaaaagtctataatcaatccaa

SEQ ID NO: 87649 - DNA, 314 bp, Zea mays
  Clone ID: MRT4577_179937C.1
cccacgcgttcgctgactcacgcgccacggcgaccaccacttcatttatatacagatggcggaccaccacgacgtgagcggtgtgtcctacatacacaacgtgctggacatcaacggagggcagacccacatcataaacagaggtcgcgtgatgtttgtgaacgagcgctcgtagtctggtccgggcaagggggaaaccatcacctgctaggtctgggatcgctgccttctttgctgtttacgattctgctcccttcggtgcaaaatattgggcacggcgcgtggtttacctgtccaagaagaatcactgttgc

SEQ ID NO: 87650 - DNA, 858 bp, Zea mays
  Clone ID: MRT4577_179938C.1
cattggattgctcgctcgaggcggccgggaactcatcccgacccttctacattctttaacacactcttctttcataaattcgaatttctacttcaactttcgcaaacatgctgatttccaacgccattgccgcactctctgtgctgtcgcttgcttccgcagcggtcattcctgagtctcacatcgaggctcgcgctgctaagaccgttgatgccggcttcaaggccaagggcaagaagtactggggcactgccagcgaccagggcattcttggccagagcgccatcaacaacgctgctaaggccaacttcggccagatcacccccgagaactccatgaagttcgatgccaccgagccttctcgtggcaacttcaacttcggcggtgctgactggctcgtcaactgggctcagaccaacggcaagcttatccgtggtcacacccttgtctggcacagccaggtgcccgcctgggtcaccaacatcaacgacaaggccaccttgatctctgtcatgcagaaccacatcaagaccgtcgtcggccgctacaagggcaagatctacgcatgggacgtcaccaacgagatcttcaacgaggacggtactctcaggcagagccactggatgaaggtcatcggcgaggactacgtccgcatcgcttttgagaccgctcgtgccgctgacccgtcggccaagctctacatcaacgattacaaccttgacgtcgccaactacggcaagacccagggtatgatcaagtacgttaagaagtggcgcgccgctggcgttcccattgacggcattggctcccagatgcaccttttcaacggtaacggctgggccaccgccaccgatgtcg

SEQ ID NO: 87651 - DNA, 346 bp, Zea mays
  Clone ID: MRT4577_179939C.1
gtaatttgttaaatccccattatcaagtgggggtggtaatttgcggaggaaggaggcttacttaggttcatccaagaacttgttaactacaggcatgatctcaggattcttgtcatgcacaaaacttcttaggccatgcatggggtaacctatcccctcctcatggttctcaagcacaccagcttccctacctgacttgtttaccctttaaaatttaaggcattcgtgtcgataggggtacaggattaatgtatatggaaacatggatgcatgtaactaggttagcacaaacaaacaggtacaattgtgacatccctctgttgccaaatagggggcaatcttactg

SEQ ID NO: 87652 - DNA, 405 bp, Zea mays
  Clone ID: MRT4577_17993C.1
tgcacacgcaaccgaccacttcatttagcatttatacaaaatgccagctcccacacattgtatacataagcgagagaggggccatctatttatgtaacacgctactatccatcttctctttttttccttctttctcgtacatacaataatagtgaataacattcatgagctcacctttcaacataaaccaacatatactttagtaactttgcaccatatgccataatcttatacacatcacacattacaccattccggctgtataatgataataactctaccaaattccatctacttttgccaatgaactttacttgtcgtggtaactcaaagataaaaacaatacctgttcgctgccgactttctgacaaggcacatgacgagctttatcagggggttcactat

SEQ ID NO: 87653 - DNA, 415 bp, Zea mays
  Clone ID: MRT4577_179940C.1
ggtagaagggagtggcttttttgtttgtagctcaagctccttagctctatgatacactaacttttgtgaggaacacgtggaaatgtaagatgattatgactggaatgaatgaaagcatgagaaacatatttttagctcctatatcttccagtttatatggtgaagtacttcttgactaatccacactaacatatatgtgcaattgctgtttggctagccggaaatgatttttaatcgataatccgctccatggagcgctaccaagtggcctctaattcttagctcctgctccttaatctctgatggagtgattctagttagagagagattaataaggtgggacagtacgtgtggaaagcgatttaggtgacatttgtaactggagtagtgaaaaggagttatttctcctaggttc

SEQ ID NO: 87654 - DNA, 502 bp, Zea mays
  unsure (1)..(502): unsure at all n locations
  Clone ID: MRT4577_179941C.1
tcccacgccgtccggccttctacctccccctgcgcggtgtcggggttgcgggttcgatgagggttctcgcgggggtgtgcggtttcgtagggttgggccggatccgagnatggcgtgcgtcggnatgttagagtacccgctgccttcgttcggcgggccttcgcctagggccacggtactacctatctccctccacaacgccttcagcacgcggggggcggagggtcctcgagtccaagcatcatcctcgtatcgtggagacgcagtaggtgcccgcggacttcggtcttcgtcactcttctccaccggaggaggcgtatgctggaacgccactcgagggcatcgaacggcaagngagctcggacggccgcaacatcaccgtcaacgaggcccagtcccgcggctgccgtggaggcggcggcggcggctacggtggtggccgtggaggccgcggctactgcggtggcgggcgccgtgatggcggcgtcggctaccgcgatgg

SEQ ID NO: 87655 - DNA, 1409 bp, Zea mays
  Clone ID: MRT4577_179942C.1
ttggagtgctgggcttatgctcagccaataaaccccctcccacgcagcctcgaggccggccggggccgccctgccgaggacccttccttcctcgtccgcccacgaatttccggccagaccatcctacaccgcccgtccgggacacgcgcccgcctctgccaagaatttcgccttctccggcgccgatcccgcccattcttgtgccgccggcaggccaaggatgcggaaccttctcacggattcgtttgagctcggcaaacgggggcagtcctcaggaaatgtcgacatcgagcttggattgcagggtgacctgactagttctgcgcagccaggttttgagggattctatgaacaggtcaaagaggttgaaagcttgctcaacacattgacaaagttactgaaggaccttcagaactcaaatgaggagtcaaaagttgtcacgaaggcatctgcgatgaaagaggtaaaaaaacgcatggagaaggatgtcaatgaagtgacaaagattgcacggctggcaaaatcaaaagtagagcaactgaacaaagataatgctgtgaacagaggaaaaccaggatttggcaagggatcgggtgtggaccgatcccggacaacaaccactgtcgcattgacaaagaagttgagagaacgtatactggagtttcagacattacgagaagaaatccagcaggaatatcgtgacgtagtggagcgtcgtgttttcactgtgacgggggagcgtgctgatgaagagacaatcgacaagctgatagaaacaggcgacggcgagcaaatctttcagagagcgattcaagagcaagggcgaggaagggtactggacacgctgcaggagatccaggagcgccatgatactgtgaaagagattgagaggaagcttcttgatctgcagcagatcttcctggacttggctgtgttggttgaagctcaaggtgagatgctggacaacattgagacgcaggtcacaggtgcagctgaacatattcagaccggaacaaaccttctccagaaagcgaagaagctgcagaagaacacacgaaaatggacctgcataggcataatcatcctcctcataatcattctcatcattatcctctccttgaaaccatggtcctggggtaaataagcagcaaacaagaagcgtcgttcccatgttggttttggttgatgatattacctatagtattcttgttatagctgtgcatatgtcagaaggtgctgtacatcgtattgcaatctttgttttttttttccttttggaagagaaactttgggtgtgaactttcagattttgcttgattcgaatttgctgtattggttgtgcaactaaaggcctacacatactggtttcttgggaaattggtaactctgtctacgtagacagtaagcct

SEQ ID NO: 87656 - DNA, 432 bp, Zea mays
  Clone ID: MRT4577_179943C.1
ttagctttcggtttcagaaaaggcctatcttgttcctgggatggcagacaattattcaaataacttatgcttgttggattatttataagtgctgttaacgaggcatcgtccatgattggttacaggctgatatatgttggttttttcaaagatacgtgtgagaatggcagtctttagtgtgtgaaaacgaaggtgttaaaccttagagcatccaagcagtaaaacgagcacaactgttaccttgataacaatggaacatggctcaaatcgagctagcctatttcaatggttacatttggtgcttttgttgtaacaaaacataaatgctcatcaacatacaacaactttggctaagaaaccttgcttactactctcatcaacagcatgatgtttcattcaaccaactggctgcattgaaatttgatggttatt

SEQ ID NO: 87657 - DNA, 412 bp, Zea mays
  unsure (1)..(412): unsure at all n locations
  Clone ID: MRT4577_179944C.1
aggaagaggccggcgccgagggcgagaggggggnggggcnagcaacggacnncncggaggggagccgggcggcgcngcggngggcggcggccaaccggcngcgagccggcgaccaccngcngcgggggcacggcagggagagcccgacnacgagcagagcgaggccanccacagggaaaccaccggcnccccgnngannccccgcncggaaagcncggacccnancanngcgaagaaaaanggagcaaagccggacanagaaaccnnggacanccngaacacnacagcnacccagaagganancgnggnggnngngaaagnccngnggggnganccgcgngagaagcccngncaagnnanccaaganaccccgcngagcngcnnggnnanaggaagcaggggccnnggcaag

SEQ ID NO: 87658 - DNA, 180 bp, Zea mays
  Clone ID: MRT4577_179945C.1
agaccatatcctgcatctctatgattactaactactgtgctccatcgacactcatggctgtggcgttcgagcgcatgaatgagatcagctacgttatgctgatgccagtcgccttgctattcctcaaaaggcgtacgggctatcatgactgactggcacttacttacgtctatgtgtatg

SEQ ID NO: 87659 - DNA, 293 bp, Zea mays
  Clone ID: MRT4577_179946C.1
ggtaaccagctgccgagggaggaaccctagcggcacactgtgcatgtgacggcggggctcttcactacgaccggagatacggctgcatcggctacatctactcctcctccatccacgacgacgccgcgcaagctgccagcctgcatggtcacctgactgatattactcgctaactgtgtctagcaagcctaatagtccaccatggatagccttaagcacgaaacactggacgacaccatgctggccgctgttgatctcatgcttgggctgcaatactgtgtgataccggacga

SEQ ID NO: 87660 - DNA, 331 bp, Zea mays
  Clone ID: MRT4577_179947C.1
tcgtgcacgcatacatccacacgtcctgtatttgtacccggccggtcacgttatatgatacacggggatgtacgcctaccaaatacggattatctcttctataatgggacctagaatcaattgcctggccgttttctttccacgacatagactgggaaggccctgccgttaccaaacttaatcttcctgccgcacacatcccgcttcatagctgtcgtattagcgaaaatgccctcacctaactgcccttccatctacatcgcagcctgtatggagaacgtgacgcgccctatctcaatgcactatgcgcgcatgctcctttggttacccg

SEQ ID NO: 87661 - DNA, 199 bp, Zea mays
  Clone ID: MRT4577_179948C.1
gctcaataacacacgaacgagagctcaaacattacagcacaaagcaccgcacagacaccctactacatacctactactagacgccaaaaccgagctactatactacccccaaacaacagtacctaccatacaatcaatgccaatactacgcggtacgaggaacacgactgagggacagcgagatgagacagacacagat

SEQ ID NO: 87662 - DNA, 103 bp, Zea mays
  Clone ID: MRT4577_179949C.1
aacacgcctatctcaaactcttgcggctagttctagctcgtaagccgctgctcctgcggacacaggaacaccaactatgtgccggcctgccaaacagaaaata

SEQ ID NO: 87663 - DNA, 285 bp, Zea mays
  unsure (1)..(285): unsure at all n locations
  Clone ID: MRT4577_17994C.1
accaacctgagccaccaaatgttccactggagaattcagttcagcctgacctcccaaaccagaggatggggtatgcctgtgcactgaagcctaacccatcccaaaccgctgatatgttggtctgttgccactgcaagccgagaagaanaagagaagaagaaaaaagaaggcgaaaagaaccgctccggccaaaacggagtacaagtttgtgccctacccgacccgctgcaaccccggatgtgcccagctgccgtggcagtgcccgcctagcagcaggccagtgct

SEQ ID NO: 87664 - DNA, 505 bp, Zea mays
  unsure (1)..(505): unsure at all n locations
  Clone ID: MRT4577_179950C.1
tgcaggtaccnttttttttttttttttaacacaacaaaccaaagtttttatttccccatgtaacttattgttacgtcacatcgttttgacatgctgcggtgctataatnttcaaacggaataatcggatacccggaacaaaaactctgggaatttacttttttttaaccatgtccggatcaccaaattcctaaaatctcgttgaagggctggaattcaaggcacactgctttacatgaactatgaaatttccctgcctactagagatttattactgcaaatgtcttgccaatgcgctactccgtgataaaacaccgttggcattcataaaacttcttgtccttttgtactcaacctttgcgtgtgagaaaaaatggccaggaggagatttctttcttacctctatcgggtttagagatatttcatccgttgtccttctgaaaggatgaccatttttctgaatacccttgccctaaaacaaaagacccccttttgttctttgaaca

SEQ ID NO: 87665 - DNA, 756 bp, Zea mays
  unsure (1)..(756): unsure at all n locations
  Clone ID: MRT4577_179951C.1
ggccccccctcccggcccgcgccgggnnacccgttcgcctctcaccttttcgcggtactcactcgccacacacaccccctctccagctccgtcggagctccggacagcagcaggcgcggcgcggtcacgtantaagcagctctcggctccctctccccttgctccatatgatcgcgcaacccatccagctacccgcgtggactgccttccctgggtcggcgcacgaggggatcgcaaggctggcggngtnggtttccagggccatctgcgctcagaagccggcctcaaaatgcaccagggacagggaagccacctccttcccccgccgatcggtcgcatcccccacgcccccccaccccaaagccccccccctcctcccctccccctccccccccncaccctccccccctctcctccccccccccccccccnnttgtctctcctcccatccagacttccttaactatcctttctccactttcttcctgttcctcacccacccccccctccccccccatcctccccctctcccccccccccccccccccccccccccccctccccccccccccccccccccccccccccccccccccccccccccccccccccctccccccccccccccccccccctcccccttatncccccttccccttctctcctccccccccccctcccccccctcccccccccnccccccccaccccccccccccccccccccccccccccccccacctcccccccctccccc

SEQ ID NO: 87666 - DNA, 503 bp, Zea mays
  Clone ID: MRT4577_179952C.1
cgaaactgctgtgctgcaagcgaggccacttagtgtgttgtaactcatgaggctacaggaggcatatcgcgtgtggcaacaagactctgctcgggttgaaacaaatcgcgcactagaacacggacggtatcaggataggtgttatagtggcacaggcagccgatatgcgtaaaggcggaactatgagaagatcactgactgatgcactgctgggctggttttgttctgaaactagatcatgaaactatgagaacggatgctagttgccctgtctgcagactagccgaatgcatttctacatgaaacagattgctagatgcgtcaacactgacttgactggctatcgcttatgctggtacatggaaaaggcacacaataatcctgtgagatccatgccatgaggaccaacaataggatatggagagactaaaccatcgaacggttcatacaacgtggactatggaaggtacatgcacacgaaagcgtggtgcaggcacagggaa

SEQ ID NO: 87667 - DNA, 461 bp, Zea mays
  Clone ID: MRT4577_179953C.1
cgcatccaacagcttctatcgctcttgagcctgttctctgatcaagcatgcatggcagttacagctctactgaactacaacatcgacaatgaactggacatggcagtgagtagcatgctaaatgggaagcatcctctagcagcacttaacagaatgacaaataacatgacatcattcctgaagcattcgaacatacttgacaaaataccagaggatacacttaaatggaaaatgaagctgatcaaacgggctgcttcttacgccaattatcgtctacaatcggttcaggccgatgtgctactgttagtcagctgtgctgacaggttacttccaagcaaagacgaagctgacaggctgcagaagttgttaccgaagtgtaaaatctacttctttgagaagcacgggcacagcttactactggaatacggtgttcatgttgcaagtatcatcaagtgcactgg

SEQ ID NO: 87668 - DNA, 359 bp, Zea mays
  Clone ID: MRT4577_179954C.1
cgtcttcatacatttttttttcaagggggctttaagtccattttattgccagatttttcgatctgccccagcaaacacaaggcccaccaagtaggggggccccctgcctttccaacacgagtcacacgacgcggcttaggaatttccgtaggtccccgtgctgaaatgcaactggatcaaagcgtttttttccctaccccccctaccgtaagacgtggcggtttttggtcggggagccggtttactgaacggggctttggtaggtttcgtagcggcgtccccccccaaaatcctcgcggtttttttacaattggtagcggcccaagcccccaaggttgccaaccccttttttgtacccc

SEQ ID NO: 87669 - DNA, 193 bp, Zea mays
  Clone ID: MRT4577_179955C.1
ctctgtcttaaaaataataacaataataataataataaagacttacttaaccaatattattgattaccagacttttatgaaagccaaagactgcttgctagtaggaaaaaatttcaaataataaccaaagctgaaaaatggtctgtcataaattatttccccggtaatttttgaaaggaaaaatgtataacaa

SEQ ID NO: 87670 - DNA, 335 bp, Zea mays
  Clone ID: MRT4577_179956C.1
acgcggacgcgtggtcaaagagcacctacttttttttttttctaaattatcagttctcactcggatggtcgccgaggtctgcaacccacaggatacttccgggcctgtgccgatcaaggacgtcgacgacggcagggttccagaacaaactcctaatgaggagatcggcgacctccttggcgggctgtcaagcaagaagcagtccatcctggagctgctcctgtaccacagcttgttgctgcacggagcactggatgccggtgaccataatgtttcagcgccgattgacgccgagcctcgacgacgtgatcctcgcgagctaccccaagtgcggc

SEQ ID NO: 87671 - DNA, 520 bp, Zea mays
  Clone ID: MRT4577_179957C.1
aaaacaaacccaaaatttttgggggaaaaaaaaggggcccacaacccttcttacccgtttacaaagttccccctggaaaaattgcaacccaaccgatttttccccctcaaacgaaaaaaactcctggttccccaggggtccttttaaaacacccctttggggttaaaaaaaaacccccccaaaaacttccggaaatccttttttttgacagggattttttggttaaagagggggggggaccaaaaaactaactcgacggggtggccataaaaaaaaaccccgcccttgaccttttggggggggggggggggcccccccgaaagaatgcccccctttttgaccttttttttgcgggggaagttccttttttcaatgggggggttgaaattgggaaaggccccctttaggggaaaaggggcctaaaccaacctctttttggagggggggcccttggggcccccctttaaaaggttttggaccgggaaaaagggggggcggaatggcccccttgggggggggg

SEQ ID NO: 87672 - DNA, 789 bp, Zea mays
  Clone ID: MRT4577_179958C.1
accgtcgttcttgccacacacctgaccgaccttgcctcctctccctcctatgccaccaaaatgcctagccccaatcaccactactgccgcttcctcccggtctgctgcctaagcctctcgtctgccagcgatccgtcgtcgtccccgccggctgccgcagactccacggggtgcctctactggacgacctgctggaagaagaggaagcggttaaagcctcgtcccggctgcgagcgctgctgccgtgcggctgctatgtgacggcgctatccttaccgagctttcatgcatgtaccacgccctctttcctcttcgcagtctttgtttcatcactcagcagaattcacgatgtatgtcttcttgaccttgcaagacttttcgctagaggatgaatcccaacttcttgtgcctttccatctcgcacctatcaatcctcccatcttcttcatccccgtctatccctcttgagcttgtaccgctttgcagttgtagctagctagctagctacgcctacttccgtgtggactccgctgtgttggctgggtctctggaagtaagtgtctcctcgtcgcgtgctgccgtgcattgtgttgccggccggcagctacttccgcacgaactctactagtctgctattattctgtgtaatggaaggtttgtgatgtactccctgtttatttgctagttgtccatcgcctttcagcaggcagcaatagcttgagctttgctactcgtgtaattatacgtctcggaaatgcagttattagtgtgccaaaaaaaaaaaaaaaa

SEQ ID NO: 87673 - DNA, 250 bp, Zea mays
  Clone ID: MRT4577_179959C.1
gccggaggccaccgctagatccgcagttccccgcgcccgaacgcaaccccgcgccagagaagtttgttctttatcgatattatcgatatggcagggaggagaatgtctacatgccaagctggctgagcaggccgaaaggtatgaagagatggttgagtatatggagaaggtggctaaaactgtagatgtggaagaactcactggtgaggagcggtgacctattttgggttccctgtctgatgtggtgggg

SEQ ID NO: 87674 - DNA, 278 bp, Zea mays
  Clone ID: MRT4577_17995C.1
attcgtctcgagctcgcaccaccaactttttactcaaatacaacccttcactattcggggggcttattaacaactgcggggggttgttacatctcggaaccaaaataataaggctccgaaccctgctgctaacacatattatgctcctaataatacccctcttacgtactttaaccaaatacctaattttcatgtcatcaaactaaggatgaaaaggaaaatacttctgttttgccacccaatcatatttaatgtagtaaacctatatttttcttttc

SEQ ID NO: 87675 - DNA, 354 bp, Zea mays
  Clone ID: MRT4577_179960C.1
aagtaaaaattttttccctttttgtattgtatactttttattttataagtagccttgctcctttactttacgtgagctccccagacggaaagcgcagcagaacaacatcaccaagcacgccaaacccgaaaggaaaaaaaaaaaaaaaacccccccacgacggggccaccctacacgccggggaaaagaccggcggcacgccggcccacccttcgcgacaggggagagacggggatggcccgaaccgaaaccaccccaaacgcctttaaggaggagatgttaaacgccgtgttggtgggcaaccccctgccgggggggatcacgaaatgggtcgggagggcaacaaccttgggg

SEQ ID NO: 87676 - DNA, 193 bp, Zea mays
  Clone ID: MRT4577_179961C.1
atagtatccatggtgcaaacgagttcatgctttcaattaaaattgcggtacaaccgaccatcaacatgccactccgtaacatctagcaatgcacaggatgcacgggatctaacccagttaagcagtaacagatctaaccctactaacacagcgactcccataccaacgagccagatccagaccagcagagcgc

SEQ ID NO: 87677 - DNA, 493 bp, Zea mays
  Clone ID: MRT4577_179962C.1
ggccctaccctcgagggccccaaaaaaaaataaagcttaaaaaccccccgggttcaacgaaaggaaaaattctttttggcccggcaaaccttgcccttaaaaattacttggtccccccaccaccgggaggggggcaacaaaaccaaatttttgaggcttcccccggggaacccacaaggaagccccgcccccaacaaaaaaaatttttttttttgggaaaaaccttcgccaccttgggtccagggggggccctttttcccacccctttggggacccccaccccccccggttgccccatggcccgggccggaaatccccccaaaggggggacccggaaaaagggccccccccccctggggcttaggggaaccatttttaccaaaccaaaaaaaccggttttgaaaaatttggggtccttttccaacttcttggcggaacggccataaattttgggaacgagcccaacaaacctggcagcaatgggggggggggg

SEQ ID NO: 87678 - DNA, 746 bp, Zea mays
  unsure (1)..(746): unsure at all n locations
  Clone ID: MRT4577_179963C.1
tgttctcacgcgtcccgaaaccctnaaatcctcctctctctanaatgggccgacgccnnttcggctctcaagcaaggcgcccggcggcgacnnggcggggaacccggcatnncctggccccgcccnntctccnnngttcgcagnngtggcgnnngcgcaccggnngcgagaaggncnnggcggcncnngtggctgatagtaagtctttgctgcggnnnagcacggggnaaaggggcgggcggtggnnatcgtcggggaaccaancccttcctngnngtgctggtgnnngtgccgcntnngatcgagnatnnggaccgggnagnncagcagcntnncaacgacnnctcgnagnnctgcagnncagcagnacgcnnnttctggnngcggggnnccccgnnccgccgcncnngccgacnccaagtagnnatagaatcccgtgcatnncgacccttttcnngtcccccccnncccctctcccttctctagnagnngtatctgttacctanttcaagttctatcattttcgagttacctanntcaagttcattcatntnncgagttaccctatcagagtnnntcatcaattncgnnagtcgnnnagttgagggcttaagggggagttacccgagntnncgacctggttgnntcggttgggtcgnntaatcaaagnagggtcnnaaaactggcctttgttggggatgttcgtntnnctcgatgccaaccaccttagttttaagttttcccct

SEQ ID NO: 87679 - DNA, 349 bp, Zea mays
  Clone ID: MRT4577_179964C.1
agacaatatctgatattgatgcgggaactgcgtgtgattagaagggttggaaataccctgttgctaatatttcacacttttttaactttggccttgatgaacataagtgtaaagattattgcaagcagcttgaccaacttctactagaatccacaatgcaattctatatacggttgtacgaaagtgtccgctcttaacaagattatgacccacatttgccacctgagcttgctgctgtgactggtcatacatacatctctgctgacagccgcaataaaatggttaacgtgcatacagattttattgcccatagaagatgtccggcaaacatactgacaccagttatgac

SEQ ID NO: 87680 - DNA, 257 bp, Zea mays
  Clone ID: MRT4577_179965C.1
atcttcgttcattgggttttttttttgttttttttttttttagggaaacgacggggatgcactggaacttcaaccctttgttaaatatttgcgcgagaagcctccaacagcaccaacaaaacttttgggcacgctgttggtgtccaaacaaaggacggggcttccgatcctagcaacgtacatcccggggagggggggacagggcacagggcacggggggcagggactcgtgaacccaccaactgggagctagagca

SEQ ID NO: 87681 - DNA, 246 bp, Zea mays
  unsure (1)..(246): unsure at all n locations
  Clone ID: MRT4577_179966C.1
ggagccggnaannagaccgaggcacngaacngaaggnnggncaaaggaacaaagacaggcggccaaaaaaaaagaaagacgancccggancacggncccaaacacaaagcgggcagggaggggaggncccccggggcgcaaccaagcgggagccacagccagaccccaaaagagagcccggagacgagaccaacgcacgccggcgacaggcgacaggncggccnnggcgaaggacggggccgaccc

SEQ ID NO: 87682 - DNA, 215 bp, Zea mays
  Clone ID: MRT4577_179967C.1
tagataatatacaccatattacacctcaacacacgtggattgaaatcaatactaagggggccaaacaaagactaaagcattttataagaatagaccaatataacacaacattcggggagatattcaattggccagttgtatcaagcttatcatttcggacggatcgtcctattttcggcctttcagatgaaataaattggtctagtttggaattc

SEQ ID NO: 87683 - DNA, 548 bp, Zea mays
  Clone ID: MRT4577_179968C.1
agcagtggtaacaacgcagagtacgcgggccttgttctctatatataaccatatataatcatgaatgctcatgtaatgcttatgaaatgtagtaatagaaaatgtttatcaagttgtatcttgaataaagttttccttcacggtactctaggaaacttaggtttttggagttagtattttatttcatagggcatacagtacttagaagattatggttttggggtttaggtatcaaacattgtccaaatcatgtctaacttcactcatgtgttctaaataccatattaggcttatccaaaaagtttggtgatttttggaatcttcaaataattcctaaaattccaagagactaggttttggctattttaaatacttcataattcctggtttggactaaaaatcttagacccatttttattaaatactatagaaacttaggagtccaacaaaattggtctcacatttttaacatttttctagaattttctatggatttccaaaaaaaaaaaaaaaaaaaaaaaaaagtactctgcgttgttaccactgct

SEQ ID NO: 87684 - DNA, 429 bp, Zea mays
  Clone ID: MRT4577_179969C.1
attacgcaacaaacaagaaagaaagggtgcgaagcaaatgatcatcaattgcaccatggatctgggcctactacatacgaggccggatgagcgatggtcatgaacctacccatgtccgcactcgagtaccaacttgacgcaacctgaccgctgcagccgtcgatgacacgtacttctcagtgggggcccgcgacgtgtcgtcgatggagcgcccgattctgccaccacgtacgacggtgttccagaccagccactgaaggcagacggtggaagtatacgaaggacacgacacgcttgccttaatcttgaacaagggcgaaatcaatgccgctgattccagctccatgatggcaggtgatatatactcacaatcctgtagaaaacattgaaataaaacctacatgctggggacaaaggctggaggtgcta

SEQ ID NO: 87685 - DNA, 185 bp, Zea mays
  Clone ID: MRT4577_17996C.1
accacacggaatatgcagccttacgcgtccttgcccagggcctttctgaattttagaagctgccaccagcccagggcaggatcagggaggcagggattgggggggcagggggaggtgtggggagaccccggacaccttgccatctggggttttccagcccgaggattttttttcccctaaggggg

SEQ ID NO: 87686 - DNA, 2797 bp, Zea mays
  Clone ID: MRT4577_179970C.1
gtgcggcgctcaggcggcggccggccgggggctatccccttcggcgccttcaccgcttcaaacctcgtctgatcctctcacctgctcaccgagtcacctgctgtccaaggctccaagcacccgccaatcggccgctgccgaacccgcaaccggaacctgcctccaggctgcttccacaccggtcgagggcgagggcgagggcgagggcgaggcacacgtcgcaaaccgcagtaacgcacacgccggggcacgccgcacggcacacaacaaacaacgtgccctcgccctgcagtctacctggttctattgtgccccgacagaagatcctgagagctagagctgtttttttccctacatatagttaagttaaattatctgcacagccgaagatgtccgcgatcatgttatgtacctgcagcggggaccagtccaagtttgaagatcttcctagatcgccagaatctcttgcaacacgtgacttttcagcgaattgctcttcttcaaagatggcaagtcgagaaacaactcctgatgacagccaagtaaatgaagtagaatcagacctaaaagaaaccctttcactaaattatgaggaggctcgagcattgttaggtagactggaacatcagagagggaactttgatgcagcattgcaagttcttcaggggattgatataagaagcctgagaccacgaatgaccactgctattgctgaaagtgtcaagcctagaatgcccccacgctcttcaagacgaaaatcttcacaagtgaacggaatgcttatgcatatgtccatgcattctgtaagcttgcttctagaggccatactgcttaaagcaaaatctctggacacccttggtagagcagcagatgctgcagaagaatgcagaaccatcatagacattatagagtctgcatggccatatggtgttccggatggtacttctgaagagtgtaagctaatagacatattccattcggctctagaatatcttcctaaactgtggatgaggagtggttgttttgatgaagccatcatcgcataccgcagagctcttgcaaagccatggaatctaggttctcaaaggtccgccaaattgcaaaaagagttggcagtgagtctgttgtactgtggcgttgaagtgaagttccctcaagaattttctcaggaaaggaatctggtaacccctgggaacaacttagaggaagcaattttgttattactcatgctaacaagaaagctatttctccgagaaatacaatgggatcctgaccttgtgaatcatttggtgtatgcactctcattatctgggcactatgaagttttggccagccatcttgaaatgctgttgcctggaacctataccagatcagagagatggtatatccttgcactttgctacagtgcagctggcatggatgacagtgcgttaaacatcataaggaatggtttttctgtactggagagaaagggaaagcctcatgttccatctcttcttttaggagcaaaactatgttgtaagaacccaaagcatgcttccgaagggataaagtttgcaaataaagccatgaagtctttcagaagtcgtgatctgcatttcatcagcactacaaaacactttcttggtgtttgttatggacctttttctaggtcctccacctcatacttggacaaatcgagactgcaagataatgcactgaggctgttgcaggatgctgccacaacagcgaagtataatcctgaaataatgtatagcctagcttgggaaaatgcgatgcagcgcaaactcaatgcagctgttgaaagtgcaacagaatgtcttgagatggtgatgggtggttctgttagtgcctggaagttactaattcttgtattatctgcacagcagaatttgcaagaagctgaagcagtagcagattttgcaatggacgaggctgagaaaaatgatcagttggatattttgagactgaaagcacaaattcaagcttcccgtggacagttcaagtctgcagttgaaacttttcgggttttgcttgctgctatccaagtaaagaaggaagtctggaaattgaccacttgtaatgaggttaaatgcctacaaaagttggagatggacgcatggttagatttggcatcaatctattcaaagcttgaggcatggcatgactcaaacatctgccttgacaaagctatatccattgatttctattatcccaagtgttggcatgtcagaggtcttctattggaggctcaattcttgcacaaggaagccctgatggcattctctttcgcgctatcaattgacccagattacgtcccgggcatggtttgtatggcaggaattctccgaaatattggaggggattcattatcaattgcaagaacttacttgcgcaatgccctccgtttagagcctacaaaccaccgtgcctggttgagtcttgggcttgtcctgaaagctgaaggatcgctgcaggaggccgcggattgcttccaggcagcatatgagcttagagaattatcaccaattcaggatttctctgagcaactcccgatcatgctgcattaggaatctatagcaaaggagttcacattttttgtggattttccccatagttgtcttagttattaacttatcccttgcaaaggtaggaaacatatgtttttgtgaatgtaaattagtccacttttgttcgtgaggaaatttactcgctcttgaaaacatcaaagttatataaaaaaaaaaaaaaataaaaaaaaaaaaattataattaacgaaaaaaaaaaaaaaaaaaa

SEQ ID NO: 87687 - DNA, 206 bp, Zea mays
  Clone ID: MRT4577_179971C.1
tcttctctactacacatagttgttgtgagcaattccaagtcgatgagcttgaggtacatgagcctcgtgggagcgcgtttggtgcgggagagcactggcaggttggtcaaggcgcatgcgcatgcggcgtacatggctaggagcggcggcagctgggctccggccggcggcgtcagtagagttctagatagcaagcgccgtttcgt

SEQ ID NO: 87688 - DNA, 364 bp, Zea mays
  unsure (1)..(364): unsure at all n locations
  Clone ID: MRT4577_179972C.1
cccccccccccagcccccaaaatttggggnanaaggngggggagaaagggggggggcggcaaacaggaacaagaacggggaaccaagccaagcagggnggacaaaacancggacgaaccaggggacacgacagacagggggcgcgcacagggagccacaacaaacaaagggggggggggcaaaaaaagaaaaaggaacggggcgggcgaccccgttaatgattttggagaaaggaaggggacaaaacnggaaacaaggcaatgaggaggaacccccgaagccaaaaaccacaaccagggaacaaagggcgggccagacagaaggggccggagcaaaaaaaaccccgccaaacagcaagggggag

SEQ ID NO: 87689 - DNA, 477 bp, Zea mays
  Clone ID: MRT4577_179973C.1
tcgtttcatcaaaaagctactaggtataaccatcgctcaatctattggccatggctaagactgacatgtacctacgagggcaccatctgtagtgcacatatccctttcgatgtagaaaatggaccctcctacctggggcagctgtcgctgcaacggatggttccagaatatgaaacaggcttgtcttggcgacaaatccgtggtgtgctagcttgcaacgagaatgcattcacatgtggaatacaacatgcgctgagggcggaacaactgactgcggtgacctactgacagcggcaacagttacttaatgcactagcggggggtaagccatggagcagtgcctgcctacaggcagcaacaattgctgccatacaaccagttctctttggtgaaccctgccttggtgtcggaggaacccatcgtgggaggggccatacctcagattgcatattagatgaactcgatgatggtgccctc

SEQ ID NO: 87690 - DNA, 457 bp, Zea mays
  Clone ID: MRT4577_179974C.1
gacctttgggctagattcagtgcatgagaagataaccatctacacaaatcacacacgatataaagagaagataaccatctacgcctagcaagccgtcccgactacagataagggcagacatacgctgtaccgaggtagttacgggaactataaggcgcaaatctctatgacctaaggtattcgattataaatcgaagacaaccactacgtggcgcctagacacggcgcaaatctctatgacgtaacccgatctcccgcatatcgtaaacacataaccactacgtgcgcctagacacggagtagcccgcgtatcgtcttatactatactcataatcgctcagaagaaaaaaaaagcgtctaatcaacaagtggcctccttaaacagaaagacaatcgtccaacccatcagatatacgctgacttttgctcgaattagtttttaagctcccagtcccgc

SEQ ID NO: 87691 - DNA, 287 bp, Zea mays
  Clone ID: MRT4577_179975C.1
gtcgtatgagcaaagttggtgtctgatcttttgactgcaagggaaagagatgaacagagacacaccagtgtatagggtatatgcttgcctgagcgtgttactgtcggaatggcaggaggtctgttgtccatggagtactcatggtcctctgtttttggcattataggcaacatcatctcatttctggtgttcctagcaccattgccgacgttgcttcgtgtgtacccgaagaagtcgaccgaggggttcagctcggtgtcagatgcggtggctctggatagctgtac

SEQ ID NO: 87692 - DNA, 231 bp, Zea mays
  Clone ID: MRT4577_179976C.1
ctgacgcctaatctgacgcgtgtgccggacagcagtgggctctgtaggactcttgcacaataatataggagaagatgaaaccacttgttgctttgaacgctctcgtcatgaaagccgaaactgacaaggattttcaacatctccagccactgtcacacaagaaagataatgagtaagttgtcatcaagctacaccgttgacttgtacttaatgctgtgatacattacattt

SEQ ID NO: 87693 - DNA, 356 bp, Zea mays
  unsure (1)..(356): unsure at all n locations
  Clone ID: MRT4577_179977C.1
ccggccgggatcctcccccttccttcctctcccttctcttctcttctcttcttcactttacaggacgatcgagccagttggaatcacacagtgctgatcttgacgaacatcatgaatctcggtggacctgtaatgcagacgttgcctattcttgattctcatcctgctcaacaggaaccaggaaaacgtcgatgtctgaatggatgacatcatgttcatggatgacaacatcatggagaacgtcacacagcccttcgacacggacaaggtcaacgacgagatgagctgcaagaagggaaagatcatctgcttatatcagagtcgtcaagncccacggcttctgcttcaacagagac

SEQ ID NO: 87694 - DNA, 321 bp, Zea mays
  Clone ID: MRT4577_179978C.1
caaaaagggaagctaaaacccccccctttattgccaggggcccatcacaccagactggttattaacaaaactttgccacacgggggaacaaaccccccgatcgatcgggccgggggggaccacccccacaacattttcacgactcccacgctgttagaactggcaactcctacggctacaaccggttagtataaaacacgggggcccccgcggggggaccagaacggcccccgttaaaaaggcgcgggccttgtggacctttttgcccgccccaaaagcgggggcccggcctggtttgggcttgggcggacccggggttca

SEQ ID NO: 87695 - DNA, 493 bp, Zea mays
  Clone ID: MRT4577_179979C.1
ggggacaaggatcacagttccaggctgggtcacgaaatagtttgagggaattggggccccttatacaatttttgggaaaaaaaacgggtggaatttaaggggactcctcttaacatggggcaacccaacattgcgggtgtaacagagaattgttcccaactttccagcagggagaatttcctaataatggttgaaagactggtacaaaggaacctggaaacatttttgggctaacctttttattagcagggggggatcccttattggggggggtgggccaaggtcaaaaaaaagaggttccgaaaacccttttggttgaaaagggggggcaaaaaaaaaaaaaaggggggttgggggccctcccaggaaattgcacaaaaccaagggattccgggaaaaaggggggccaaaaaaagtaaaaaaccccggggttaaagtggaacccgggccttgggctctaaaaaaccctttgggggtttcaaccgggggtggg

SEQ ID NO: 87696 - DNA, 814 bp, Zea mays
  Clone ID: MRT4577_17997C.1
cctcgaggccggccgggatccagtccttcgccagggaaccaaaaccgcagcggcccaccaggcgccaacagccgcaagctccgccgttcgcccaggcgcccagtcagccggccgttcttcttccgccgttcgaccagcggccccgccgtcgaggccaggagcccaggacccagccaccgagcggcctttaaacctcacagaaacattgggtgaagcaaatgagaaggtttttccagccactttcaagaggctctggcactagtgctaataataatgtgaataacacaccaactgttggagggacgttcaatccggatgacatagttgcagatcccgctttaaggaggcaaatttatgaatatgataaagatgtccaaaaccaagtgagaagggcatatgttctaaatggtccatgccaaccaaagggtttagatttccctcatagacagtatgaacaaagtttaaggccttttaaagaggaatggtatgacaagtatgattggttggagtatattgaatcaaaagatgcagtgtattgcttttattgctttctttttaagcaagcagtgaaaggtgataaatatgaagctttcactaaagttgggtataataattggaaagatgcagttgaaaggttgaatcacatggttgggtggtgttaacagtatccacaacaatgctagggtacattttgatgattttaacaaccaaagacaaagcatatcaactatcatgtctagtgccagtcgtgaggctgaagacttttataaaattcgttgacttcttcattggcttgttccagatttcttttgat

SEQ ID NO: 87697 - DNA, 583 bp, Zea mays
  Clone ID: MRT4577_179980C.1
cccgcgcgatcggcctgcggcagccctttacccgccccctttcggtgtcggtcctcctgccttcgtcgcccgcgtcggccctgaagccccacctgtctacaccgcggcgcagcgccctgcccggcgcgtgcagaaccgcccgctcgttccgtcgcccgtacacgcccgagtcgtacatgatccgcggcaggaggtcaaaccctcccggctccgtgtggggcccaacccaagcccgccgccccgcgcgccgcacgtcgaccgcgcccgccggccgccgcgcggccccgctcagctgcaggcccaccgccctcccgctccctccgtggcgcggtagaagcagaacaaggtggtggccgccgacgcgcacgtggccgaggccgccgtcctcgacgacccggccccgccgtccagagccacgaggaccgtggagaacatgaagcacgacgacgacgagcaccacctgcacaacacgctgctcctggactcgccgcagaactccgccggtcgcaaggccgcccccggcggctcccccttccggcgcgccggccttgtagagattgatagggttggataatgtgagcat

SEQ ID NO: 87698 - DNA, 665 bp, Zea mays
  Clone ID: MRT4577_179981C.1
attctactctcccgcgacccatactccgtgctcccaggatcaagcacaataccactcgtcgcctgcataccccacacagcagcaaatgacgcgcctatcgtgccgtgtcgtgagaacgcaatgtctgctcctgcgtaaagacgactgtcgctggtgccgagaataaggcaacgaaaaggatctccaaggctgggttgcactctcccgtcgctacgatcgctcggttctctcaaggccaggaagtaccccgattgtgtgggcgccggctaccctgtctacctcgcacctgccatgcgagtacctcaccgttgaggaactgtgagcttgctgctaacgcaacgaggaataacaataaaacccgcatcgtgccgagacacatccagttcagccgtgcgcatactacgagaagctgaccacaggtgcttggtgctgccaccatctcctagcactaccattatgaccaacatccaccgaaacctcctccccaagaagactgtcatcgtccaacgactctcgcagcgctcatgactatgacaactgaagctagccacactggagaagggattcgctaccggcttgattcctaagatgtagcaagcagttatgcgtcatgaccttgatatacctcgatgtgatcgtgaacgacaacaactcctttcttgctg

SEQ ID NO: 87699 - DNA, 660 bp, Zea mays
  Clone ID: MRT4577_179982C.1
ggcaaggcagcgtgagcttagccataccgtcgagagtgagggggacagtaagatgaagaggcaggtgtccagtacgaaatccaaggagctcagtggtcacgacatctttgccgatcacgaagatcccaagcccaacaggtcaaggagatcagactatggcagctctgctgctcagtcaccagtgaaaaatgcaagaccatgcccaagaaggattcagcgtctgcagagaaacagcctccgaaccgtgcgaggccgaaaggaatgagtggcagcagcaattttgcagacgggaaggcctcaacctcaacaaccggagatcatgaaggccgtcgtacccggcagcctcctggcggcgacagcagcattttgctgggctagcgtgcatatgaatcttgccctatgccgccgccgcacgggtggttggtccgtcagtctgtggtcttgttttcgtggtcaggccatgtgtcccatctccggtccttcagatgatctggttcgcatctgtcttgtgtatggttttgatatgtgttggttgtgacatgccccatggaacaaccctatcgctatgctgttttgttgtgtacaatggatgacgtgtgctgccgttttgttgtgtgtacaatggatatgtctggttgttgaataagaagaaattggtat

SEQ ID NO: 87700 - DNA, 217 bp, Zea mays
  Clone ID: MRT4577_179983C.1
tcggaccgccttcttcccgaccgcgcccttttctgcatggcccagctcttcatgcgctgctactggcacctcctaatccacacctgccacacgtcgcggaatccacgccatgggcggtatggcggctcaaatcccgtacaaggacgatgtggtgtcgaacgaggttgtactggagctggtgcgcaaggacaagctgaaggaggtgcgcgcggtccac

SEQ ID NO: 87701 - DNA, 1277 bp, Zea mays
  Clone ID: MRT4577_179984C.1
gcacgagccacctcctccacgctcatcagtcgagcctccgtgcacgacgcattcgccttgatctccgatccctaccttcattaggagagagagaggacaggagaggagaggggcagggagatggagagagcggcccccgtgaggagctcccacacctcgacggctggcctgctcgcgtggcctcaccccgatggcgccgggtcgctgccagcacgccggcctaaccagccgacggaggaattcaggaatgtggtgtttggggggcagctcacggagggggccgacggcctcaacaagacgaagaggaagacgggctcctcgcccaaggggaaggagacaacagggaccgggatatccaaggccgagagcgccgccgccgccgtcgcaactgcctcccgtgatcgtcaggctagccagatcaccttttcccaggacgggaccgttcctaccaggaaggcaacttcagtggctggggtggcaaggcagcgtgagcttagccataccgtcgagagtgagggggacagtaagatgaagaggcaggtgtccagtacgaaatccaaggagctcagtggtcacgacatctttgccgatcacgaagatcccaagcccaacaggtcaaggagatcagactatggcagctctgctgctcagtcaccagtgaaaaatgcaaatgtgagctccttctcgtttggagaggccgacattgacagcacagtgaaaacagcaaagaagaaagggtccagcaacttgtctactgatctgaacggcaagaccatgcccaagaaggattcagcgtctgcagagaaacagcctccgaaccgtgcgaggccgaaaggaatgagtggcagcagcaattttgcagacgggaaggcctcaacctcaacaaccggagatcatgaaggccgtcgtacccggcagcctcctggcggcgacagcagcattttgctgggctagcgtgcatatgaatcttgccctatgccgccgccgcacgggtggttggtccgtcagtctgtggtcttgttttcgtggtcaggccatgtgtcccatctccggtccttcagatgatctggttcgcatctgtcttgtgtatggttttgatatgtgttggttgtgacatgccccatggaacaaccctatcgctatgctgttttgttgtgtacaatggatgacgtgtgctgccgttttgttgtgtgtacaatggatatgtctggttgttgaataagaagaaattggtatatggtaccaaaaaaaaaaaacgctcgcgatctagaacaacg

SEQ ID NO: 87702 - DNA, 393 bp, Zea mays
  unsure (1)..(393): unsure at all n locations
  Clone ID: MRT4577_179985C.1
aaacaaatataaaaatattaccaaananaaaaacacagggcaaggggcaaaataataatgtatacatctaacaaaaccgaacaagatnaaaggacaagctaacaaccaagacaacactattgaaacaactacgaaaacactggaataaacacccaaatccaatgcaaaacaaagccaacaacgaaaaagaaagagctaactttacaaaaaattacaagcatggaaaaaaaagaacatagcataggataccaaaaaaactccagggtaaaaagaactcaaaaaaaacaccaaaaaagggaatgatcaaatctaggcggaaaagctcaaaaaaaaatctgataaaacaataaaaaatgcgatcaaagaacaaaaaaatagaaaaaaatagacaaa

SEQ ID NO: 87703 - DNA, 636 bp, Zea mays
  unsure (1)..(636): unsure at all n locations
  Clone ID: MRT4577_179986C.1
gtacgcctgcaggttccggtccggaattcccgggtcgacccacgcgtccggtggctgggaacatgctgctgcgagccgcttggaggcgggcgtcgttggcggctacctccttggccctgggaaggtcctcggtgcccacccggggactgcgcctgcgcgttgtagatcatggcccccattcgcctgttcactcagaggcagaggcagtgctgcgacctctctacatggacgtacaggccaccactcctctggatcccagagtgcttgatgccatgctcccataccttgtcaactactatgggaaccctcattctcggactcatgcatatggctgggagagcgaggcagccatggaacgtgctcgccagcaagtagcatctctgattggagctgatcctcgggagatcattttcactagcgcagctactgagtccaacaacatancaattaagggagcggccaggttctacagctcaaggaaaaaacgcttggtcaccacccagacagaacacagatgtgtgctggattcctgccgctccctggaagctgaggactttcgggtcactgacctncctgtgcagacgagcgggatcatcgacttaccgccgctcgaggctgctgtccagccagacacca

SEQ ID NO: 87704 - DNA, 209 bp, Zea mays
  Clone ID: MRT4577_179987C.1
ttttattttatgcaaatcaaatgaaatatgtatcgggggtaggggagaaatttgactcacgtatccgatatatttttgtcagatagaaagtgagcttccgttagaaaatacaattgaatatttacccagtttattaataatttcgtcatatttattaatattaacatatttaaatatattttatagttttattagctatttatttaaaa

SEQ ID NO: 87705 - DNA, 112 bp, Zea mays
  Clone ID: MRT4577_179988C.1
cacccgtacatctaccctgacgtacctagctatatcacacagctgctgcgggcatcttgacatggtgaggtaagccatacatctatggccccgtcaacgagcgaaagtgtcc

SEQ ID NO: 87706 - DNA, 1346 bp, Zea mays
  unsure (1)..(1346): unsure at all n locations
  Clone ID: MRT4577_179989C.1
attgggtacctcgaggccggccgggacaagatgagggataaaagaacagcgcaagtggagtgatgcagccgagggggccagaccagaggaagggacggcggggaggtggcaaggcgcagagagcaggttcgcttggcggacgcaccgagggaggcgtgtgggagccatgcttcttccctcttcgtcttcgtcttccgcttccgcttccaaaggtaactcctttgggaaaaccgttaacgatcatctgaggtcaactttgagttttgataacaagcaacctccatttgcgagtcaaaactttgactacggtcaaacaatagcttgcatttcatacccgtacaatcgttctggctcaggagatgtttgggcagcctatgagtcacgcaccagcactgccactgtgttccgttcccaaattgctggtgggggttcatccacaagaattcccttgcctttggaattagcagagaatgaacccatatatgtgaatcccaaacaatatcacgggatacttcgcagaagacagttacgtgccaagctagaggctcagaacaagctagtcagagcccgaaagccttaccttcatgagtctaggcatcttcatgcaatgaagagggcacgaggttccggtggacgattcctcaacactaagcagctccagcagtctcacacagccctcaccaggtccaccaccacaagtggcacaagctcctcaggctcaactcatctgcggcttggtggtggcgcagccgcagctggagatcgatctgtgctggcacccaaaacaatggcctcacaagacagtagcaagaaggccgtttcttcagccctcgccttcactgcgactccaatgctgcgcagagatgacggcttcttgcagcacccaagccatcttttcagtttttctggtcattttgggcaggcaagcgcgcaagctggcgtccataatggaagtcagcatagggttccagttatgagatgaccggtttgcgaaccatagctggtaacgcagtcgcggggtctagggtcaacttcgctgtggtgtcttagtctctcaggcaattcatccttggcttaatttctggctttttattagaaggtaccaaaatgtgttccataccgttgtggccacagagcccataaaccagggggtttgatggttggcactcctacccaaactattgtcttgttgcagtggtgtttgttagaataaaccttgactattattctgtnnaaaaaaaaaaaaaaaaaaaaaaaaaaaaaaaaaaaaaaaaaaaaaaaaaaaaaaaaaaaaaaaaaaaaaaaaaaaaaaaaaaggactttgngttgttaccactgtttaaggg

SEQ ID NO: 87707 - DNA, 920 bp, Zea mays
  unsure (1)..(920): unsure at all n locations
  Clone ID: MRT4577_17998C.1
ttcttttctttctcctccttttttcccccnntntccnttttttttccccnntttccaatgggtacctcgagggcgggcgggaacaactattaaggctggattgtagactgcccccgccctgctcgtaacacccgccgctccgctgcccgccgcatctcacgctgcaaatcctgctcgcctgtcgccgcttctcccgcacgcccgctgcgatgcacgcctgccgcctccctccgcccgtccgctcgcccgccgcaaacctcgccgctacctccctacgaaagtcgtaaccgccgcaaatcccgccgcaatccgatgcccgcggagcaacaaacgcccatctcgcgcaacagacgcccccacgttgtgcatgtcgctgccgcctccgacgcctgcggagcagctcatgcccccacccatctcgcgctgcctccacacatctcgtgccaccatcaaaccactcgcccgccagatttgcctctctgtgataagaagttttcccctcctttgctacaactccattttactgcgttctctggctccatccgcaaacccagctgcttgagtctggaggttgatctcccaagttgtagtgaagaaccaacttgattctttcttgccggcatgtcctgcaaaaggatgggctatatgctttattcttttaaatatctatacacttgtgattgtagattgaaaccacacgaaaagaatgggcattcatgtttgaacgtcaaccttgttttgctgctccttacgaangtcatgatgtatttttagttcatgagcagtgtgggtcatgatgtatttttagttctattgccaatgtttacttgtgagacttgtagttcatgatctatttttaagttcacttgggttttgcgccatgattggtttggtcgtaatgtatcttcaacttgctactc

SEQ ID NO: 87708 - DNA, 372 bp, Zea mays
  unsure (1)..(372): unsure at all n locations
  Clone ID: MRT4577_179990C.1
gggtccctcgancctgccgggtgctttctagagtaggttggcttctcctnccanatccgttcgggttcgggttcgtgaggttctccggggttcgatttcgtgggtgagcggatcgagatggcggcgtcgcatgtttaataccgccgctctattggtgccagaggctatcgcacgcccatacactcagtagacaccaccgccgccaagcatngcccacgtcctctcctttgccagctggtggggcgccgccctctgggccagcttcatcggtggcatcataatgttcaagaacctgccgaggcacatgttcggcaacttgcagagcaagatngttcccgcctacttcacgcttatatatccatgcccaagcat

SEQ ID NO: 87709 - DNA, 316 bp, Zea mays
  Clone ID: MRT4577_179991C.1
caggcccaataaattttaataataactcaactgtaaaaaaaggataatccttgtttaaaatttgaaaattacttgggggcaaggtcccaaggggggaaaaaaggggggcccatttaataataaggggtcccccccgcccaagtaactttttgttccccagttgaagggccttattgcctaacttatgagcaaaacttttgtttcatgaaaaagacattggactcaggggtcaggacaggtcttttgtttttaaacatttttgagccccctcagctgccctttgggctaaaagaaaatacaactgggggggcgtttt

SEQ ID NO: 87710 - DNA, 192 bp, Zea mays
  Clone ID: MRT4577_179992C.1
aacaagacgttccaggcctgttcgatccaggtgaattttgtctaacaggcctagacgctatttgatcgcgctaccgggacgttatttgataacagtcgactggctgaaacacaggcaccacggacacgggaatttcatatgtgagcaaagtaccagcacaagtaaaatttgccagaaagggtatactacggg

SEQ ID NO: 87711 - DNA, 275 bp, Zea mays
  Clone ID: MRT4577_179993C.1
gtcgtgctactcatattcatatatgaacgagtaatatacccagggagaaccatgggcgacttggaagatttaaatgtatgatataggatcgaaatttgagattaaaacaagtcaagtgcaagaatctataaatttggagttaaaggtctaccagtgacactacttagaggaaatgatctatactataatacaagagagcgggtaggtatgacatccaaatggaggagaaaaatgaataatctagtagaagatctaatcatgcattgatgaaactg

SEQ ID NO: 87712 - DNA, 462 bp, Zea mays
  Clone ID: MRT4577_179994C.1
cttgatattggcggtgcaatccttgtgcgaagtggaacagggcgaaagaacatccatcagtgtagttgggtactaaacgctgtgcagtaacatctttacacatcaaagacatggtacgtgtcgtggcggcagaagacatttaacaggttgcacctgcgattatgacctgagcttcaatgatacattcggagctgctaaacaggtcgcggttgacattcatggtagggcttaagccttgctcgcaatggtggtggacagccagaccacgccttcatacagaccctcaggcagttgtgggacaaatgctgtgcatgtaccagtgtccgtgaggcacggagtgtgatccaaagttgtgagcaaactcagaagcattcatggaattgggaacatgttgtttgtatgctgaaacaagcatcgcacggtgacgtagcttatactggctcagcatactgcggtgcttat

SEQ ID NO: 87713 - DNA, 228 bp, Zea mays
  Clone ID: MRT4577_179995C.1
gctgagccctgtcccgaggtgcctgctgcccattctgccagcatggtgcacctactgcttattaggctcgctagactgcaatccaggtgagagatcaccagactacagaaggtgcgcaaggagatgagagagatagcaggggggctagctagctgacctcgagccatgaatattggccgtagttggcagcagcatggtggtgccggttctggtgctgagccccatgat

SEQ ID NO: 87714 - DNA, 1161 bp, Zea mays
  unsure (1)..(1161): unsure at all n locations
  Clone ID: MRT4577_179996C.1
aaacttcaaaaggctttttcagctgccatcgtattagatataataaataaaattcgataaactatagatacattaggaggtatagatggttctgacaaatttgactttaaaactaactcttaactcagtatcatattaactataaaatttattgcaggggtaggggatttgggcggccgtgtggcggagccgaggagcacgtcgctgcgtcaggactcaggacgggagaataaagagtaaacaaacccatccgcgctgcaacagtgcggtgtttgtgaatgcaaaatctagccagacagctgaggaagggtgaaagcctccttgttcctgtagactgcagtgcgaggaggaggccgccgcatcctccccttccaaaccactccactccggtccccatcccacctgcgccagcttcgtcttgctttgagctttcgcccgccggcgatctgctagctatctcgctcgcacgtggtgcctgactgcctggtggcggtggccatggctgccccgctgggctttttctgcatgctgctgcttcttcttcttcagctgggccactcttcttgtaacaatgtgtacattgtgtacatgggggcgaggaatcccgagctgcacccggcgctggtccgggacgcgcaccacggcatgctcgccggccttctcggcagcgagcaggcggccaaggacgccatcctttacagctacaggcacggcttctccgggttcgccgccgtgctgacggacagccaggcggcgcggctcgccggttcgcctggggttgtgcgagtggtgcggaaccgtgttcttgacctgcacaccaccaggagctgggacttcatgcgagtggatccatcgcattcggctggaatcctcccagagagtaggttcggtgaggattccattatcggtgtgctagacactggaatctggccagagtcggccagttttagagacgacggcatgagcgaggctccgcnggcggtggaaagggcaatgcgtcgccggggacaggttcaatgtttccaactgcaacaggaaaataatagggcgcgaagtggtacatcanagggtacgaangcgagttaacgggaagatgaacaccaccgacatctacgagttcatgtccgncgagagacgcccgtcgggcatggcacgcacaca

SEQ ID NO: 87715 - DNA, 113 bp, Zea mays
  Clone ID: MRT4577_179997C.1
acagggttcatacaaaacagggacatcacttatttagctatctatatatggacagctggctacaaatatagtagaacttttagagcattagcagggtatgctactatatgtac

SEQ ID NO: 87716 - DNA, 244 bp, Zea mays
  Clone ID: MRT4577_179998C.1
ggccgcccttttcaatccttcggcagagcaaatcacgaccccctatacccccccgagggacgctactctttccccgatgctggtcacaaggacgtccttgagggtgcccactccccgaagcagcgtctgcggctgcgctgatcccccatcaccactctcgcacccctgccacgctacaccccgaatcggataccccaccgagcttccaggtgagcccgcagccgcacctgtcccccccttcacc

SEQ ID NO: 87717 - DNA, 586 bp, Zea mays
  Clone ID: MRT4577_179999C.1
actcttcacccacattccacagccgaacggagaggcataatcgctagcaccgcacacacgatggcgaatatcctcgataccgtaaacgtcgatatcctcctccagagccggatcgccgcgcaggaaagccgtgcatcgtgcaagatatccaagagagcatcagcgatcgcccctaggggaactgtctcaacatgatgctcgccaaatatcccaatgaaggtggtccctgagcactccgaccggaaaacggacaaaaatccccaccacaagtgcttcatcaaactcgtacacttcgcggacctcatggacacttcgctacactttcaacgtctcactttaaggagcgtcgcatcgcgttgggcccgactcccctctccacccgattactggaaggaccaatcctgcaatgccgatgaggggcacctcgaggagactatccagaccgagattaaccggtggctctttactgaactctcgtttctagacggctccgcgtccctcatagtgctctgatctagatgtcaatttcttgcacctgagactctttaacgtatctctgctttgatattgaatgaaagcttcgtgc

SEQ ID NO: 87718 - DNA, 254 bp, Zea mays
  Clone ID: MRT4577_17999C.1
gggggaaaaatgggccaatgggccgggacccctgggctttctagttttttttttcaaaactttataaatttataaaacccccttttgctttttttgggtgggaaacccggtttcccaattccagggggcccattccttttaaggaattatttttttttccccgggcctgggttggcccaacaacattatgccggaacccattttaattcggcgggttttcaaaaaacttggggcccacaatttcaggggctttt

SEQ ID NO: 87719 - DNA, 273 bp, Zea mays
  Clone ID: MRT4577_1799C.1
acacgcgacgaaacggtccgggacctgcgacgtggcggggccgacccggcctattcctcctcacccgagccgataaaaagggaaccctaggacctcggctagcaaacctaacccctgcaagcaattggagctccggtgatagtcaagtgcacccgagagagagaggagggagtgtggagcgggagccgcagagccatcagctcgttgtcggccccatctaggtccggatttgaggattaggagtttcgcccgtgcatgctgaaggtgtgggtg

SEQ ID NO: 87720 - DNA, 605 bp, Zea mays
  Clone ID: MRT4577_179C.1
agcccaggaccgcataggtgcagagacaggcgtcttcgcactcgcctatctccgcgactcaaagcttcttccatttcctaccgccgccgctgcagctccaccccattctcgtcgacaccatgcagggagtgcatactcgatccacatcggccaagccggtatccaggcctggaaacgcgtgctgggagctctactgcctcgagcatggcattcatgccgatggacagatgcccggtgacaagaccattgggggtggtgatgatgctttcaacaccttcttcagcgagactggtgctggtaagcacgtccctcgcgctgtttttgatgaccttgaaccaactgtcatcgatgaggagacgactggcacctaccgccagctcttccaccctgagcatgttatcaggggcaaggaggatgcagacaacaacttcgctcgcgatcactacaccattggcaaggagattgttgacctgagccttgatcgcatcacgacaattgcggacaactgcactggtctccaaaggcttcctcctcttcaacgctgtgtggcagatgaacaggctctggacttggctccctcctcctgcagcgactggctgatgact

SEQ ID NO: 87721 - DNA, 375 bp, Zea mays
  Clone ID: MRT4577_17C.1
ggcaatattcctgcaagagcatgataacattagcgcttttagctatgacaatgttacacctggacgtgcacatgagttagatgaaaagatttggaaggtgtttgacaccatactgtgagacactgacatattgagggaaagcaccaatgaaaatatttctattgcaaaggccatcgcaattgatatggatataaatccacaattgaagcaagaacggattgcttatgaaactcttcagtacgattcgtgccgtatggaaggatggtttgccactgacgcacattcaatttcactacagggctgggatcaagaagtgctgctttcatatggccatggccttatggttcgtggatatcgtgcagttataaatactct

SEQ ID NO: 87722 - DNA, 914 bp, Zea mays
  unsure (1)..(914): unsure at all n locations
  Clone ID: MRT4577_180000C.1
gggngaaatttacctttctggacaatcccaaggatctaggacagtgcagtaacctcaagtttctcaacctcagctcaaatagattatctggtttactggataaggatctatgtccgcattgtatgactgtattcgatgtcagcggaaatgaaatttcaggatcaattccagcatgtgtgaataaagtctgtacttctcatctagtgctggataaaatgtcatccagttattcttcattcctcatgtccaaaactctacaagaactgccatcagttttttgcaactccggggagtgttctgttgtgtatcataattttgcaaagaacaaccttgaaggtcaccttacatccttgccatttagtgctgacaggtttggaaacaagacgtcatatgtgtttgtcgttgatcacaataatttcagtggatcgttggattcaattctgttggaacagtgtagcaacttgaaggggttggttgtaagcttccgagacaacaagatatctggtcagataacagcagagtttagcagaaaatgcagtgctatcagagctttggatttagctggcaatcaaatatcaggaatgatgcctgataacgttggtttgttaggagcccttgtcaagatggacatgagcagaaattttttggagggtcaaatacctgccagtttcaaagatttcaagagcttgaagtttctctcattagctgggaacaacattagtggcagaataccatcctgtttgggtcagttgagatcactgagggttttagatctctcatctaattctcttgctggtgagatcccaaataaccttgtgacactaggagacataactgtgcttctactcaacaataataggctctctggaaacattccaaattttgcctcttcaccatcgctgtccatattcaat

SEQ ID NO: 87723 - DNA, 251 bp, Zea mays
  Clone ID: MRT4577_180001C.1
caataaagacataaacacatgtttgtatgatggtagcatatatgtaaatctgaatttttatgccaacaatcatggttcaaatctccatctatgtaaaaaaaatatatagcttcaaaaaagctaaaaaactaataacataaacaaactagacctacgacaaaaataataaacaacaaaataaatggccggcctttttacaggacccaaccttcctaccccgtcaatgcaacttaatatgtttccaatcggag

SEQ ID NO: 87724 - DNA, 179 bp, Zea mays
  Clone ID: MRT4577_180002C.1
aacgaatagaaaagattaagcttctatataatcattttctacacaattgatatagtagattaacatcaaactctacgtagatgtgaagataaataatgtggtaaaagtttgatgttaatctactatatcaattgtgtagaaaatgattatatagaaacgaatagaaaagattaagcttc

SEQ ID NO: 87725 - DNA, 323 bp, Zea mays
  Clone ID: MRT4577_180003C.1
aattcggcacgaggcacaatcgcacctaaccatttgcactaatctccctgcggcgaagccgatcgaatcaagaccaaccgaggacagcgcgcacgcgcagtgactgtcggcgatggacagcctcaccctgacaccggcgccctcctatcgaccctaggacgccatcagacctccaaaatgtcttcaaagggttctggtgtgactgttcatcagagagaaacatacttactcatcttgattcggtgctaggcgtactcatttaacaagaatacagaactatgtatcatgaggaactctcccacacgattgtatctggactcatg

SEQ ID NO: 87726 - DNA, 335 bp, Zea mays
  unsure (1)..(335): unsure at all n locations
  Clone ID: MRT4577_180004C.1
tttattttnnnnnnaaaannnntnnnnatttgttttttttgaggggntttccccctttttaaccccaaaaaggcatgtttaaaattacacccaggacccccaccatgtttacattcaaaacattaacaggagaggagggggatctaaagcgagaggccacccgactcctcgtccttgtcaagggcaaaggggtaaaagggggaaagggaccaaaagaggcccaaaacccccaggaggatcccccccaacaggttgttgctgagccccaggcttaacccggggccccccggggaaatgcgctcggacacaaaccccagggggggccccccccaccc

SEQ ID NO: 87727 - DNA, 297 bp, Zea mays
  Clone ID: MRT4577_180005C.1
gagaggcgggcgcgcggcctgtcgtctgtatgttccgttggtcgccagccgacgaagacgatgcgcgcgggcgacccagctgtgctgcagacgaacgtgcgggaggcctcgacagtggcgtgcgctggcgacgcctcgtcactggcaacctagggctcccgcgtagaccgacggggactgacgccgagtcagcagagccaccgtcgcctgctaaagccccaccgacgtctcattcaccactgggggaggggccttgtgccggcacgcacaagtctggtggtccgacagacaacggct

SEQ ID NO: 87728 - DNA, 310 bp, Zea mays
  unsure (1)..(310): unsure at all n locations
  Clone ID: MRT4577_180006C.1
atcccctgcgcctgccctcccctcctgcagcgcccgtcgcctccctttccccttccctccctccctctccccgcgggcnncgccagaggcaatttcgcccttcgattcgacccccgatntcgtccgccccgcgaccggggatttcccttccgcccaagcgcgggatctgaacgctgcgcttcgtggtcgccggttcgataccgccattgaggggggcccaaattcacagggcgccccgccagggccgatggcaacctggcggggaaaacaaggggggcggaaaaccccgccagggccagaaagggaaggc

SEQ ID NO: 87729 - DNA, 276 bp, Zea mays
  unsure (1)..(276): unsure at all n locations
  Clone ID: MRT4577_180007C.1
cgtggagtcccccagatagaggtgacctttgacattgatgctaatggtatnctgagcgtgacagccactgacaggagcacaggtaaggctaacaagatcaccatcaccaatgacaagggccggctgagcaaggaggaggtggagaggtggttcatgaagccgagcagtacaaggctgaggatgaggcccagagggacagagtggctgccaaaaactcgctggaggcccatgtcttccatgtgaaaggttctttgcaagaggaaagccttagggaca

SEQ ID NO: 87730 - DNA, 272 bp, Zea mays
  Clone ID: MRT4577_180008C.1
gctgataatgagctagcattacgagcggttggtacttacagtttgttcacttgtggcagtgacagtagttaacacgagtaacaaatgtatcttagagatcaacataaccaaaatttgctcctaaaacggaaatcaatcttttgggcgcctacgcacgtgtgagatgatgggaacggagtgttagacgctacactactgcttgggccctttgggtgttcgaatggcctacttataaccttacggcgccttcaacgtagatcctgtacacgagc

SEQ ID NO: 87731 - DNA, 791 bp, Zea mays
  Clone ID: MRT4577_180009C.1
cccgaatacttggcgcggccctcgtccgtgggcggcgacgccgtagcttgtttcaaacatacagctgtggtgcttcgcgcagaagtcgccgaagccgtcggagtgcaggaacttgagggcccatacgccgtcggcgacgaaatccaccccggcgctgcgcggggaaggccttgagctgcagctcgggcccgaccctggcccggatcttcgagcccacgacgaggcaccacggcccgccggcggcgggggcgtcgtcatcctcgtcgtcgccgtcgccggcgccggcgccggcgcgcacgaaggaggcggcggcgaggcggtcggagacgatccacttggcggagggagaggagccgccgatgtggaggtagagcttgacggcgttgagcgcggcggggttagcgctgggggtgggcccggagctagggttcggggagatgggctcgttgtacttgaggtggagctggcggaggtggcggtcgatggcgtcgatggaggcgggggtagccgcccctgcgccgctggctaacttggaggagacggaggccgggggaggcgtgccgtagtcggaggagttgtcggaagcccggggggactcggcgtcctcggagtcagagtcggataggtcgaggtcctcgcggctgtgcgaaccccccatggcggcggcggctgcggcggttggtttcggcgagaaggtgaggatggaggagcggaggaggagcgtgcgggaaattgaaatttgggggcggtgatgaagagatgggggccctctggccgtttgccccggccgg

SEQ ID NO: 87732 - DNA, 312 bp, Zea mays
  unsure (1)..(312): unsure at all n locations
  Clone ID: MRT4577_18000C.1
gtcaacttagtacgcttacgatccacaagaagcacatataacacaaccaaaaagatgaaagctcngagtaaacgtgcatcttgccacaaaggcgctcaaaaggaatgccaccctgaagagaagaaggctgatattagtcaactaggtggaagtagagatagcctcagcccaaaagtgagggtatatatacacaggtaaatgagggtaaatatgcactaaacccttcataaaatggggatacacaggaatacatagatatacatataacaatattcatcagacgtctacatgcatatacttgagcctactcag

SEQ ID NO: 87733 - DNA, 388 bp, Zea mays
  unsure (1)..(388): unsure at all n locations
  Clone ID: MRT4577_180010C.1
aaagaaaacaacggggggcaggcgctacccggacgcacaaaaagacccacaacgcaccaagcaccngaagccaaacacagacaaagccgacgcacgccgcaggacccaacacaataaccagaaggcgaacacccggggggggggggccccaagcaaaagaacacacagaaaggccgcccacgggagcctgaaaacagacaacgcgcagaccgcacgagaaagggtccgcgacgggcaagcgcgaaactagggagctttatatgcatgacatgaactggcatgcatagaagcctgggggggcacatatcgaaggaaagacctgccaccctggatacaaggcagccagagcaaggggcaatcatgcaaacaatgggaaacgaaaaagcaa

SEQ ID NO: 87734 - DNA, 302 bp, Zea mays
  Clone ID: MRT4577_180011C.1
gttttatacaattttaaaacatctagatcgcaagttcgtgatcatgtttcgtgagcatggtttgcggaaattccaatctgtttatgaaataggtcgtaacttgtgctaaataacatgaataccatttttgcattcgcggtttttcatttttcaagtgacttgcagttcaaatctgaattatccgaagaaattcaattaaacgaactaaatctaatagttaaagcaaacactttgataaatgtgccaaaattgaacatgtatgtctatatactgtaggaacacatcacaaaaaggtttggggg

SEQ ID NO: 87735 - DNA, 445 bp, Zea mays
  Clone ID: MRT4577_180012C.1
gtgagggactatgcaaaggctgtgatgtttcagtaatgcatcctccccgttaccaagactgaggaggaaaaaggatggctggacatccggaggtgggtgatcccgaccctctgtgttcccaaaacactacattacccaatactgttaataggccccctgggaccactgccgattattgggttgaaaaaaacctgaactttggttgaaatgggaccgcatcaaatggctctaccataaatagcttcaagatgcgagcggccctgaactcatggtcgttgcaacggccgggcttgatgacggagttaatgtggcgcttctttatggtggactgcccgttgcgtaaccccttgttggagtaacgcacctcattgtgcgggaggtacatcgtgggcttggtttcctggacagcgaggtacttggtcacagagatgaggaggacctgggc

SEQ ID NO: 87736 - DNA, 1338 bp, Zea mays
  unsure (1)..(1338): unsure at all n locations
  Clone ID: MRT4577_180013C.1
cgttcggnactagttctagnatcgcgagcggtaangttagtggcttgttctaagggaagtggtnagctgttccagtacacnaaagaaggggagatttgtgtaancccgagctctttgatcaagacggtgtggccaaagtcaatcctttgagaaaaaagtcattgattttcgttggctatagtgatcagcacaaggggtactgctgttatgatccccgcacgcagactcatctcaagacatgtcacatttgatgaaacacgatttgcctcgctaccccatgcgcctcttctcggggagagatacacacacgcgcgatgactgctttgccaccgcccactctatgtgctccgattagcgttccgacgcctggcagtgcacacggctcagattcggttgaccacgctcacatccgcttcagacataaaggaagcagtggtaacaacgcagagttacgcggggtcccatgcttttcgtttttcttctcgtgcgttaggattgaaacctaagctaattaagctactatctctggctctggagaatggtatccgttcatttctgcctgtccataagcgtatataggatgaagtctaaacgaatcaacgaaaattacggttaaggcatttgagaatattagcattgggcactctaactcgaaggaagaagccgaagccagtccagtagctcgaactctgactatctacgaaaaagatggcattctcccttaatctgccttgttttgagaagcggggaggtagttttgtcaagctcgttaaacgcaacgacagtcaaggctaggaagatttcccaggccagccaacaaagtgggatattctttggaagaaagcctgtattgtttgacaagatctttaggtcggtctcaacacgttggcatcttctattcctgactcattggggatattatgccttttgcttgtcagaagtagaccgacgatacggactaaagtaagtcagatctccaaatatttcatcatactcagtcctgaaagaacaagcaagggatgagcgcacgctggtagtagaaggaagcggagatggaggcagctaggcatcagtttgagttcgagatcgagaccagcttcagccactattgctaggacgggcttacttagactgagaacagagattcttttctctgctatgctactttcctctttcttccctgagggcattcctttcctgaacatagagccaaacagtcttgcccggaacccccgattccttcccttcttgaagaaaacgataccgagaaggcaatagcccttggaaaaaaaaaaaaaaaaaaaaaaaaaaaaagtactctgcgttgttaccactgct

SEQ ID NO: 87737 - DNA, 519 bp, Zea mays
  Clone ID: MRT4577_180014C.1
ggccgctttttttttttttttttcgttcatcgacaccaacatataccacatggtagtagtttctgtttcatggaaaattttttttttttttttttttttttttttttttttttttttttttggaccatcgaccccaacatataccacagggtagaagtttctgtttcagggaaaaattttttttttttttttttttttttttttttttttttttttttttttttttggggcaacgcccccaaaaaatacccaagggggggagttttgggttaaaagaaaaaatctttttttttttttccttttttttttttttttttttttttttttttttttttttttttttattttatttttttttttttttttttgggagaaaaaaaaacccctccccttttttttgggaaaaaaaatgggcaatatataacccattccgaaaaaaaacaatttcttttaaataaatatgtgaaaaaaaatgggtgccctccataaataatcaaggtgttttagagcatcgttttt

SEQ ID NO: 87738 - DNA, 225 bp, Zea mays
  Clone ID: MRT4577_180015C.1
tcatgcgttggctgactagtagggaaatgcctcgtgttctctccatgatcaagaaagcaacgctcatccagaaagggaccttacctgacgtgtcgtgagctatgtattcttgcctttgatgccaatgcttctctgtttatggaaaccctgactagatattaatgattctggaaatatcacagtgtggctaaaggactacctcttccggtcagaatatcggggact

SEQ ID NO: 87739 - DNA, 382 bp, Zea mays
  Clone ID: MRT4577_180016C.1
accgcagtccgcaccggacctcgagaggggaggagaggagatgggaggggtcaacgaggtgggagcagacaggaaggctcggggctccttcctcctataaacccaccgcacctgccttagaggctcccattttctcggccgggagccgcaattccatcctgctgctaggtgatgaatgtggctgtgtcggccatggagcagatccccaaggcattttttgtgacggaccaatagcaggatatccccatgacatctgtggtggcagcatcaacagtgtcatttgcgctgacatcagtgtaggcatctgagacggcatctgcgtatgcatttgaggcatcatctgcgaagcatatacccacgacattgttgggacatcatttgg

SEQ ID NO: 87740 - DNA, 946 bp, Zea mays
  Clone ID: MRT4577_180017C.1
tgtctggtaattggaatgagtacaatctaaatcccttaacgaggatccattggagggcaagtctggtgccagcagccgcggtaattccagctccaatagcgtatatttaagttgttgcagttaaaaagctcgtagttggaccttgaaggcaacttgttaggaggatggattgcacatagtagtccaattctgagtatggctgttggaggttcatatatctttacactggctggtcatggaggaatccgtggatggaacttggcatcaccagggcctcttgacaacattttgcgctcagagttgatggagaaagattcatcatacaaaagttttgaatacatgaaagtattagtgggttcttggaatgttgggcaagaaaaggcatcctacgagtctttaagagcttggctaaaactcccatcgccagaagttgggttggttgtacttggattgcaggaggtggacatgggtgctggttttcttgcaatgtctgcagccaaagaaacgggtgagaataaatcttaagcagttcattggagacattgagaatgcggcagtgccatgtggattagggcgagcaatcggcaataagggtgcagtaggcttgagaatgagaatacatggtagaaacatttgctttgtaaattgtcatttttctgcacatatggaagctgtgagcagacggaatgaagactttgaccatgtctttagatcaatgacattttcttctccttcaaatggattattgacaacatcagtttctggttctgctgctcagcttcttcgaggaacaaatggatcaagactgcctgagttgtcagatactgacttgatcgtgtttcttggtgacttcaattaccggctttataacatttctttcgatgaggcaatgggcttggtttccccgcgatgctttgactggttgagagagaatgatcagctgcga

SEQ ID NO: 87741 - DNA, 642 bp, Zea mays
  Clone ID: MRT4577_180018C.1
gtaccctcgggttcggccggtggcatcaccagggcctcttgacaacattttgcgctcagagttgatggagaaagattcatatacaaaagttttgaatacatgaaagattagtgggttcttggaatgttgggcaagaaaaggcatcctacgagtctttaagagcttggctaaactcccatcgccagaagttgggttggttgtacttggattgcaggaggtggacatgggtgctggttttcttgcaatgtctgcagccaaagaaacggtaggactagagggaagtacaaatggagagtggtggttggatgtaattggccagattttaaaggttcattcctttgtgcgtgttggttcaagacagatggctggattactcattgctgtatgggtgagaataaatcttaagcagttcattggagacattgagaatgcggcagtgccatgtggattagggcgagcaatcggcaataagggtgcagtaggcttgagaatgagaatacatggtagaaacatttgctttgtaaattgtcatttttctgcacatatggaagctgtgagcagacggaatgaagactttgaccatgtctttagatcaatgacattttcttctccttcaaatggattattgacaacatcagtttc

SEQ ID NO: 87742 - DNA, 1773 bp, Zea mays
  Clone ID: MRT4577_180019C.1
gggtacctcgaggccggccgggaggagtggctgaggtgttatgaatgattcactccgacgcctcccctgccgctgccgcaactgggaggcggtccctgtcgcgcgcgacgacgagccttcatgacggggacacgctgctgattcatagcgcaccacccgccgcctggcgcgtctgctcgcggccgatacctccgcggccggcggcgatgggccaggacctcgtcgagatccatccgagcgagctccagttcacctttgaggtgaagaaacaaagttcatgtgtcgtccacctaatcaacaagtccaacgactatgttgctttcaaggttaaaacaacatctcctaaaagatactgtgttcgaccaaatactggggttatccttccaaggaaaacatgtgaattcacagttaccatgcaagcgctccgaactgctccgccagacatgcaactaaaggacaagtttttggtacagaccacaattgttccttatggtacatctgacgaggaactcgttcctgcctttttctccaaagaaactggcagatacattgaggaaagcaaattgagagttgttcttgttagtgcataccaatcccttgaagagcaaccgactaataaaattcatgacactgagccagttgttgaagttcctgtactgaaagaggtgccaaatatagagaacgaagtgccagatgctgcaaaagaagtttctgcccctctggtacaagctccagcgattgtgactggaataccttcacctgtcgaagagactcctggcctgagagaatttcgtgtgccgccgaatgaagcaccagctgtattggaagaatctccttccgctcaaaaagacccttctgctattacagttgaacatgcctctactgttacaattgaacattcccctactatttccattgaatcctcccctcctttgaaacaaagtgtcacagtttttaaggaatctcctccttcgaaacaaagcattgcagctttcaaggaatatcctcctccttcgaaacaaagcattgcagtttttaaggaatctcctccactggaggaaactagtcctaaagaagctgttgtgctaagtgaccgaggacttttcagtgtgcagaaccatcaattatctcatgtaacagaagatgttcagaatctgaaatcaaagctcaacaatctcgaatcaaaattggaagaggctggaaagatgataataaggctaaaagaagagagcagaagtaccacccaggagcgggataagctacagcaagaaatggtattcctaagaaagaagggaaccccaaggagtcaagtgggtttccccttgctgtttgtggtctacgtcgcgcttcttggtaccttactcggttacctgctccgtctatgaattcagaactctaagaaaacaaaaaagttcagcagctgggatgcctcatatgcggcaagagaactgaattgaacggcagttgcactctaaaatgttggagaggtgaatttatttgcattattagttcaggacttcgtatggttttttgcacataacagcagtaccaaactaccagcagttgcgtgcatatatagaacagtttttttttttttttggcgttgtatagaaccgacccaaaagatgcctgctgtcttgtagactaattatggggattcttcctatgcctaagctttctcttttcttctgtctcttttacagtttgctggattcgcttgtcctgaatcggtattgaactgtcgtgtgactatttacacctagtttccctccc

SEQ ID NO: 87743 - DNA, 204 bp, Zea mays
  Clone ID: MRT4577_18001C.1
agtcgctcgcgcgccagatgagaccggtgtccagggtactggctcctcatctcaatcgggcttatgccaaagatgtaaaatttggtgcagatgcccgagcattaatgcttcaaggtgtagacttttagccgatgctgtggccgttacaatggggccaaagggaagaacagtgattattgagcagagttgggggagtcccaacgt

SEQ ID NO: 87744 - DNA, 797 bp, Zea mays
  Clone ID: MRT4577_180020C.1
ttgggtacccccgggctccgcgggactgattcactccgacgcctcccctgccgctgccgcaactgggaggcggtccctgtcgcgcgcgacgacgagccttcatgacggggacacgctgctgattcatagcgcaccacccgccggttcgccctcgggctctctcgcgcccctccaacggattactggtgcccaacgcttgtgcttgctgtgtagcctggcgcgtctgctcgcggccgatacctccgcggccggcggcgatgggccaggacctcgtcgagatccatccgagcgagctccagttcacctttgaggtgaagaaacaaagttcatgtgtcgtccacctaatcaacaagtccaacgactatgttgctttcaaggttaaaacaacatctcctaaaagatactgtgttcgaccaaatactggggttatccttccaaggaaaacatgtgaattcacagttaccatgcaagcgctccgaactgctccgccagacatgcaactaaaggacaagtttttggtacagaccacaattgttccttatggtacatctgacgaggaactcgttcctgcctttttctccaaagaaactggcagatacattgaggaaagcaaattgagagttgttcttgttagtgcataccaatcccttgaagagcaaccgactaataaaattcatgacactgagccagttgtttgaggtcctgtactgaaagaggtgccaaatatagaggacgaagtgccagatgctggaaaagaagtcctgcccctctggtacaagcttcagcgattgggactg

SEQ ID NO: 87745 - DNA, 468 bp, Zea mays
  Clone ID: MRT4577_180021C.1
ctcgaggccggccgggacaagctcacaaaagggcaaaggatcaccgcattcccaactatgggaggctccctgaaagacaaattcatcctgatgcacgcggtcaacacccctcggctcgggcgccatttattttcttgcttttacgctcgttttctgaagtcggctgcagggcgttcgcgctggatgctccggctgcgattacgacggcaaccatgtaggattccccaccccggttgcgctaccatccgagatttcatccgtccaggtggaaaacaacaatcctcatgagttctagaacgaaagtcgcgatctccgggagaagggtgagtttcctcccgatgctgaatccgctgactgactgatcgaaagagccgccatggcgtaatcgtgcatccaggtcggacggatccggctgctggacctggacatggtcaaggccgagccgacggctaaatccgcgctggactc

SEQ ID NO: 87746 - DNA, 439 bp, Zea mays
  Clone ID: MRT4577_180022C.1
ggccgcttttttttttttttttttctttttttttttttttttttttttttttttgacagaagaaaagagaaagcttaggcataggaagaatccccataattagtctacaagacagcaggcatcttttgggtcggttctattctatacaacgccaaaaaaaaaaaaaaactgttctatatatgcacgcaactgctggtagtttggtactgctgttatgggcaaaaaaccatacgaagtcctgaactaataatgcaaataaattcacctctccaacattttagagggcaactgccgttcaattcagttctcttgccgcatatgaggcatcccagctgctgaacttttctgtttttttagagttctgaattaatagacggagcaggtaaccgagtaggggcccaaaaggggcggcgaagacaacaaacagcagggggaaacc

SEQ ID NO: 87747 - DNA, 266 bp, Zea mays
  Clone ID: MRT4577_180023C.1
tgccgtgcgccttctcgctcctcatcgctcgcggccacgaccgggggaccgcagccaccgtacgccaggtgcgcaggtcttctttgggcccgtcgccggcgacgagcacccaccatgggcgtccgagtctggaatcctaactgatcggaatatggtaaagtcaaagatcaggcgatgacggcgcgcagatgctgatccagggtctcagggatctgctctggatcgctgcctgtatcggtgcatgcagctacatagaggaggacgtc

SEQ ID NO: 87748 - DNA, 258 bp, Zea mays
  Clone ID: MRT4577_180024C.1
tcgacatgttttcactagattttgctggctccccccactccattgtagcttaagttaacacattacctttctaggagagagatgttaatgaggaatcaagatggaagcatgaccatggtgacgtaattcggcctcaccgaagtatgatgtctctttcgctgatccacacggaagacaagaacctcaaggccgagggacccacgtgagagctgaagaagaagtgcggcaacagcgtgagcacccatcgtcctcgtctac

SEQ ID NO: 87749 - DNA, 265 bp, Zea mays
  Clone ID: MRT4577_180025C.1
acactttgagttttctttttttatgctcgaccggtgcgcgcaattttacccgcgaaaaaaagatttagcatggacaacagacaccatcttttttttctacattggccccgtcgggaaaatggcagatactttcttttctaaaccttagctgctccctaaaaggctaggattttctatgagctgatttttttaaaaaataacccgcgttggttaaaggtatcacaactgccacaccccggccggaaaactttttttttggtgtata

SEQ ID NO: 87750 - DNA, 324 bp, Zea mays
  Clone ID: MRT4577_180026C.1
ccggtgcggaattaatatccgggtcgacgcgcgctcatttttcggagggcgccctattcacctttgtttttacattgccaaattcacagtagtgcatctgagactaaaaacgttcctggaacacaaactaacttggtcgctgattggctctgtgcactgccaaagggggactatcgatatactggcgtcagggtacgaatgaaaatgcatgctcatttcaggacaaaaggcaccgggggctacctagtggtgtgtgaaagcatgacaacgcatggccagagcctgagttgcccccacgcacacactcacgtacactagagcacg

SEQ ID NO: 87751 - DNA, 272 bp, Zea mays
  Clone ID: MRT4577_180027C.1
ctcagagacggaaccagagacgggccagagcatccccctcctccaccatgaaactcgctgtcaccctcaccctggtcacactggctctctgctgcagctccgcttctgcagagatctgcccgagctttcagcgtgtcatcgaaaccctcctcatggacacaccctccagttatgaggctgccatggaacttttcagccctgatcaagacatgagggaggcacgggctcagctgaagaagctggtggccacctcccccaaagaccagagaaag

SEQ ID NO: 87752 - DNA, 284 bp, Zea mays
  Clone ID: MRT4577_180028C.1
tttcttttttatagggtggggtttccaataaatatatcggggaaccaaaaccaatttttcccaacccagcacgagtccggaaggcaaaaccagatctttacatttattttaccccgaaaaaagaatgggaaattaatgggccagggcaacggcccatcttactggcacattcatgcatacccaagctttaattgaacgtggcccggggggcaaaagcaaacgcccccgggtttgaatccattcttccaaagcggaaaccatggggtgggaaataaattaggggt

SEQ ID NO: 87753 - DNA, 658 bp, Zea mays
  Clone ID: MRT4577_180029C.1
ccggccggcgccgaggttggggtccattgatggtcgctacgcactagtcgagcgctctacaccagcagtcgtcgtttgccttagcgccagcagggctttgtctcgctcgtcctgctgctcttgccctggtcagcagccgagacgctcgcttctgttccttatgttcaagccaccaaacgccagtgccctctcagtctccaggccgtatgctgctaattccctgccgcgccgagctccctgtccactcatcggaccatgccaagtcatggcactcgccctggtcccgtgcttgcgcagcttgctggtggcccggccactcgccatcggcctcaccttcatgacacaacgccatcggctcccctgtccgacgcgtcgtcaacctgccgtgcgagctagctccacctctcctgctcgtgtttctctccgtcgtgcttggcagcaagtacttcatgtcgaagcaatagctacgattgatagcacctagaggggggtgaataggtgatcctgtaaaaacttgaaacttaaagccacaaacttgattaagtgttagcacaatgaaatcaagtgactaaggagagctcttgtgaaccacaattaacacagtaagaacaagcacaagagacacaagaatttatcctgtggttcgaccaagtacaat

SEQ ID NO: 87754 - DNA, 408 bp, Zea mays
  Clone ID: MRT4577_18002C.1
gcatactcaacacacagtcagcctgatacctctttctcgtgcgaatccagaacttccatccatggcaggggcgtcagggatggtcttctacggccgcccgacggttcctgaccagacctgcgctcactcttgctaagattgggcgcgcccccatctctactgctcagagcgacaacctcatttactggggcaccaacctcgactcggacacatgcccgaccctgcttgaggctattgaccagatcacccagcccaagagacctttggacaagcccctgcgtctccccctggaggatgtgtacaagattggtggtattggaactgcaccggttggtcgtgttgagacttggggcatcaatcctggtatgggtgtcaccttcggtccaactggcctgactactgaagtga

SEQ ID NO: 87755 - DNA, 452 bp, Zea mays
  Clone ID: MRT4577_180030C.1
accatccactcaccttcgtgaccctgtccatcatgatccgcgtccactgcgtgagcgtctccttggtaggggattgtggtctctcttttctttggatgagcagggccctgacttcttgtacatagtgctctactgcagaggaaggactgaggatccaggaggaggacagaagtgcgggaaggggcaggagagcgcgtcctgatccggctccacaccgagagggagcgcatcgaccacttactctctgcccacaccaatgagcttgtcgacatgatcaccaagatgaaaaaccttgtaaagggcctgcaccgagccccaccacatcattgccgagtacaacaatgcgaaccctgaggctgagcgccacacgctcaaggatggtgctctcgaggatgtcctgagggcacctcaggaggcgattgacatcccgccatgggtggcacttgccatcc

SEQ ID NO: 87756 - DNA, 724 bp, Zea mays
  Clone ID: MRT4577_180031C.1
gcaagacaagaacccttccctatgcctgatgtcgattagacagttgttttttatcaacacttccttcatgggttggctatcccaacaattgctttcttgagggagctcttagagtattacaagatagagttgatccatctgagtcccagttccatactccacatcgccatattggctttcttaggaaccccctctgttgtttcccttgttccaatatttgtttttatttatccccaccctaataagaaaaaacaatagtagtgggcggtgttggtgtgcaattgaggggcaatcaggtgtacctatattgtccttccaaaaattcatgaaaaatatgccacaaaacgtggttttagggctagtttgggaactccattttcccatgtgatttctttttttctaaggaaaaataaactaattttccttaagaaaatgaaaatcccttagaaaaataagatttccaaactagcccttatattgacaatcttacccccggacttctagagttcctcagtcagcacatagctcagcatattgagtggatgagtgatccagcctccagatttatcgatgttgtggtcgtcgcctcaaaaagaattgtcgaggtgaaatatttggaactcccatgcgcccatgttgcggctgattggattcgatgtctagtcagttttccaaggcagatttgttagaagtcgacgtgaagggccacttgaagcaattcttc

SEQ ID NO: 87757 - DNA, 358 bp, Zea mays
  Clone ID: MRT4577_180032C.1
gcaaaacatgtcccgacccagcatgaacccggggacctccccattttttttggggttacccaagccgcccccctccctgggaagcggggggaaaaccccctactgggtcttgaacatggggggggtcagggcccccccccggttgctgtaccccccctcgttgtcgtcccccgagacaagcttgacaaaaggggcgttcagcacgatccccgccttggcgtcaaaaatgctccacctgctttcaccaaggaagtcgggaaaaaccaaatcctcccccacataacccatgatacccttgaggggccccccggaagccgccttaaaagctttcttgatatccccaaaggaggcccccttt

SEQ ID NO: 87758 - DNA, 1325 bp, Zea mays
  Clone ID: MRT4577_180033C.1
cgtcgcgctcggcgccgcgagggggctggagtacctgcacgaggcggcggcgccgcgcatcctccaccgcgacatcaagtccaccaacatcctcctggacgacaagttcagagcccagatcactgacctcggcatggccaagtgcctgatgaacgacggcgtgaccagctgctcgagctccccggcgcggatgctgggcacgttcggctacttcgcaccggagtacgccatcgtgggcaaggcgtcgctcaagtccgacgtcttcagcttcggcgtcgttgtgctggagctcatcaccggccggcagcccatccacaagtcgtcgtcgacgagggccgacgagagcctcgtactctgggcgacgtcgcggctgcgggacagcgggctggtggtcacggagctgccggacccgacgctgcagggcaagttcccggcggaggagatgcagatcatggcgcacctggcgcgggagtgcctgcagtgggaccccgaggccaggcccaccatgacggaggtcgtgcacatcctcgccaccatcgcaccactccagcacggcgccaagcgtcggaaccttcccatcgccaccgccttcaacctcacgccatcgccgcacgtcgggcggtgtgacccggagcctaaagacgacgacatcgagaggcagatgcagcagcaggagtgctcgccgacgacggctgtccagtggcaacaacaacaagcgcgctgcacccacgcgccaacgggccgcgcgtcgtggcccggcgacagggggaacgttgtgagcagaggcgcggcggtgtcgggcgagctggtgaacgggacggtgctgatgaacccccacgggcggggcagctggcggcggccgccgccgcttggcgacgaggaggcggtggacgtggatctgacggagccccggatggaggcgttcacgcagccggcggcgtttcagcctttcaggtgacggaaggattaggatcaggtggtggtggttctgattggggcggcggcggcggcgggtgctgctgtacaacttcttgttcgtgcctccacgatccacaccagcatcatctgcttctgcatctgcgttcatgaatgtacagtacaggcaaacacatctagattggcaaggggaaaagaaaagaaaagaaaaggcatcgagatcgttatgggatataggacctagattgaacacgagatcaatgcatgaatctgaatccacggagcacgtcattggacacatcactgttgtacacaagcaaacaaacaatgagtgttcacagaagcaaaaaatgtaagaccgagttcaatgcatgaatctcaaaaaaaaa

SEQ ID NO: 87759 - DNA, 808 bp, Zea mays
  Clone ID: MRT4577_180034C.1
gccgccgcctcctatgtgaacatcttcttcacatctcccaccgcagcagtctcctggcgccgcctccgatctttgcatcttcttcacatctatctccggatataccaaaacaaggaggaagtagagaggaaggggtgtcatggctagccggtttgtggatctcgcggtcaagcacatgaacggccgcaatattcctttcagcatacaccgtattaatccggcagatttcttttacccaaccggatcgccagttcccaaacaaggttcagcttttgtaccaccggacgaaattcagctgcctccggccaccatcgccttcgactggccctcccggcagggccaaccctgctcaatggatttcatggccttcggcgccaaccgggataagatcgtcgccgtggacagcatagggtgctcctacctttacgacgctcccgtacgcagtatcagcaccaatatgcccatgatgcccacgtgcatgctacaacccatgtccattgctgtcggtgacaacggcctgttagttatgagtaaagccgatcaccagttcgtggctctgaatgatggctgcgaccccaattccagatatttattaccaatgtctggctggtactggcagtccctcaagccgcctcccttccccagccgctcctaccaccagaacgagaaaggcagtcaccatccatttgaagtcagctcttacacggtagttggcaattcacagttctgggtgtccacagtgggtgcaggcacgttttcctttgatatgaacagcggtgcgtggatgaaggctggcaattgggagctg

SEQ ID NO: 87760 - DNA, 440 bp, Zea mays
  Clone ID: MRT4577_180035C.1
cccttaactggaaaaaacaaatattattaataaacaaaacgggtgaacagaaatagtggacatacatacttgcccattggggtacactcaattgaccaactaaaactgcatacttactaattcaacactgatcacccatgttgcaaccggaagaagttaaaatgcttacaaacaaaaaattctaataaaaatagctaggcttgggtgctttaaagaaattccaaccgacagccacgaatttgggaccatgtaagatatacaacctataggccaattgaccccaaaagtccgccttactcataaagcactcccggctcatactccatggaatttcgcttcctactgctagattagaagattacccagtttgtgacactgcttcctagaaagaaaacctctctccactttcccgctctgaaagcaaaggaaaacacatttgg

SEQ ID NO: 87761 - DNA, 307 bp, Zea mays
  unsure (1)..(307): unsure at all n locations
  Clone ID: MRT4577_180036C.1
gccctcttggattactatgtttttttcttcgtttaacttttcttgttcttgttgccattctccacgatgggatgcaagaaatgacagtgcatgcatgtggncacggtcactacgtgcgggtgctcgtttctgtgatgaacggctgtggccgaggacgtgccgggcgcggccgtctggatgcacgcctgcgctagaggccgcgtgacagcgctactccgcgttgccgactacgcgaccgcgcagagatggcctgacggggccacgccaccggggctgaacgtgcgcgccggggacgcacacccacgcc

SEQ ID NO: 87762 - DNA, 601 bp, Zea mays
  unsure (1)..(601): unsure at all n locations
  Clone ID: MRT4577_180037C.1
gtacctggngggccacaggcggagagctgggaagccccctgggggtccgtgtggctggagatagacgtctttcgtctttcgtacgctttaacaggtcagaaggaaaaggcaaggcgctctgctagctcagctgcagctgaagagccaagggaagccctgaggcagcgaagttctgcaccactgccgcttacagcctggacttcagactccagaggacaaatgctggagaaggaaaaagctcagctgttactcagtcatggatgctgggggcggtgtggggtggaggggtctggccccagtgccacctgctaacatgcagtagctcaattataccgttacattcactactcctgtcaaggggcaggcagcagaggagagagggtagcccaggagagccattggcaacggtggtttttcaaaactggcatgcctcccttggaaagtcactgttccctatactatgaatcctgtcccgcaacaacagctgcatttgctcatgctggccttcacattttcatctggttccaaagctaagcggtggacaaatgactcaggaagcagccaccttaatttaaccccccaaacaagctgcccaagatac

SEQ ID NO: 87763 - DNA, 345 bp, Zea mays
  Clone ID: MRT4577_180038C.1
gtgaaccactgcagggccatcgtggacgccggcggcgcgcggcacctcgtccagctagtgtacctcggagaccagctgcagatcgaggcgctcatattgctctgctacatcgcgctgcatgtcccggagaacgaggaactcgcgcaggccggcgtgctcgccgttctcctgtgggcgtcgaagcaggcacacatggtgcaggacctgcgcgttgaggcattgctcccggaagccaaggctcggttggatctgttccaatccagggcatctaggtgatgattgcagcaaccacgggtgaggatgaattttgctttgcacaatcagattaggatcgtgtccattgtt

SEQ ID NO: 87764 - DNA, 240 bp, Zea mays
  Clone ID: MRT4577_180039C.1
ctatgactgatattttttggataaggaacttttaaaagaaaagaagaaaaaaatacaaagatggaataaaagcaaaagagatatatcattgatgaaatctaaaaaaaggcaaaaaaacccaagagcgatgaacaaattaacaaaatggcccgcacaaaccaatttgatacagcatattggaatctcccttgcaccgcgttttgggcaaatattaaaaaacgggcggggctgccaaggaaa

SEQ ID NO: 87765 - DNA, 2429 bp, Zea mays
  Clone ID: MRT4577_18003C.1
tagcacctagagggggggggggggtgaataggtgatcctgtaaaacttaaacttatagccacaaaaacttgttaagtgttagcacaatagttgccaagtggctataaaggagtctcaacaccgcaataccacaagagatcaatcacagagatgacacagtggattatcccgtggttcggccaagaccaacgcttgtctactccacgttgtggcgtcccaacggacgagggttgcaatcaacccctctcaagcggtccaaagacccacttgaataccacggtgttttgcttgctttttctcaatcccgtttgcgaggaatctccacaacttggagcctctcgcccttacaattgaagttcacaaataaacacagagcaaggggggaatgagcaacgcacacaagacttcaaaagatcagagcaacacgcacacaagcagcaataagagctcgcaacacaactcaaagagttcacaactccacaagagctctatatgctatcacaatgaaacgaatgcgcgaaatcgatgtcttggtgcttagagatgttgtaggaatgcttggtattctcctccatgcgcctaggggtcccttttatagccccaaggcagctaggagccgttgagaacaaatctggaaggccatccttgccttctgtcgtcgggtgcaccggacagtccggtgcacaccggacactgtccggtgcccgatttatttccttaaacagcgcagccgaccgttgccgaccgttgcagatctggcgcaccggacagtccggtgcacaccggacagtccggtgccactttccgaccgttggccagaccacgtgtcgtgcgcagattccgcggccgaccgttggctcgggccgaccgttggctcgggccgaccgttggctcgggccgaccgttggctcatcggacagtccggtgcacaccggacagtccggtgaattttagctgtacgccgtcggcaatttcccgagagcggcctcttcacccgaggtagcctggcgcaccggacactgtccggtgcaccaccggacagtccggtgccccagaccgaaacagcttgttggctgtacacagccaacattctccttttcttcttctctctgtttctaacacttagacaaatatattagtacacaaaaccaatgtactaaggcttagaaacatacctttatttgtgatttgcactttgttcatccatgggtatagattcacatttaagcacttgtgttgtcactcaatcaccaaaatacttagaaatggcccaagggcacatttccctttcacgaccgttggctcaccggacagtccggtgtacaccggacagtccggtgaattttagtcgtacgctgtcgacgaattcccgagagcggccacttcgcgccgagtcagcctggcgcaccggacactgtccggtgcaccaccggacagtccggtgtgccagaccgagctgagtcttggctgtacccagccaagccttttttcatctcttttcttttcttcttctttctgtttctaacacttagacaagtatattagtacataaaaccaatgtactaaggcttagaaacatacctttactcttgatttgcactttgtccatccatgagcataaattcacattttaagcacttgtgttggcactcaatcaccaaaatacttaaaaatggcccaaggcacatttccctttcaatctccccctttttggtgatttatgccaacacaacattaagcaactagaacaagtgcaatatcactccaaataaaactcaaatttattttgattcaattttggcatatatggatcatcctttgccaccacttggtttgtttttgcaaattaaactcaaattcctatctctaagtcaaatccacttgtagagacataaagagaggttttccaaagaaatttgatcaaggatttcaaaaactccccctttttcccataatcaacacttctccccacaagaggccaacttttgacataagagacaataaaaaagttttgacaaaccacaagctctaatctactattttcaaaatttctcaagtggtagctgatccatttattgctttggcctttattttctccccctttggcatcaagcaccaaaatgggatcaatcttggccccttaaccccattgcctcaccaaaatcatcaaaagagaacacaaaggcaataagagtataaagatgaacttggagaagttactcttttcaacggagtgcagtggaagtcttgcatggtccaagtccaccttttccctttcaattctccttggagactaaaacaaccaaactcacgtacatggttagtctcaaagggtcaagttgtagcacagctccccctaaatatgtgcatcacttgcaaacaggacttgtgaggtccagggagtgtttgtacaacttgagcaccacaat

SEQ ID NO: 87766 - DNA, 458 bp, Zea mays
  Clone ID: MRT4577_180040C.1
cacccaaaaggccctgcctgagaatagctcgcctgaaagaagcaggacccaacccacccaagaacacaacagggtgcaacagggggaggcatggggcacccgtcccatgacaccgggccccaccaccatttccccccggcccacattttttttagcccaagttattcggagcccgaaccggacacgtccacccaaaagaaactggtaactacgcaccggggtaccgccgagacaccccccccccccgagagggacccctgtaataaccggaaggtactgaacaaaaaaatcccgtgtaatactgcaatggacccccccgaaataataccccggcacgcgcgcacgcctattccatgggcccttgccccccccgtttttttcccacggcctaattcgttggcctttttgggcttctaaagaacaacaacctcttcccctttggggggcgtttcctgggg

SEQ ID NO: 87767 - DNA, 453 bp, Zea mays
  Clone ID: MRT4577_180041C.1
ggctggactacctgaggaacccgagcctcatgcacgcgcagagcatccttgccatctgggcctgccaggtcgagctcatgggcgccgtcgagggctaccagatcgccagcggcccgctcggagaggtcaccgttcttctctaccggggtggcagattggacccgctcggcctcgacgacgaccccgaggccttcggcgagctcaaggtcaaggaactcaagaacggccggctcgccatgttcttcatgttcggattcttggaccaggccatcggcaaccggaagggcccgctcatgaacctccttgaccacattggcgaccccgggaacaacaacgcttgggcctacgccaccatcttcgaccccagatatggagggaggcgcccgccggcacctttaagggttcggatgcatgtcagcgcaccctgggttccggcttgtaccatgatggaaa

SEQ ID NO: 87768 - DNA, 117 bp, Zea mays
  Clone ID: MRT4577_180042C.1
cgtggacccaaactcattgactatcgttttcacattacggaacttgtggaccgagggcttattgccgttgaaacggcagatcgagaaggtggaaacggcgcaaatcactatacaact

SEQ ID NO: 87769 - DNA, 564 bp, Zea mays
  Clone ID: MRT4577_180043C.1
gcgtccacgcgtacgcccacgcgtccggcgagtacttcttaaacatgacctgatctacagattccaccccaaccgttcgtggttacatttgtcacactatcactccactgctcccgatgtcgaggactcgaggcccacgtccatgtcgtagtcaaggacgtggtaactgcacagaaactgggtcgaccagcgggcgccatcggccgacactgttgcctccgccatgctctccgactcctcgtagttcactgtgccgtcgcccatgaggtcagctgggaggttcctgacgaaccaaggatgactctttacctcaggcatcgtcgtgattctctgcaaagagcatgcgttatggcacatcgatctgaaagtcctgaacaatcaaagtgactgacgctgcacaggggaataagctagtatggcatcattcacatctgctgggttgggcaaaaaaaaaccttcgcattctggagatacggggcgtagacaggaaccgcgtactgaacacccagtatattattctgcaaattggcatcggcatttagatgactagcatttggatatacg

SEQ ID NO: 87770 - DNA, 204 bp, Zea mays
  Clone ID: MRT4577_180044C.1
gaattccgacccacgcgtacgcgcacgccagttgtacccgtgtctctaaactagtatctacaggttcagtcattcatcaacgtatagggcaatataatcccgaaccatgcgttcatacattcgaccagcaaccctcatagcatttaccactacaattcctatttctttaacgaccaaagagaactcttggactacgaatcaaca

SEQ ID NO: 87771 - DNA, 306 bp, Zea mays
  Clone ID: MRT4577_180045C.1
ggtagctggatgcaaactcgtgcccctgataactcctccggcagcggccggcagctatttgagtactatgctgcagccacacagcattgtccaattgaggaagaagcacaagaccagtcgtttgaggtcgctttggatttgcacaatctggaaatagacaacaacgacgccatttgtgtgttcgagaaagtagctcgtaactttgaggccgatatccgtaggacgaaagagaagatccataggtaccctgaatgcattcgagatctcggtgattactacactgtgccgaggattgtggccatcggt

SEQ ID NO: 87772 - DNA, 1101 bp, Zea mays
  Clone ID: MRT4577_180046C.1
ggccgcttcgaaggccggcccgggcccgggaaatgatatatgaataggcatacttcgttgataagctacgctagcggtagttgtcttcctagtgggggtgcatcttgcattgctaggcattgggctactggagacgatatggatgaaagctcttgaaaactgctcgtcccctccacttcaaaatctactactcaaatattgcctatgccaatctggactgcatgcattcggtgtggcggttgctgagctacagttctgccatcctgaggttgtcccaacgtcaaagaacttctggaagccactatgtgcatctctgcagaatctgctgaggtgcagcgtcgacatccgaatcaacctatctcctatctccggcaacggggcgggatccaaggactcgtccgtcagccttgtcatggagtcaagagaagaagaccgcgaggcacaggacccagccacctcaaactgcagaaccgtggtgtcatccgggagagactgcccttccccacccttggggcaggccaaggagagatcgtcccacatcctggggtgcctccatggcggcgcgggtggcgacgccgtggacaccgagccgaggatcctgagctaccagaagatctccgttgtccctgcagcatccaccccaggaaacactcccctgaaagccgctgccgccgctgccggagacgagtcaaaggttgatgatggcggggttcgtcctggctgctgctcgcacattttaccctgtggtgcttgcgctccccgtcagaagccccggacgcgggagaaacgccgtgccaagctgttcagctgctgcttctgcaagatcggaccggactgcaaggcgaagggggaagcagggtagtttgcagcagattagggacagagcaatcctctgctgttagttcaagctggagatgggggcagtagttcagactgtcaagtgtgaccacctgtttactgtagctcgcctccgatggggtggtcaaagacacagttacatgtgcatcggtcgctaacataaaggttattttgtagtcggatgcttaaattttcttggtagcataccatatttataattgtatgtttgatggcgcgcgtttc

SEQ ID NO: 87773 - DNA, 231 bp, Zea mays
  Clone ID: MRT4577_180047C.1
ggggttgggggtcttttttttattgtgtttcttttcggaagggccaggcccacccatttgccgtgaaatttaaagacaggttacaaccccattcagggcgggaagtttgccccaaaaaaataaacccttcccccaaaggattggacgggggccacacataaaaagaaaacgggtggtcacgattcacacatagcacgccgtaggggggggggggtaactttggggggggcc

SEQ ID NO: 87774 - DNA, 262 bp, Zea mays
  Clone ID: MRT4577_180048C.1
cctgcaagtccggcggcaccagcaggtgttgcagccgccggcgctggccttggtggtcggcgcacgaggatgccgctggcggcggcggtctccacttcagggtacaaattgcagcagtcgcatgggcacccgcagtcaggggggcagttgcaagtgcggcggcaccagctgcaactgcaactgcagctgagccggcccaatggtggcgcacgagaggacgacgacgacgaggcgtagtatatatgtatgtagcagcgtctaa

SEQ ID NO: 87775 - DNA, 191 bp, Zea mays
  Clone ID: MRT4577_180049C.1
ggccaatcggatcgaagttacataaaactaaatttggcgttcagactacacatacattccgaacagagcaccaatactactttacagcgctaggaagcaaccttagccgcaataatactaagcagatcgaagtacaatactatagctagcacttgcagttaaatactaattccgaggcatttggtatgtca

SEQ ID NO: 87776 - DNA, 211 bp, Zea mays
  unsure (1)..(211): unsure at all n locations
  Clone ID: MRT4577_18004C.1
ccaagaaaaccagggccggggaggggtttaagggaanccccccaccgggccccgaaaaaaaccaagaagaaaaggaaggggcccggaaaccaggagggggaaccgccaaaccgggaacccgcggcccggggggccggcaaaaaagaaccaggggtaccggcccaaaggcaggggaccacaaaggaaggccccaggcggaccaaaaacccgc

SEQ ID NO: 87777 - DNA, 1014 bp, Zea mays
  Clone ID: MRT4577_180050C.1
tttttaggaatgcggcccgagcccacgtctgcggctgccctcgcaatcggctggattgcccccgcgatccccttccaccgacggcactcaccttccatcgacgaaacggctcttcctccattcacctcccaaatcctgtgctctccattctcctcccagatcccatgctcatcaccacgtcgaggaagtgttgatggtctacggccacccccgcaatcaatggggattgcgccccgcaatcctcttccaccgacgggcgcttagcgcttccatcgacccttgaggcgagcccgtcgactggggcatcaacgaccccgtcatagagagaacaccatcccggcccctcgcttcgtcgccccacctcaccctggagccttagccaccccagccgagcagaggtggagatgtctgcctccacacacctcgccctcgccaccacctcccttcccgtcgtccccagagaagtaacagaggtgcaggagcgtcgtatccgattgggacgaattcggcatcggcttgccgaagattactttgtgtgtttggtgaaaaatgtttaattcaagaagacttgcagatgctacatgaagattcaactatgcaacaaggccctcaatgcttaaccttcttttgttcctttccttgtacaagtggaagagaattcatagaggaagcgcttattcagcattatgagtgatattccttatttctttagagcattcgcggacaggaaacatgaaagaaataggtctgggtactgctaacatgttttatggaccaagatgctggcatgcactcttttggtcattcctgaggttggggccaacctgccgagaggatgcgagagtattagatttatttctttaattctcatattaattagattagaaagagtgataagtcaatttaatagaggtccaatgtaaatatcatactatcatagcaaaagttatatgaatacacatatatgatgaataataattgtggatgacactctataaagtgacttttgttttt

SEQ ID NO: 87778 - DNA, 674 bp, Zea mays
  Clone ID: MRT4577_180051C.1
cctcgaggccggccggggtagactttcacgtaaagctaactacacttgatgtacatactacacaggccccgcatatggcctcatccatcatctgtttttaccatgcgccacctgatctcttctgctgtcgacgaagccggcaacttcttcctttgatggactcctcgtcgctgctggcgctgtgttgcacgacgaagatcgagaacacgacgctttaaggatcatcaatcatccaatcaaacacaagttctcaggatgaatgaccatctgacacttgacacttatttcatagatgcactccagcggagataatcagtctcgtcccttatatgataaccaagagctcatacgcacatcaccgtacactgacaatttcgtctcatccagcatattcgctgacctcgagtgacgtggttcaacacctacaaccatcaaggaacaacggcacataaactggagcgcttcaactactgaccatctaccattagcctctggaacacaaactcgcatagactgaatctaggccgatgcctacgactgcatgcacccacacactcacgatttcttgcatcgacctcatacgagatctgatcacgatgtcgtgtgactattgttgagaagctcgctactgactacttctgactgctagtgatctacgaaaacgaagatgactg

SEQ ID NO: 87779 - DNA, 187 bp, Zea mays
  Clone ID: MRT4577_180052C.1
acgccacagctgccacagagacatcatacagcggtactactggcgagtctgagctgaagaggatgatgaggatgaggataagcagcaacacacaccgacgacggagagcgaatatgcaccgcatcgagctgtagctcgtccgcggcctgtgcgcactggcagtgcccgctgtacacggcggcaatga

SEQ ID NO: 87780 - DNA, 454 bp, Zea mays
  unsure (1)..(454): unsure at all n locations
  Clone ID: MRT4577_180053C.1
ggtaccctcccgggccggcccgggcccgggttgcgcaatatgatcggaccccactctcgacatangagcaccatagggcacccacaatggcagcgcaaaatagttgttgcctccgttatgcctccattggtcttatcggcacagcgatccgtaccagaccagtgtcgcctccatggtcgtaagctgctatagcttccattctcatctcgtacctctcaccatcgctgtcttcgccattgagaaaactccattcagcaacccgtagggatccaacaggcaatctgagctggaggcgcacctttataaccaatgaccctccagggtcataagccctattacctcagatacctcaggagcatcattgcgcaacactcaaggcacaccaaactacaacaacttgcgcgagcaacacttgctgccgactctaacaaacaggacatgataccattcaacc

SEQ ID NO: 87781 - DNA, 309 bp, Zea mays
  Clone ID: MRT4577_180054C.1
ctgggggggggggggtgcttctcgttcccctggggaggggcaaggtttgggtttggggttgttgcggtggggaccaaacgaactaagcagccatacgcaacgtattggaaaggggggaaagtggtgctcacacccagaaggggtgccccctttgggagaaactggaaccggttttggttgcattccctagtaacagggacctgggatcacttggatttaggggttttggggtttaggaggacccctgggtattttggtaagaaccttttaatagaaaaagggatactgttttttaatttcagcccaccc

SEQ ID NO: 87782 - DNA, 275 bp, Zea mays
  Clone ID: MRT4577_180055C.1
gggaaactaattttaacccccggtcccaggacacatgggcaaacaaacgggggctttaatttagaggggggaaaatacacccggacccaaattaaaaggattttttacctaaaaaaacactagttcaaacttaaccaaaaaggggagctataaaagcttttgcacagcacaggtgggggcccaaattatgcccaagggttttgaaaactggccccggtttaaaggggggggagcttaacaggggccaaaagttaaaacccccacccataacgagg

SEQ ID NO: 87783 - DNA, 423 bp, Zea mays
  Clone ID: MRT4577_180056C.1
cgtacgtaagctgggacctctacgcggccgcccttgctttttttttctttttttttttttcttgggttttctcttttttttttttttgtcttggggagggaacttactgaacattatgctaattcggcttgtgacatgggggggtattattaataaaaccacggctcttccggaaaatgggggggggggtggcagctggcagcctggcactaaccccgcccccccaaaccgggggctgccacaatgtttgccctctcattcagggccgcaggtctttgccaaataccccaacaatggctcggccggggccctcttgcttcaccgggggttcccccccctaaccgggggaaacgcccgctttcgggcccttggctccttctcccggggtgagcgggccgggttctccgcccgccaaagttcctt

SEQ ID NO: 87784 - DNA, 166 bp, Zea mays
  Clone ID: MRT4577_180057C.1
ggggcataaggcttaaggccagaccattatttttaaaaggattggacaaacaataaaaaatactgtgccccatacaacaacaattttgagacgattgcctgattaccttgtcaaaaatacagaaaatttattggatccatcttacacttctaactacatttggcaa

SEQ ID NO: 87785 - DNA, 3721 bp, Zea mays
  Clone ID: MRT4577_180058C.1
tgccatatcaaatggagctggctgtttcctattaacaatgtgatcctgcttaccgcggcgtgcggtctcaggggcccgtccctggtgatgcagaacacattcaagtatatggtcctgatgcactgggatctcatcctcgtgattctcagaatatgtatcatcttctacagggtaggcctcctatgatagcacctcaccctatgatggatcacattgaatttagcaaatggcgcacgcggtttcaccccgcgtacgctctctctcccgtggcgacgactgggcggccgccgcagccgccctagcccggtgcggctcttcgtcgggtccttcgccggcgacgggcacctaccaggatgaagacgaggatagtgtactccagggagtttctgctgtcgcttggcgagttggagcattgcaagaagctgccccctgactttgatgcagcgctgcttagtgagctgcaggagctgtcagcgggtgtgcttgagagaaacaagggctactacaacacatcccagggacggccagatgggtcggtgggatatacttactcttctcgtggtgggaacactggagggaggtgggatactcgctcatctggatcaagtgatcgggatggggaacctgatcgtgagtctcagacacaggggcgtggtgcaaaccagtacagacgcaattggcagaacacggagcatgatggcctacttggccgtggtggtttccctaggccatcaggatatactgggcagttgtcatcaaaggatcatggcaatgcgcctcagctaaacaggacatcagaacgctaccagccaccacgtccttacaaggctgctcctttttcacggaaagacattgactcgattaatgatgagacattcgggtcttctgaattatcaaatgaggatagagcagaagaagaaaggaagcggagggcatcttttgagttgatgagaaaagagcaacataaagcagtgctaggaaagaagagtggtcctgatatcctgaaggagaatcccagtgatgatatattttcaaagttacagacatctactgcaaaggcaaatgccaaaactaaaaacgagaagttagatggttctgtagtatcctcatatcaggaagataccactaaaccatcttcagttctactagctcctgcagccaggccgcttgtcccgccgggttttgcaaatgcattcgctgacaagaagcttcagtcacagtcgtctaacatcacacatgagccgaagctagaggatgaccagtcagcaacagggttcacatctgaaagtaaagagaagggagtttctggtaacgatgctactatgggtccaaagcacacgcttccacctggtagtgttacctcttcagctgaattggcttctagcgttctgaaagggagcgaggattgggaagctgatgtaatggataagtattctattggaaaagaaggcaaatctaaaaatattgatccagttaggaaggatgattcagtagcaatcttagaacagttctttggcaatgttttatcgaaaagcggcagcaacctaccaacttatgttgagaaccagccattgaaaactgatgatgacatgatcacttctgtgccagaatcatccaaatttgctcattggtttcttgatgaagacttgaaacctgcagaagacttatcttcaaagagcctgctctccatgattgtcaaaaatgaaaatccaggtctagaaaatttaaaccatactcctttatctgatgctgctgcccagaatttatccccaagagcacctattgataaacttgattctgcatcagagcttatctcatttacatcctctacgcctgccaatggagttcttgaacaatgcatccattctgatgttccagaggcagttcctattatgacatgtgaggatcttgagcagacgatgttagcacaggttagcaatagcagctcaactcagataaatgctacaaaggagcaactgactgttatggatgaaccagttgccatgcagaaagtaactgtagataatcatgcatcacaacatcttctttcattgttgcaaaaaggaacagataataagggagcaccttccctgggtttccagagagaatcaactgatgaacctctgagtgttgacacaaatttaatggcaaatggtggaatatctggaagtgatccggttaacagtgttgaaaatgttcctacttctgggaaggacttgacattggaagcgttattcggggctgcatttatgaatgagctccactcgaaagatgcaccagtttctattcgaggagccacaactggtggtcctactgagtttgcagagatgggtaaaactctgttgtcatctagccatgaaggatactaccctgttgaacagaccgtacacttcaacaatactaaagatgctgctgtccgtagagaaccaggtattgagcattcagcagtacctggtctaagtcaggggagtgctagttttgacaagaaaggaatggaaattcatctgcctgaagaagataatttgtttaccatgagtgattctctgcttggtcaaaattctgatattttggcatcagtaggatccagcagggttgaagggctattgcctgaaaaggcacttgataacctcagctataggtttcaaagtcttgtgcctggtgatgcagaacacattcaagtatatggtcctgatgcacttggatctcatcctcgtgattctcagaatatgtatcatcttctacagggtaggcctcctatgatagcacctcaccctatgatggatcacattgttaataggaaacagccagctccatttgatatggcacagtcgatacaccatgattctcaccgttctttcccatctaatgtgaatcatatgcaacataatcttcatgggccaggggtccctcacttggaccctgctggacatattatgcgacaacacatgtccatgcctggaagatttcctccagaaggcttgccaagaggtgtccctccatctcagcctgtgcatcacatggctggttatagacctgaaatgggtaatgtaaataatttccatatgcaccctcgccagcccaactatggagaatttggattgatgatgccaggcccatcaggtccagaggtgaggggcaatcatccagaggcgttcgaaaggttgatccagatggagatgtcagccagatcgaagcaacagcaggtgcaccaccctgcaatggccgctggccgtgtgcctagtgggatgtacgggcacgagcttgatgcgaaattgagatacagatgatggatgcctggatgcttcactccgtacagaggacctggaggtgtggtttgttgtatgtgcgtggtcactctttgcccagactgctgtgtattatttctgctaacatggtttagcatcagccgtcggtcgcgactgattggaggcctgcctcacttgtagggttgtagcatgtacatctgaacgggtgatggaacggagtgggtctaagatctgtaggagcggaagtctaccgggaaaaggggttatggtgtgctgaatggaagacgtggcgtcgacgtcttagcagccacatgtgtaatgacgttttctgtctactgtttctgacgactatgcagtttccattttgtataagctctgttatgcaaaaggaaaaaaaaagaagaaaaaaaactgagtcagattaacagattggcgacagtatccgattgccccta

SEQ ID NO: 87786 - DNA, 237 bp, Zea mays
  Clone ID: MRT4577_180059C.1
tttgtgtggttataaaaatatcactgggcttatacaaacattgctgcacacaaacaccgttcttatacagctctaggactattatatctcatgtgccacacatgccaactgcagggtatcaacacctaacctattccttgcatttgctctctcaccattacataaccgaccggttacaccacactatagatatatcatttaactcatgggtctctctatttggggacacatttcatt

SEQ ID NO: 87787 - DNA, 398 bp, Zea mays
  Clone ID: MRT4577_18005C.1
agccgtagaaacgcctgcctcgcccccgcagtcctccccgatgagcacgcgctcgcgaagtccgtcaagtgccgcctcgggccgccccgatgatgcgctctcattcgctgacctccactccaagctctctgttttcttcgaggaatccatatgcggcggcgcaatcatcttcgactacatcccggcatggcgccgggtgtcgactgccgactgccgacttctggcctggttttgaagcagacggcgaggacattcatgcctcgcactcctctgacccacagagagataagccctgcttccgtcttgctctgctctcccggcgacaacacgccatccaggcagcaagctgcaaacggtcaatggtgtcacgccgtgctgccgactgttcccatgcagcg

SEQ ID NO: 87788 - DNA, 283 bp, Zea mays
  Clone ID: MRT4577_180060C.1
ctagagtcctctggcttgcaggatggtttgagttgcaagaaggatctccatagttgcggcaccaaagcttcagatgaggagattttggatggttctatccgcaatggcatcatgtgtattccttgccaagtgataaccataactattcggtagatcaaactcaactgccctttcttcaagccctactgagagtacagatgaaacggagtcatcgtttcttggacaaactgccagtggttcactggcatcttctcacagataagtctatagatcctacgtattt

SEQ ID NO: 87789 - DNA, 351 bp, Zea mays
  unsure (1)..(351): unsure at all n locations
  Clone ID: MRT4577_180061C.1
gcccacctcccgtccaccccgcttatatccgcgcgcccnctcctccctccgccgtncttccctccgcctccggctgcgcccccgcccccgcccacgcccactcctcgctgacaccactcctgtcacctgttcccgcgccgacgcagccgccatggaccccgtcgccacatgggggctaaccccgctcgcgggcggggggggggagatctactacctcctggagcgcgagaagcggcgccagcggagaggcatcgagctcatcggctgcgagaactagactagcttggacgacatggaggcgctcggctacggactcactaacaagagcatagagggcatgcccggggcccg

SEQ ID NO: 87790 - DNA, 408 bp, Zea mays
  Clone ID: MRT4577_180062C.1
cggacgcgtgggttcagtagcaatcttagaacagttctttggcaatgttttatcgaaaagcggcagcaacctaccaacttatgttgagaaccagccattgaaaactgatgatgacatgatcacttctgtgccagaatcatccaaatttgctcattggtttcttgatgaagacttgaaacctgcagaagacttatcttcaaagagcctgctctccatgattgtcaaaaatgaaaattcagagcttatctcatttacatcctctacgcctgccaatggagttcttgaacaatacatccattctgatgttccagaggcagttcctattatgacatgtgaggatcttgagcagacgatgttagcacaggttagcaatagcagctcaactcagataaatgctacaaaggagca

SEQ ID NO: 87791 - DNA, 654 bp, Zea mays
  Clone ID: MRT4577_180063C.1
aattcggcacgaggcgcatccaaggcctgcctcgcctgctcgttcgacctcaaccaaacagacccgcagtgcgttcgccccttacctttttcttgtccctttcacggtttcaccccgcgttcgctctctctcccgtggcgacgactgggcggccgccgcagccgccctagcccggtgcggctcttcgtcgggtccttcgccggcgacgggcacctaccaggtatgtccatccttctctgcccgtcctgctgcgcgaaatcgagcaccaaaccctaagtgaacctacctgcctatctgtacccagatctgatctaattacaactgcacacatgtattatacctactgatttcgattttttattgcaaaaattatcgggtgtacatgtgtacacccatatcctttactgggtccgccctgtatatccatggcaggatgaagacgaggatagtgtactccagggagtttctgctgtcgcttggcgagttggagcattgcaagaagctgccccctgactttgatgcaacgctgcttagtgagctgcaggagctgacagcggatgtgcttgagagaaacaggggctctacacacatgccagggacggacatatggaagcggggagaatactgactgttggggggggggggacgctgggg

SEQ ID NO: 87792 - DNA, 995 bp, Zea mays
  Clone ID: MRT4577_180064C.1
cagggttgaagggctattgcctgaaaaggcacttgataacctcagctataggtttcaaagtcttgtgcctggtgatgcagaacacattcaagtatatggtcctgatgcacttggatctcatcctcgtgattctcagaatatgtatcatcttctacagggtaggcctcctatgatggcacctcaccctatgatggatcacattgttaataggaaacagccagctccatttgatatggcacagtcgatacaccatgattctcaccgttctttcccatctaatgtgaatcatatgcaacataatcttcatgggccaggggtccctcacttggaccctgctggacatattatgcgacaacacatgtccatgcctggaagatttcctccagaaggcttgccaagaggtgtccctccatctcagcctgtgcatcacatggctggttatagacctgaaatgggtaatgtaaataatttccatatgcaccctcgccagcccaactatggagaatttggattgatgatgccaggcccatcaggtccagaggtgaggggcaatcatccagaggcgttcgaaaggttgatccagatggagatgtcagccagatcgaagcaacagcaggtgcaccaccctgcaatggccgctggccgtgtgcctagtgggatgtacgggcacgagcttgatgcgaaattgagatacagatgatggatgcctggatgcttcactccgtacagaggacctggagggttgtagcatgtacatctgaacgggtgatggaacggagtgggtctaagatctgtaggagcggaagtctaccgggaaaaggggttatggtgtgctgaatggaagacgtggcgtcgacgtcttagcagccacatgtgtaatgacgttttctgtctactgtttctgacgactatgcagtttccattttgtataagctctgttatgcaaaaggaaaaaaaaagaagaaaaaaaactgagtcagattaacagattggcc

SEQ ID NO: 87793 - DNA, 410 bp, Zea mays
  unsure (1)..(410): unsure at all n locations
  Clone ID: MRT4577_180065C.1
cccacgccttcgcgggcgccttggttcagaaacacaccaagcgaaacacatttgccaccggctaaccaccatgggttccaagaaattaatccttcctgggcctcttgggccttttggcaacgccaccaaaggcgtcaataattccacatggctaattggctccaagttcaataataccacagttcctccaacaagtaccttaaaggggcttcgaccaccaagtgggcaaagcctttaggctacaacaggcaatggcggcgaccgttttacaccaaccaatttcccagttgcaacaacaatcctgggcacatctaacattccaaaccatcgaaccgcaccagcaacaacaattcctaccagcactgagccacctagccatggtgaaccctgccgnctacttgcaacagcag

SEQ ID NO: 87794 - DNA, 342 bp, Zea mays
  unsure (1)..(342): unsure at all n locations
  Clone ID: MRT4577_180066C.1
ttttttttttttatttgctggcggcatccagtgtaagtctgaatagatctctcattgcgtgcctcttcaccaacttgccataggttgccctcccaatcctcaccaccttgtcctccacctctagccgattgccatagccattgccgtccctggaacccctcagcgttgctctcagcacgcactcatttccgccgactgcatcagcaacactctctgctacaagggcctngcttggaattcgtcttccccatttcttcatcagcttatcagaatcatacaacgcggagtatgcactccagaatgacgcacgcaagaacgccttttgcctctccttcaccatgg

SEQ ID NO: 87795 - DNA, 2898 bp, Zea mays
  Clone ID: MRT4577_180067C.1
atggcacccaagagagctaaaccgaaggctgacgaggctgcgaaggcagcactgctcgccgcaagtaagggcaaggcccttgccctcacccaatccacccaccaagaggtcaccaaagacaatgttccccgcgcccgcgaagacaacactttccgcacctgcgcccctgaaggacaatcgcagccacccccaggcttcgccacactggagggcgcggacctcgccgaggatggtgaagtcctcggcgtctcagcggaagaacagctacagctgcgcgccctgcgcctcaagaaccgcaatctccagaggcagaaagagatactggaagccaagcgccagcgtgtgtccgcactagccaaagtgcggcaaatgatacgcgacgaagagcagaaggcccaagacctcaagcgggagatcgcgctgatgcagcgcgaaggccaccttggcctgcagcatgagccacccctccagcagcgcgcccaactggaagacacgcgtgaaggccacctcggcctgcagcatgggccacccctgcaacaccgagcacaaccggaagacccgcgcttccctcagcgcgaccacaccttccagcacgccgcgccattccaaggggtcaactatctcgacgagcgaagccccctggcgccacacctgcaagtgacgccttggccagctaacttccgagcagggacatatcaaaagtacaacggcagcaccgacccggcgaaatacataatgagttatcaggtcgccgtcgcatccgccggaggggacgacgccacaatggcgaagtctttcatcatcgacctagagggcccagctctcacctggttcacaagattgcctccgttgtccattgattcctggagaagtctcagggacaagttcctgctcaacttccaagggtaccgcccagacaccgacgccttggccgagctctcgctttgcaagcagctggaaaaggagactctgcgggaatattaccgcaaatttttaacactcaagtcacagctgccttctgttgatgatcagatagccatccactatgccatcagtggccttcgtgccggtgtcctctacagccactgtatcagagatccgcccaagaacctccaggagctatatcagctctttgaaaaatatgccaaatccgaagagctccaccagcgcaaggtcgagtcacagcggaaacccaaagatgccccacagtccagccgcacgtggacgaggactccgcagccagactccggtcgagacggccgcaatcagcagcaagtgcacaacatcgccaaccagcgtcccgctgctgacccccctcgtcgccaggaatatcccccccagggccgcggaaatggaactcgtggtaggggccgagggcgcgcacagccgccgcaccgattctactgcctcttccatggcgaagactgcgcccaccaaaccaaagactgccccgaaacgaaggccaccaaagacagaatggcacgagcgcagccagccgacaaccccagaattgtcgcgcacaactaccagcaaccccctccaccatatatccacgctcccgccccgcatccaccgcaccacgcttaccaacaccatcaggaagtacaaatcgtacctcctccacccccaccaccacaccagcaacaccaaaacatcccccatgccccaaagcaggaagacttcgccgaccaaccatatcgcggagtcatccacatgataactggggggtccagcacagacttcgataccaagcggcagaagcgggaccactatcgcagcatcaaccatgtcaccgtcactggcccagtcgtgcagacaaagtggtcccacataccgataaccttcgacgcacgagacgtcgacctgcgcagcgccccccactgcgacgccatgatatacatgaaggaggaagacaaggctagcaccagctttataacacccttcggcacatattgcttcatcagaatgccggagggactcaagaacgccgggtcaaccttctccagactcaccaaaacagtactcgaagggcaggtcggcagaaatatatttacatatgtggacgacatcgtcatcgccagcaagaacaaggaggatcatctcgccgacctcgccgagacattcgcgaacatgcgagacgcacgactccgcctaaacccggaaaagtgcgtcttcggcgttcgccagagcaaaatattgggctacctggtatcacaccgcggcatcgaggccaacccaaccaagatccaggccatcgtagacatgttgcctccgcagtccgccagggacgtccagcgtctgaccggcagactggccgccctcaacagattcatctccaggtccgccgagcgaagtctccccttcctcaaaacacttcgcggtgcaaaggacttcgcctggggaccggagcaggcagcggccttcaccgcactaaagcagtacctgtcggagctggccatcctcacaagccccgactcctcgctccccctattgctctacgtcgcggcttcgccgcatgctgtcagcgcggcactagtgcaggagcagacagtcgagggcatggtcaggcagtgccctgtttactatgtctccgaggtattgacaccgtccaagtgcaacatgacagagctggagaagattgcctacgcagtcgttatgtcttcgcgcaaactgcgccactactttgaagcattcaaggtccgagtcacctcagacagggggctcggcgaattattcagaaacccggaggcatcggtaagaattgccaagtgggcagccgaactgtccggctaccacatcagcttcgagcccaggacagccatcaagtcgcaagtcctagcagacttcgtcatcgactggactgggccaataacacaaccagacccgtccacagagaag

SEQ ID NO: 87796 - DNA, 4500 bp, Zea mays
  Clone ID: MRT4577_180068C.1
atggcacccaagagagctacctcgaaggctgacgaggctgcgaaggcagcactgctggccgagaaaaagggcaaggcccttgtcgacaccacccaccaagaggcctgcgaagacaacgcactcactctggaggacaaccacaacttcccccgaggcttcgctccaccagagggcgcggacgccaccgaggacggcgaagtcatcggcgttttggcagaagaacagctacaactgcgcgcattgcgcatcaagaaccgcaacctccagaagcaaaaagagatcctcgaggccaagcgccaacgcgtgtccgcacaagccaaggtgcgacagatgatacacgacgaagagcagaaggctcaggaacttgaacaagagatcgccctcatgcagagcgaaggccaactcggcctgcaacacggcccacccctccagcagcgcgcacaaatcgaagacttgttcatccctcagcgcggacacgccgtcccacacgtcgcaacattccaaggcatcaactatcttgacgagcgaagtcccctggcgcctcacctgcaggtgtcaccatggcccgccaacttcagggcagggacctatcccaagtacaatggcagcactgaccccgcacagtacatcatgagctatcaggtcgccgttgcatcatccggaggggacgacgccacgatggccaagtcatttatcattgccctcgaaggcccagccctcacctggtacaccaggttgccgccgttgtccatcgactcctggagaagtctccgggacaaattcttgctcaacttccaagggtaccgcccagacaccgatgccttggccgaactttcactctgcaagcagctggaaaaagagactctacgggagtactaccgcaagtttctgaccctcaagtcacaactgcgttcggtcgatgaccaaatcgccatccactacgccatcagtggccttcgggccggcgtcctttacagccactgcatcagggatccacccaagaacctccaggagttgtatcagctatttgaaaaacatgccagatccgaagagctccaccagcgcaaaggccggggacgcgcgcagcagccgcgtagattttactgcctgttccacggcgaagactgcgcccaccctaccagagactgcccagagatgaaggccaccagagataggatgacacgggcgcagccagccgacaaccctagagttgtcgcgcacacatatcagcaaccccctccgccatacatccacggccccgctccgcatccaccgcaccacgcataccagcaccaccaggaggtacaaatcgtacctcccccacccccacctccacaccagcaacaacaaaacatccaccacccccacgccccaaagcaagaggacttcgccgatcagccgtatcgcggagtcattcatatgatcactggggggtccagcgctgacttcgacacaaagcgacagaagagggaccattaccgtagcatcaaccacgtcgccgtcacaggcccaatcgtgcagacaaagtggtcccatgtgccactaaccttcgacgcccgagacgtcgatttgcgcagcgcaccccacatcgacgccatggttatcaactgcagcgtggcaggctgggacctgcataaagtcttagtcgacaatggtagccaggcggatatcatcttcctccatgccttcgatcgcatgggcataagccacaacctgctcaagccttcggacaacccgctgtacggtttcggcggcaagggcacctttcctctcggcaaaatagagttacctctctccttcggtgtagcacccaatgctcgaagtgagcaagtcacattcgacatcgtcgacatggtgtatccgtacaacaccataatgggccggggctccatcaacaagtttgaggcagccattcatggactttacctgtgcatgaagataacaggtccgcaaggtgccatcacggtctacggcaaccagcaggctgcgcgtaacatagaacgagacttcgtccccggacaaagaaacctacagagcaatgatgggaccaagactgttcccctcgaccaggccacgcccaagcagacggtcaccatcagcgaagacctcacttcgcatgatgaggagagactcctctgctgcctgtccaagaataaagacgtcttcgcctggtccgccctcgatctagtcggagtcagtcgttccatcatcgagcacagtttaggaatcgacccttcggtgaggccgaagaaacagaggctgcgtaagatgtctgacgagaagccagaagccgccaaggccgaggtacatcgcctgcttcaggccaaatttatcgagccaatcgcctaccccacatggctcgccaacgtagtaatggtgcataagaacagcggcaagtggcggatgtgcatcgacttcaccagtcttaacaaggcctgccccaaggacaactttccgctgcctcggatcgacaaaatcgtcgatagtgcggccgagtgcgaggtcatgtcactcctcgattgcttttccggctaccatcaaatatatatgaaggaggaggacaaggccagcaccagcttcataacacccttcggcacatattgcttcatcagaatgccggagggactcaagaacgtcgggtccactttctcccggctcaccaaaacggtgctcgagggacaagtcggcagaaatatattcacgtatgtggacgacatcgtcgtcgccagcagaagcaaggaggaccatcttgctgacctcgccgaaacgtttgcgaacatgcgggacgcacgacttcgcctaaaccccgaaaagtgcgtcttcggcgtttgccaggggaaaatattgggctacctggtgtcacaccgcggaatcgaggccaacccaaccaaaattcaggccatcatcaacatgacgcccccgcagtcagccagagatgtccaacgcctgataggcatattggccaccctcaacagattcgtctccaaatccgcagagcgaagtctccccttcctcaaaactctctgcggcacaaaagacttcgcttggggaccagagcaggcggcggccttcgcctcattgaaatacgcagcactggttcaagagcagaccgtagagggcatgatcaggcaatgtccagtttattatgtctccgaagtgctcacaccatcaaaatgtaatatgacggaactggaaaagattgcctatgcagttgttatggcttcgcgcaaattgcgccacaatttcgaggcattcaaggtccgggtcacctcagataggggactcggcgaactgtttagaaacccggaggcatcagttcggatcgccaaatgggcagccgaactttccggctaccacatcacatttgaacccaggacaaccatcaagtcacaagtcctggtagacttcgttgttgactggattgggccaacaacacagccggacccgtcgacagaaaaagtatggacaatccattgcgacggcgcatggtgccatgcgggggcaggcgccgctgcagtcattacttcacccacaggggtcaagcacagatacgcagcacgcctcagctttgctttggagtctaacagatgcactaacaacatagtagaatatgaagctgtcatcctcggctttcgcaagctaagggcccttggtgtcaccacctgcatcatcagaacggactccaaggggtactatcatccaaccgacatcaatgaggccaagcgcctcaaacatcgaagccgggacttcgcactaattgaaggacaactttacaagaagggggtcagtcaacccatgcttaaatgtgtcaccgagaccgaaggcgtccaaattttgcgcgaagtccacagtgggacgtgcggctctcacgcagggcccagggcactagccgcaaagcgctggggcctggacatcatcgagcccctacccacggcccaggggaacctcaagttcaccttcgtcgctgtcgaatattttaccaaatggatcgaggtgagccaagacttcaaggatttctgcttctccattggcaccaagcttgccttcacctcagtataccacccgcaatccaacggagttgtggaacgcgcaaatggaaaaattttcacagctgtcaagaagatgctcctcgacgataaaataggcaagtgggccgatttgttacctgaagcggtctgggcattgaacacgactgagtgcagggcgactgggttcacccctttccgccttctatatggatcggaggccatgaccccgcaagaaataaaacacgggtccccacggacagtcccgtcagctgtccccgacgtggacgagctcacttcgaaggacctcatcgatggagaccgcgtcttcgccctacaagctctaaacaaataccaagcccaaactaaagcatggcgtgaccatgcagtcatcccgagggaattcagcgaaggagacctcgtactcgtccggacagctcggacagagtcccggggcaagctggagcccaagtga

SEQ ID NO: 87797 - DNA, 936 bp, Zea mays
  Clone ID: MRT4577_180069C.1
atgaagacctgtgacgaggtcgtctcatcctgcgacctcgtccagcatggaggcccacgtgcgattcggtccattgtaacaggccctgcgtggccgctgtgcattacaggcctaatttgtgaaggtctccctgtaattacgatctgtaaccctgctttatgggaatattccggggataacctagacttcgctctaccggagggtgcggatgtcaccgaggacgacgaagtcatcggtgtctcagcggaagaacagctacagctgcgcgccctgcgcatcaagaaccgcaatctccagaagcagaaagagatacttgaggccaagcgccaacgtgtgtctgcacaagccaaggtgcggcaaatgacacgagacgaagagcagaaggcccaggagctcgagcaagagatcgcgctaatgcagcgcgaaggccacttcggcctgcaacatgggccacccctgcaacagcgcgcacaagtcgaagacctgcacttcccccagcgcgaccacgccatcccacacgctgcgacattccaaggtgtcaactacctcgacgagcgaagtcccctggcgccacacctgcaagtgacaccctggccggccaacttccgggcagggacctatcccaagtacaacggcagcactgacccagcacagtacatcacgagttatcaggtcgccgttgcatcttccggaggggacgacgccacgatggccaagtctttcatcatcgccctcgaaggcccagctctcacctggttcaccaggttacccccgttgtccattgactcctggagaagcctccgggacaaattcctgctcaacttccaagggtaccgcccagacaccgacgccttggctgaactctcactctgcaagcagctggaaaaagagactctgcgggagtactaccgcaagtttctgacactcaagtcatag

SEQ ID NO: 87798 - DNA, 337 bp, Zea mays
  Clone ID: MRT4577_18006C.1
ttttatagcttaatggatcagacacacaagacaccacattacatcacatgacagtgctggttcatgcgctatttctctaatacaacttcaagaggggatgaaaaatatagacgggagcgaggacagtgacgagcaacttatgaagagtttcgtaagagaaaaaatatgccatgctcatctcgcttaggaaaatcaatgtggttgatatcaagaccacactgtcacgtatgtgccaagcagatctcagagatagcatggtctgcaaagatgccctgaaactgcgagccaaagcgtcacaaaaagctcggaacgatattccaaggcgcacagactatgt

SEQ ID NO: 87799 - DNA, 484 bp, Zea mays
  unsure (1)..(484): unsure at all n locations
  Clone ID: MRT4577_180070C.1
gccagncgccacccgcncacggagacagagaggccganggcgagcncgcnggcccgccggggagcggcgcngccacgcgcgcgcccacgcgcngcgacccgcacccagccaccgccgcggngggacgccgcggcgcncggcgccggggggggcgccgcaccgaacgnangcaggcgccnagnncannccgacgcnaaagnagccccgacancggacgncaaggacagnagcaaancngaaacccggaggagcaagaggcacgacgacggggancgcccncngngnacgcgggagggaaacangcnaagagaaagaaacaaancccanggagcaagaaaagcggcagacanaagcncgaaagagaacncnccagangacaancagggcccagaggaggaaacccccacggggaggaaacacgcggnnccnncagaaggaaccgnaggcacagacggngaggcaannagaaaaccggacgaggaag

SEQ ID NO: 87800 - DNA, 1707 bp, Zea mays
  Clone ID: MRT4577_180071C.1
atgccggagggactcaagaatgcggggtccactttctccagactcaccagagcagtactcgaagggcagtgcgtcttcggcgttcgccagggcaagatattgggttacctggtgtcacaccgcggcatcgaggccaacccaaccaagatccaggccatcgtcgacatgtcgcctccgcagtccgccagggacgtccagcgtctgacaggcagactggccgctctcaacagattcatctccaggtccgccgagcgaagtctccccttcctcaaaacactccgcggcgcgaaagacttcgcctggggaccggagcaagcagcggccttcgcctcactcaaacagtacctgtcggagctggccatcctcaccagccccgactcctcgctccccctattgctctatgtcgcggcttcgccgcacgcggtcagcgcggcactagtgcaggagcagtcagtcgaaggcacagtcagacagtgccctgtttactatgtctccgaagtcctgacaccgtccaaatgcaacatgacagagctggagaagatcgcctacgcagttgtcatgtcctcgcgcaaactgcgccattactttgaagcattcaaggtccgagtcacctctgacagagggctcggcgaattattcagaaacccggaggcatcggtgaggattgccaagtgggcagccgaactctccggctaccatatcagcttcgagcccaggacagccatcaagtcgcaagtcctggcagacttcgtcgtcgactggactgggccagcaacgcagtcggacccgtccacagagaagatctggaccatccactgcgacggcacatggtgccatgcgggggcaggcgtcgctgcagtcgtcacctcaccagccggagtcaagcacagatatgcagcacgcctcaacttcgccctggaatccgacaaatgtacaaacaatatagcagagtatgaagcggttatcctcggcctccgcaagctaagggccctcggagtcaccacatgtatcatcaagacagactccaagatagttgccggacaggtcgagaaagactatgcagcaaaagaccccgccctcatgcaatacctcgcggctatccgaagtctcgagagacaattcaagggattcaccctgcagcatgtggatagggccaggaacgaggaggccgatgccttagccaaggccgccgccaggggcgagcccctgccctccgacgtgtttttccacaccatcggcacgccagccgtccggagccccgaagggctccagataactaatgatagcgaaggccaccgtatagtcaacctaatcatgaccgaagactggagggcaccaataaccctgttcctgcagggatactatcatccagccgacgtcagtgaggcaaagcgcctcagacatcgaagccgggacttcgctctgatcgagggccaactatacaagaaaggggccctaaacaaataccaagcccagaccaaagcatggcgcgaccacgcagtcatcccgagggagttcagcgagggggacctcgtactcatccgaacagctcggacggagtccaagggcaagctggagcccaagtgggagggccccttcatagtcaaaacaaaagcttcccccagcgcctacaggctcacaacgccaaatggcgaggacctggagcactcctggaacatcgacaaccttcgcaaattttttgtttga

SEQ ID NO: 87801 - DNA, 5099 bp, Zea mays
  Clone ID: MRT4577_180072C.1
tcaaacaaaaaacttgcaaagattatcaatgttccaggagtgctctaagtcttcgccgttcggcgttgcgagcctgtatgcgctgggggaggccttcgacttgacaatgtaagggccttcccacatgggctccagcttgcctctggactctgttcgagctgtccggacgagtacgaggtccccttcgctgaactccctcgggatgactgcctggtcgcgccttccttttgtctgggctaggtatttgtccagcgcctgtagcctgaagacgcggtctgcgaagacgtcggtgtccggacggtacccttggaagttgagcaagaatttgtcccggagacttctccaggagtcgatggacaatgggggcaacctggtgtaccaggtgaaggctgggccttcgagggcgatgatgaaggccttggccatcgtggcgtcgtcccctccggatgatgcggcagcgacttgatagctcatgatgtactgtgcagggtcagtgctgccgttgtacttggggtaagttcctgcgctgaagctggccggccatggggagacttgcagatggggagcgaagggactgcgctccttggggtagttgacgcctcggaatgctgtgacatgctggatgtcgggctgcctgccgatgacgactgtgagttcggatggtgcgcgcaagcggaaaaccatactttgcgagaggtatttttggcccgtgtttgatatgatggtggagactgccctgacttccatccacctggtcaagtcgtcaagtgccacaaaggtgaccttggggttcgccggagcagtggggcggtggccgacgatggctcggccccagcactgaaggggccacgtgtgggccatcaacttcgtcaactgggaggggcgtcccgtccctggtgacagtctacgccatgcctcgcgggatctgaaaccgatctttgcggtgcagataatggcgggccagtagaaaccttggcgaatcacctttaccgctagggccctggggcgtgcgtgggggcggcaggttccgttgtggacttccagcagaattagccggcccttggtctgggtgtgaagctcagcctatcgtggtgagcgaggattggctcctacttccatggatctccatatcaggcctgtttttgggcggcgatggcggtatgaaacttggcggcggagcccatggttctgacaggttaagtatttggatcctacactaccacggtgctcgaccccgacaccgtaggtccagggaccgtggtcaccaatgttgctcaatgtggcacttgcagcgccgtgttcggtggtgatgataaagaaatggcaaaatacgaggttgagcatgcgagcttctggcgcgtctcgcacagtcgttgcaagtggtgagaatgggcacactgagactgctggctgcagaggcggtcgctttagcaattgctgaagactgcgggggtccgcgacgtacggcataattccgccgtctgtagctgcatagtgtttctcgacttggccggcgactagcttggagtctgctcgtactctccaggtgttgacaccgagggctcttagtttgcggaggccgaggatgacagcttcgtattctgctatgttgtttgtgcatctgtcggattccagagcgaagcttaagcgtgtcgcgtatctgtgcctgaccccggcgggtgaggtgatgaccacatcagcgcctgcccccgcatggcaccaggcgccgtcgcagtggattgtccaaaccttctctgcggatggatccagctgtgttattagcccggtccagtcgacgacgaagtctgctagaacttgtgacttgatcgccgtccttggctcggaagtgatgtggtagatggagacatctggcgtcgttgaagcattccgtgaattcttgagagacgatcctggtagctcgcgtgtgcaacttccggaggcgtcgagtacggttatttcttgaaattagtggcgcaagcagggctaaagttcaatctctgcacgaagaatcatttcacctgatcacatccttccttgactccgagttgagagtcgaagctttgctgacgctgcttgagttgagtaggcactggagttgtccgaaatctcaagttatggcccctcttgctactcctgcactgttcaaaatagcggcgacagggtggaccgggggttctggagtgcctctggcattctgatgaaggaatacgtcctgagcggtgatatgaagttcgtgcggtctttgggctcttccttcgtggatagttgatgataaccggagaagcagtcgaggagtgacatgaccttgcacccggccgcgctatcgactattttgtcgatccggggcaacgggaagttgtcctttgggcaggcctggttcagaatggtaaagtctatgcacattcggcacttcccactcttttcacgcggttgttagacttttagctgtatgttcgtgcagcgccgaggactgtctgcttgtaatgaaggaaggcgtgatccccgccctagtggacctgtcggtgaacggaaccgaagaagcgaagggctgttcgacgaagctgcttcatcttctccgggacatgaggcgaaacgaccagttcaccaactcgtgctcacaagaagtggctgccacaggcatggtagtagaggatgctcccaagaactcggttcgacttggtcccgtcgttgctttgcagctgcgccttatgttgtttttcagttgggctggcgggcgctgggacctcgcgctgggccgtaaggcagtggacatttctttgcccagggacgaagtcccgctctatattgcgcgcagtctgctgattgtcgtagaccgagatggcacctaacggacctggtatcttcatgcacaggtacaatccgtgaatggctgcttcaaacttgttgatggagccccggcccatgatggcgttgtacggacacaccatgtcgacgatgtcaaaggttatttgctcacttcgggcattgggcgctacaccgaaggagagaggcaactctattttgccgataggaaaagtgcccttgccgccgaagccgtacaatggattgtccgaaggcttgagcaagctgtggcttatgcccatgcggtcgaaggcatggaggaaaatgatgtctgcctgactgccattatcgacgaggactttgtgcaggtcccagcctgccacgctgcagttgatgaccatggcgtcgatatggggggcgctgcgcaggtcgacgtctcgggcgtcgaaagttagtggtacatgggaccacttcgtctgcacgactggaccggtgatggcgacgtggttgatgctgcggtagtggtcccgcttttgtcgcttggtgtcgaagtcgacactggaccccccagtgatcatatgaatgactccacgatacggctgatcggcgaagtcttcttgcttgggggtgtgggggtgggggatgttttgttgttgctggtgtggaggtgggggtgggggaggtacgatttgtacttcctgatggtgttggtaagcgtggtgcggtggatgcggggcgggggcgtggatgtatggtggagggtgttgctgataagtgtgcgcgacgactcttgggttgtcggccggttgcgcccgtgccatcctgtctctggtggccttcgtctctgggcagtctttggtttggtgggcgcagtcttcgccgtggaagagacagtagaatcggcgcggcggctgcgcgcgtccccggcccctaccgcgagttccacttccgcggccctgagggggatattcctggcggcgaggggcatcaccagcggggtgctggttggcaatgttgtgcacctgctgctgattacggccgtctcgaccggagtctggctgcggagtcctcgtccacgtgcggctggattgtggagcatctttgggtttcctctgagactcaaccttgcgctggtggagctcttcggatttggcatatttttcaaatagctgatataattcctggaggttcttgggcgggtccctgatgcagtggctgtaaaggacgccggcgcgaaggccactgatggcgtagtgaatggcgatctggtcatcaactgagggcagctgtgacttgagtgttagaaacttgcggtagtactcccacagagtctctttttccagttgcttacagagtgagagttcggccaaggcgtcggtgtctgggcggtacccttggaagttgagcaggaatttgtcccttaggcttctccaggagtcaatggacagcgggggcaacctggtgaaccaggtgagagctgggccttcgagggcgatgatgaaagatttggccattgtggcatcgtcccctctagaagatgcaacggcgacctgataactcatgatgtactgtgctgggtccgtgctgccgttgtacttgggataggtccctgcccggaagttggcaggccagggtgtcacttgcagatgtggtgccaagggacttcgctcgtcgaggtagttgaccccttgaaatggcgcggcgtgtgggaaggcgtagtcgcgctgggggaagtgcgggtcttccacttgcacgcgctgttgtaggggtggcccgtgctgcaggccgaggtggccttcgcgaatgtcttccacttgcgcgcgctgttgcaggggtggcccgtgctgcaagccgaggtggccttcgcgctgcatcagcgcgatctcccgctcgaggtcctgggccttctgctcttcgtcgcgtatcatttgccgcaccttggctagtgcagacacgcgctggcgcttggcctccagtatctctttttgcctctggagattgcggttcttgaggcgcagggcgtgcagctgtagctgttcttccgctgaaacgccgaggacttcaccgtcctcggtgaggtccgtgccctccggtggggcaaagcctgggggaggttgcggttgtccttcatggccgcaggtgtggagagcgtcgtcttcgcaggtgcggggaacatcgtctttagcagcctcttggtgggtggagtgggtgagtgcgagggccttgcccttttttgcggccagcagtgctgccttcgcagcctcgtcaaccttcgagctagctttcttgggtgccat

SEQ ID NO: 87802 - DNA, 284 bp, Zea mays
  Clone ID: MRT4577_180073C.1
gcgagaaagagcgcgccgcctgcacgactggactggagcggccgggtgccctggaggcccctgggaattgcagtccttgcgcaggtggagagtgagcccttatgagaaaactcaagactcagaaacaataaaggttacagagatgaaattgacagagcctgaatttcaggttatgattctgtatggtttctttggtgctgcattagacctgaactctgattgaaaattcttccacgctcgctacattcttaaactttatctccaatatgaatttccagatgcct

SEQ ID NO: 87803 - DNA, 4998 bp, Zea mays
  Clone ID: MRT4577_180074C.1
atggcacccaagaaagctagcccgaaggctgacgaggctgcgaaggcagcactgctggccgagaaaaagggcaaggccctcgccctcgtcgacaccacccaccaagaggccaccgaagacggcgctctcagcaagaggcagcgcaacgaacaacccactcccgaaggcagtctccgcacctgcagctctggaggacaaccgcaacttcccccaggcttcgctccaccggagggcgcggacgtcatcgaggacggcgaacgcggccacaccatcccacacgccgcggcattccaagatgtcaactacctcgatgagcgaagtcccctggcgccacacctgcaagtgacaccttggcccgccaacttccgggcagggacctatcccaagtacaatggcagcactgacccagcacagtacatcatgagttatcaggtcgtcgttgcatcttccggaggggacgacgccacgatggccaagtcattcatcatcgccctcgaaggcccagccctcacctggtacaccaggttgcccccgttgtgcatcgactcctggagaagccttcgggacaaattcctgctcaacttccaaggctggaaaaaagagactctgtgggagtactaccacaagtttctgaccctcaagtcacaactgccttcggtcgatgaccaaatcgccatccactacaccatcagtggccttcgagccggcgttctttacagccactgcatcagggatccgcccaagaacctccaggagttgtatcagctatttgaaaaatatgccagatccgaagagctccaccagcgcaaagtcgagtctcagaggaaacccaaagacactccacagtccagccgcacgtggacgaggccttcgcagccagactccggtcaggacggccgcaatcagcagcaagtgcacaacatcgccaaccagcaccccgctggcgaggcccctcgccgccaggaatatcccccccagggccgcgggaacggaactcgtggtcggggccggggacgtgcgcagcagccgcgccaattttactgcctgttccacggcgaagactgcgcccaccaaaccagagactgcctagagacgaaggccaccagagacaggatggcacgggcgcaaccagccgacaaccctagagttgttgcgcacacatatcagcaaccccctccgccatacatccacggccccgctccgcatccaccgcaccacgcataccaacaccaccaggaagtacaaatcgtacctcccccacccccacctccacaccagcaacaacaaaacatccaccacccccatgccccaaagcaagaggacttcgccgatcagccgtatcgcggagtcattcatatgatcactggggggtccagcgccgatttcgacacgaagcggcagaaacgggaccactaccgcagcatcaaccacgtcgccatcatcggtccggtcgtacagacaaagtggtcccatgtgccgctaaccttcgacgcccgagacgtcgatctacgcagcgccccccacatcgacgtcatggttatcaactgcagcgtggcaggctgggacctgcacaaagtcctagtcgacaatggcagccaagcagacatcattttcctccatgccttcgaccgcatgggcataagccacagcctgctcaagccttcggacaacccactgtatggcttcggcggtaagggcacgtttcccgtcggcaaaatagagttgcctctctccttcggtgtagcacccaatgcccgaagtgagcaagtgactttcgacatcatcgacatggtgtactcgtacaacgccataatgggtcggggctccatcaacaaattcgaggcagccattcatggactctacctgtgcatgaagatcccaggtccgcaaggcgccatcacagtctacggcaaccagcagaccgcgcgcaacatagaaagagacttcgttcccgggcaaaggaacgtacactgtctcacggcccagcgcgaggtccccgaatctgccagcccaaccgctagagaacatgacaaagcacagctgcagagtaacgacggaaccaaaactgtcccccttgacaaggcgacacccaagcaaacggtcaccatcagcgaagacctcacttcgcatgacgaggagaaactcctctgctgtttgtccaagaacaaagacgtcttcgcctggtctgccctcgacctagtcggggtcagtcgctccatcatcgagcacagcttgggaatcgacccttcggtgagaccgaaaaaacagcggctccgcaaaatgtctaatgagaagacagaagccgccaaggccgaggtacatcgcctcctggaggccaaatttatcgagccagtggcctaccccacatggatcgccaacgttgtgatggtgcagaaaaagagcggcaaatggcggatgtgcatcgatttcaccagtctcaacaaggcctacccaaaggaaaacttcccgttgcctcggatcgacaaaatagtcgatagcgcggccgggtgcgaagtcatgtcactcctcgactgcttctccggctaccatcaaatatacatgaaggaggaggacaaggccagcaccagcttcataactcccttcggcacgtattgcttcatcagaatgccggagggactcaagaacgtcgggtccactttctcccggcttaccaaaacggtgctcgaggggcaagtcggcagaaatatattcacgtatgtggacgacatcgtcgtcgccagcagaagcaaggaggaccatcttgctgacctcgccgaaacgtttgcgaacatgcgggacgcacgacttcgcctaaaccccgaaaagtgcgtctttcgcgttcgccaggggaaaatattgggctacctggccattatcaacatgacgcccccgcagtcagccagagacgtccaacgcctgacaggcagattggccgccctcaatagattcatctccaaatccgcagagcgaagtctccccttcctcaaaactctctgcggcgcaaaagacttcgcttggggaccagagcaggcggcgaccttcgcctcattgaaacagtacctgttggaattggcgattcttacaagccccgactcttcgctaccactgttgctctatgttgcggcttcgccacatgcggtcagcgcggcactggttcaagagcagacagtagagggcatgatcaggcaatgtccagtttattacgtctctgaagtgctcacaccatcaaaatgtaatatgacggaactggaaaagattgcctatgcagttgttatggcttcacgcaaattgcgccactattttgaagcattcaaggtccgggtcacctcagataggggactcggcgaattattcagaaacccggaggcatcggtctggattgccaaatgggcgaccgaactctccggctaccacatcacattcgagcccaggacaaccatcaagtcacaagttctggcagacttcgtcgtcgactggactgggccaataacacagccggacccgtccgcagagaagtctgacagatgcactaacaacatagcagaatacgaagctgtcatcctcggcctccgcaaactaagggcccttggtgtcactacctgcattatcagaacagactccaaggtagtcgccagccaagtcaagaaagactacgcagcgaaggaccccgcacttatgcaatacctcgcggctatccgtagtctcgagagacaattcaaaggtttcaccttgcagcatgtggaccgggccaagaatgaggaggccgatgcattggccaaggctgccgccagaggcgagtccctgccctccgacgtgttctaccatgttatcggcacgccacccgtccgcagccccgaagggctccaaataaccaatgacaacgagggccacagcatagtcaaccttattatgaccgaagactggcgggcaccaataaccctgtttctacaggggtactaccatccaaccgacatcaacgaggccaagcgcctcaaacatcgaagccgggacttcgcactaattgaaggccagctttacaagaagggggtcagtcaacccatgctcaaatgtgtcaccgagaccgaaggcgtccaaatcctgcgcgaagtccacaacgggacttgcggctctcacgcagggccaagggccctagtcgcaaagcgctggggcctggacattgtcgggcccctgcccacggatcaggggaacctcaagttcaccttcgtcgttgtcgagtattttaccaaatggatcgaggcgagggctgtatccacaataacatcaaagactgcacagaaattcttctggcaaaacattgtttgctgcttcggagtcccgtccgaactcacagttgacaacgacaagcaatttgacagccaagacttcaaggatttctgcttctccattggcaccaagcttgccttcgcttcagtataccacccgcagtccaacgaagttgtggaacgcgcaaatggaaaaattttcacagctgtcaagaagatgctcctcgacgataaaaagggcaagtgggccgatttgttacctgaagcggtctgggcactaaacacgactgagtgcagggcgactgggttcacccctttccgccttctatatggatcggaggccatgaccccgcaagaaataaaacatgggtccccacggacagtctcgtcagctgtccccgacgtggacgagcccacttcgaaggatcacatcgatggagaccgcgtcttcgccctacaggctctaaacaaataccaagcccaaacaaaagcatggcgtgaccacgtagtcatcccgagggaattcagcgaatatgacctcgtactcatccagatagctcggacagagtcccggggcaagctggagcccaagtgggagggaccttttatcgtcaagacgaaggcgtcccccagcgcgtataggctcgcaacgccagccggcgaggacttggagcattcttggaacattgataatctccgcaaattttttgtttga

SEQ ID NO: 87804 - DNA, 489 bp, Zea mays
  Clone ID: MRT4577_180075C.1
atagtagccgagcgaatatagatgaatgacactaatagttacaagacattcattacctaaagggacgacttacaaaactgaaccttaatatcacacgaactaaggatcgttggatccaatgtcaattgagaatacaccacctggatagactagagctcttcgatacgcggctcctgcagaaccagccggccctgtactcggctcttaacatgaacagtgatcaaggggatgcttcagatcctccaggcctcactaggacggagcattgggatctcctgcccatggagagactccgtcttgaagatccgacgagcagcccaacctgcgcccctgcaccgatccgtccaacgaagaacccgccaataaactcggagcagtggcgaaactcaccgaatcgagctcgagcttcgaacactagccgagatatggacccatggcatgcgtgccggctccgcagatgcatggtggctccacgcacggggaatccac

SEQ ID NO: 87805 - DNA, 1980 bp, Zea mays
  Clone ID: MRT4577_180076C.1
atggcacccaagagagctaacccgaaggctgacgaggctgcgaaggcagcactgctagccgcaagaaagggcaaggccctcgccctcacccaatccacccaccaagaggccactgaagacgacaccctccgcacctgcggccctgaaggacaatcacagccacccccaggcttcgccccgctggagggcgcagacctcaccgaggacggtgaagtcctcggcgtctcagcggaagaacagctacaactgcgcaccctgcgcctcaagaaccgcaatctccagaggcagaaagagatactagaggccaagcgccagcgcgtgtccgcactagccaaagtgcggcaaatgatacgtgacgaagagcagaaggcccaggacctcgagcgggagatcgcgctgatgcagcgcgatggccaccttggcctgcagcatgagccacccctccaacagcacgcacaactggaagacacgcgcgaaggccacctcggcctgcagcatgaaccacccctccaacagcgcgcacaaccggaaggcccgcgtttcccccagcgcgaccacaccttcccgcacgccgcgccattccaaggggtcaactacctcgacgagcgaagtcccctggcgccacacctgcaagtgacgccttggccagctaacttccgggcaggggcatatcccaagtacaacggcagcaccgacccagcacaatatataatgagttatcagctccaccagcgcaaggttgagtcgcagcggaaacccaaagatgctccacagtccagccgcacgtggacgaggactccgcagccagactccggtcgagacggccgcaatcagcagcaagtgcacaacatcgccaaccagcaccccgctgccgacccccctcgtcgccaggaatatcctccccagggccgcggaaatggaactcgtggtaggggtcgagggcgtgcgcagccgccgcgccgattctactgcctcttccatggcgaagactgcgcccaccaaaccaaagactgccccgaaacgaaggccaccagagacagaatggcacgggcgcagccagccgacaaccccagagttgtcgcacacacttaccagcaaccccctccaccatatatccacgcccccgccccgcatccaccgcaccacgcttaccaacaccatcaggaagtacaaatcgtacctcccccacccccaccaccacaccagcaacatcaaaacatcccccacgccccaaagcaggaagactttgccgatcaaccgtatcgcggagtcattcacatgataacgggggggggggggtccagcactgacttcgacaccaagcggcagaagcgggaccactaccgcagcatcaaccacgtcgccgtcactggcccagtcgtgcagacaaagtggtcccacataccgctaaccttcgacgcacgagacgtcgacctgcgcagcgccccccatatcgacgccatggttatcaattgcagcgtggcaggctgggacctacacaaagtcctagtcgacaatggtagtcaggtggacatcatcttcctccacgccttcgaccgcatgggtataagccacagcctgctcaagccttcggacaacccgttgtatggcttcggcggcaagggcacttttcctgtcggcaaaatagagttgcccctctccttcggtgtagcacccaatgcccgaagtgagcaagtgacttttgatattgtggatatggtatatccatacaacgccatcatgggtcggggctccatcaataagttcgaagccgccattcacggactgtacctatgtatgaagataccaggtccgctaggcgtcattacggtctacggcaaccaacagacggtgcgcaacatagagcgggacttcgtgcccggtcagagaaacgtgcactgcctcacggcccagcgcgaggtccctgcgcccgccagcacaaccgataaacagcatgacaaggcacaactgcagagctaa

SEQ ID NO: 87806 - DNA, 945 bp, Zea mays
  Clone ID: MRT4577_180077C.1
atggcacctaagagagctacctcgaaggctgatgaggctgcgaaggcagcactgctggccgagaaaaagggcaaggcccttgtcgacaccacccaccaagaggcctgcgaagacgacgcactcagcaagaggcagcgcaacgagcaacccactcccgaaggcagtctccgcacctgcagctctggaggacaaccacaacttcccccaggctttgctccaccagagggcgcggacgccaccgaggacggcgaagtcatcggcgtttcggcagaagaacagctacaactgcgcgccttgcgcatcaagaaccgcaacctccagaagcaaaaggagatcctcgaggccaagcgccaacgcgtgtccacgcaagccaaggtgtcaccatggcccgccaacttcagggcagggacctatcccaagtacaacggcagcactgacccagcacagtacatcatgagctatcaggtcgtcgttgcatcatccggaggggacgacgccacgatggccaagttgccgccattgtccatcgactcctggagaagtctccgggacaaattcttgctcaacttccaagggtaccgcccggacaccgacgccttggccgaactctcactctacaagcagctggaaaaagagactctgcgggagtactaccgcaagtttctaaccctcaagtcacaactgccttcagtcgatgaccaaatcgccatccactacgccatcagtgactttcgggccggcgtcctttacagccactgcatcagggatccgcccaagaacctccaggagttgtatcagctatttgaaaaatatgccagatctgaagagctccaccagcgcaaagtcgagtctcagagaaaacccaaagacactccacagtccagccgcacgtggacgaggccttcgcagccagactccggtcgggacggccgcaatcagcagtag

SEQ ID NO: 87807 - DNA, 4530 bp, Zea mays
  Clone ID: MRT4577_180078C.1
atggcacccaagaaagctagctcgaaggctgacgaggctgcgaaggcagcactacttgccgcgagaaagggcaaggccctcgccctcacccaatccacccaccaagaggccactgaagacgacgttctccgcacccgtgaagacgacactctctgcacctgcggccttgaaggacaatcgcagcctcccccaggcttcgccccaccgaagggcgcggacctcaccaaggacgccaaggtacgacgaatgatacgcgacgaagagcagaaggcccaggacctcgagcgggagatcgcgctgatgcagcgcgaaggccaccttggcctgcagcacgggccacccctgcagcagcgcgcacaactggaagacacgcgcgaaggccacctcggcctgcagcacgggccacccctgcaacaacgcgcacaaccggaagacccgcgtttcccccagcgcgaccacaccttccggcacgccgcgcctttccaaggggtcaactacctcgacgagcgaagtcccctggcgccacacctgcaagtgatgccttggcccgccaacttctgggcagggacctatcccaaatacaacggcagcaccgacccaacacaatacataatgagttatcaggtcgccgttgcatcttccggaggagacgacgccacaatggccaagtctttcatcatcgccctcgaaggcccagctctcacctggttcaccaggttgcctccgctgtccattgattcctggagaagcctccgggacaagttcctgctcaacttccaagggtaccgcccagacactgacgccttggccgaactctcgctttgcaagcagctggaaaaggagactccgcgggagtattaccgcaaatttttaacactcaagtcacagctgccctcagtcgatgaccagattgctatccactacgctatcagtggccttcgcgtcggcgtcctctacagccactgcatcagagatccacccaagaacctccaggaattatatcagctgtttgaaaaatacgccaaatccgaagagctccaccagcgcaaggttgagtcccaaaggaagcccaaagatgctccacagtccagccgcacgtggacgaggactccgcagcaagactccggtcgagacggccgcaaccaacagcaagaagacttcgccaatcagccgtatcgcggagtcattcacatgataactggggggtccaacactgacttcgacacaaagcggcagaagcgggaccactaccgcagcatcaaccacgtcgccatcactggcccagtcgtgcagacaaagtggtcccacataccgctaaccttcgacgcacgagacgtcgacctgcgcagcgccctccactgcgacgccatggttatcaattgcagcgtggcaggctgggacctacacaaagtcctagtcgacaatggcagtcaggcggacatcatcttcctccacgccttcgatcgcatgggcataagccacaacctgctcaagccttcggataacccgttgtatgacttcggcggcaagggcacctttcctgtcggcaaaatagagctgcctctctccttcggtgtagcacccaatgcccgaagtgagcaagtgacctttgacattgtggatatggtatatccgtacagcaccatcatgggccggggctctatcaataagttcaaagcagccattcacggactgtacctatgtatgaagataccaggtccgttaggcgtcatcagggtctacggcaatcagcagactgcgcgcaacatagagcgggacttcgtgcctggtcaaagaaacgtgcactgcctcacagcccagcgcgaggtccccgcgcccgccagcccaaccgataaacagcacgacaaggcacagctgcagagcaacgacgggaccaagactatccccctcgaccaggccacgcccaagcagacagtcactatcagcgaagacctcacttcgcatgaagaggagaagctcctctgctgcctgtccaagaacaaagatgtcttcgcctggtcagccctcgacctggtcggggtcagccgatccataattgagcacagctcgggaatcgaccgttcgatgtccgacgagaagacagaggccgccaaggcagaagtgcaccgcctcctggaagccaaattcatcgagccggtggcataccccacgtggctctccaacgttgtgatggtgcagaaaaagagcgggaagtggcgaatgtgcatcgacttcaccagtctcaataaggcctgcccaaaggacaacttcccgttgccgcggatcgacaaaatagtcgatagcgcggccggatgcgaagtcatgtcactcctcgactgcttctccggttaccaccagatatacatgaaggaggaagacaaggctagcaccagctttataacccccttcggcacatattgcttcatcagaatgccggagggactcaagaatgtcgggtccaccttctccaggcttaccaagatatgcgtcttcggcgttcgtcaaggcaaaatattgggctacctggtatcacaccgcggcatcgaggccaacccaaccaaaattcaagccatcataaacatgacgcctccgcagtccgccagagacgtccagcgcttgacggggagattggccgccctcaacagattcatctccagatccgctgagcgaagtctccccttcctcaaaactctccgtggtgcaaaagacttcgcttggggaccagagcaggcagcggccttcgcctcattaaaacagtacctgtcggagttggcagtccttacaagccccgactcttcactacctctgttgctctatgttgcggcttcgccgcatgcggtcagcgcggcactggtgcaggagcaggcagttgagggcgcgatcaggcagtgcccaatttattacgtctccgaagtgctgacgtcgtccaaatgtaacatgacagaactggagaagattgcctacgcagtcgttatgtcttcgcgcaaattgcgctattattttgaagcattcaaggtccgggtcacctcagacaagggactcggcgaattgttcagaaactcggaagcatcggtgaggattgctaagtgggcggccgaactctccggctaccacatcaatttcgagcccaggacagccatcaagtcacaagtcctggcagacttcgtcgtcgactggactgggccaataacacagccggacccgtccgcagagaaggtttggacgattcattgcgacggcgcatggtgccatgcgggggcaggcgccgcggcagtcatcacctcaccaaccggagtcaagcacagatatgcggctcgcctcatcttcgctctagaatccgacagatgcacaaataacatagcagaatacgaagcagtcatcctcggtctccgcaagctgagggcccttggggtcaccacttgcatcatcagaatagactccaaggtagtcgccggccaggtcgagaaagactatgcagcaaaggaccccgcactcatgcaatacctcgcggccatccgaagtctcgagagacaattcaagggattcactttgcaacatgtggaccgggccaagaatgaagaggccgacgcattggctaaggctgccgccagaggcgagtccctgccctccgacgtgttctaccatgtcatcggcacaccagccgtccggagccccgaagggctccaaataaccaatgacaacgagggccaccgcatagtcaaccttatcatgaccgaagactggcgggcaccaataactctgttcctacaggggtattatcacccaaccgacatcaatgaggccaagcacctcaaacatcgaagccgggacttcgcactgattgagggccaactctacaagaagggggtcagtcagccaatgctcaaatgcgtcaccgaaaccgaaggtgtccagatcctacgcgaagtccacagtggtacctgtggctctcacgtagggccaagggccctagctgctaaggtgatccgccaaggcttctactggcccgcaatgatttgcgccgcaaattgggtcacacggtcctgcgaagcctgccagaagttttcccctcgatcaggcagcgcttcgcaattcacaaagctgatcgcccacacatggcctctccagcgctggggcctagacatcgtcgggcccctacccacggctcaggggaaccttaagttcgccttcgtcgctgtcgaatacttcaccaaatggatcgaggcaagggctgtctccacaataacatcaaagactgcccaaaaattcttttggcaaaacattgtttgccgcttcggagtaccgtccgaactaacagtcgataacggcaagcagtttgacagccaagacttcaaagatttttgcttctccatcagcaccaagctcgccttcgcctcagtctatcacccgcagtccaacggagttgtggaacgcgccaatggaaaaatcttcacagctgtcaaaaagatgctcctcgacgaaaaaagggcaggtgggccgatttgttacccgaggcggtctgggcactaa

SEQ ID NO: 87808 - DNA, 265 bp, Zea mays
  Clone ID: MRT4577_180079C.1
gcctggcaactgtgctgtacaggaacctgtatagaaagacgaagttcactatctgagaggatacctgtgggactgaacctgggatcgttgaagcgagaaatacagcagaagcatatgtccatactcgaaatgctgaccttgaaacggtctctgggcaattactacacaggcaagaactgcgggtatatcgggtaccacagccttaaaggcggatatgtgactgcagatgaaaaggtgccaagagaactggaccctgacacgactg

SEQ ID NO: 87809 - DNA, 415 bp, Zea mays
  Clone ID: MRT4577_18007C.1
cacacaaacacgagcacacatacaatcactctttagctcacgactaacaacggcctatacgtgaggcatcatccaggcaacaacggcactggctactttctgtgtgatcggttcgctcactatgccactcaccttaaaggtaggcaaaggctgcaatcctgaacacctggtcctcaccccaaacattgccaccatcaccgaaacggagatcatggatcacggtctcgatgacttctcctttgagctcaaagagggccacgtcgacacctgtacgcttgacacaaaggccccactcaagtacacgctctgcatccgctttgccagcaaggttgacggctactcgcatctcgatgatgtcatccctgaaaattttaatgcacacaccagctacaagaccacgctcaaaatctgatca

SEQ ID NO: 87810 - DNA, 3984 bp, Zea mays
  Clone ID: MRT4577_180080C.1
atggcacccaagagagctaacccggaggctgacgaggctgcgaaggcagcactgctcgccgcaagaaagggcaaggccctcgccctcacccaatccacccaccaagaggccacggaagacaatgttccccgcacctgcgaagacgacactctccgcacctacggccctgaaggacaatcgcagccacccccagccttcgccccactagagggcgcggacctcaccgaggatggtgaagtcctcggcgtctcagcggaagaacagttacagctgcgcgccctgcgcctcaagaaccgcaatctccagaggcagaaagagatactggagtccaagcgccagcgcgtgtccgcactagccaaagtgcggcaaatgatacgtgacgaagagcagaaggcccaggacctcgagcgggagatcgcgctgatgcagcgcgaaggccaccttggcctgcagcacgggccacctctccagcagcgcgcacaactggaagacacgcgcgaaggccacctcggcctgcagcatgggccacccctgcaacaccgcgcacaaccggaggacccgcgcttcccccagcgcgaccacaccttcccgcacgccgcgccattccaaggggtcaactatctcgacgagcgaagtcccctggcgccacacctgcaagtgacgccttggccagctaacttctgggcagggacctatcccaagtacaacggcagcaccgacccggcgcagtacataatgagttatcaggtcgccgttgcatcttccggaggggacgacgccacaatggcgaagtctttcatcatcgccctagagggcccagctctcacctggttcaccaggttgcctccgctgtccattgattcctggagaagcctccgggacaagttcctgctcaacttccaagggtaccgcccagacaccgacgccttggccgaactctcgctctgcaagcagctggaaaaggagaccctgcgggagtattaccgcaaatttttaacactcaagtcacagctgccctcagtcgatgaccagatcgctatccactacgctatcagtggccttcgcgccggcgtcctttacagccactgcatcagagatccacccaagaacctccaggaattatatcagctgtttgaaaagtacgccaaatccgaagagctccaccagcgcaaggttgagtcccaaaggaagccaaaagatgccccacagtccagccgcatgtggacgaggactctgcagccggactccagtcgagacggccgcagtcaacagcaagtgcataacattgccaaccagcaccccgctgctgacgcccctcgtcgccaggagtatcccccccagggccgcggaaatggaactcgctgtaggggtcgggggcgtgtgcagccgccgcgccaattctactgcctcttcaacgacgaagactgcgcccaccaaaccaaagactgcccagaaacgaaggccaccagaggcaggatggcacaggcacaaccagccgacaaccccagagttgtcgcacacacttaccagcaaccccctccaccatatatccacgcccccgccccgcatccaccgcaccacgcttaccaacaccatccggaagtacaaatcgtacctcccccacccccaccaccacaccagcaacatcaaaacatccccaatgctccaaagcaggaagacttcgccgatcagccatatcgcaaagtcattcacatgataactggggggtccagcactgacttcgacacaaagcagcataagcgggaccactaccgcagcatcaaccacgtcgccgtcaccggcccagtcgtgcagacaaagtggtcccacataccgttaacattcgacgcacgagacgtcgacctacgcagcgccccccactgcgacgccatggttatcaattgcagcgtggcagactgggacctgcacaaagtcctagttgacaatggcagtcaggcggacatcatctttctccacaccttcgatcgcatgggcataagccacagcctgctcaagccttcggacaacccgttgtatggcttcggcggcaagggcacctttcctgtcggcaaaatagagctgcctctctccttcggtgtagcacccaatgcccgaagcgagcaagtaacctttgatatcgtggatatggtatatccatacaatgccatcatgggccggggctccatcaataagttcgaagcagccattcacggactgtacctgtgtatgaagataccaggtccattaggcatcattacagtctacggcaatcaacagactgcgcgcaacatagaacgggacttcgtgcccagtcagagaaacgtgcactacctcacggccgagcgcgaggtccccgcgcccgccagcccaaccaataagcagcacaacaaggcacagctgcagagcaacgacgggaccaagactgtccccctcgatcaggccacgcccaagcagacattcactatctgcgaagacctcacttcgcatgaagaggagaagctcctctgctgcctgtccaagaataaagatgtcttcgcctggtctgccctcgatctggtcggagtcagccgatccataattgagcacagcttgggaattgacccttcggtgcgaccaaaaaagcagagacttcgcaaaatgtccgacgagaagacagagtccgccaaggcggaggtgcaccgcctcctggaagccaaattcatcgagccggtggcttatcccacgtggctctccaatgttgtaatggtacagaaaaaaagcgggaagtggcgaatgtgcatcgacttcaccagtctcaacaaggcctgcccaaaggacaatttctcgttgccacggattgacaaaatagccgatagcgcggccggatgcgaggtcatgtctctcctcgactgcttctccggttaccaccagatatacatgaaagaggaagacaaggctagcaccagctttataacacccttcggcacatattgcttcatcagaatgccggagggactcaagaacgccgggtccaccttctccaggcttaccaaaacagtgctcgaagggcaagttggcagaaatatattcacatatgtggacgacattgtcgtcgccagcaagagcaaggaggaccatctcgccgacctcgctgagacattcgcgaacatgcgagacgcacgactccgcctaaacccggaaaagtgcgtcttcggcgttcgccaaggcaaaatattgggctacctggtatcacaccggggcatcgaggccaacccaaccaagattcaagccatcataaacatgacgcctccgcagtccgccagagacgtccagcgcctgtcaggcaggttggccgctctcaacagattcatctccagcgcagcactagtgcaggagcagacagttgagggcgtggtcaggcagtgccccgtttactatgtctccgaagtgctgacaccgtccaagtgcaacatgacagagctggagaagattgcctacgcagtcatcatgtcttcgcgcaaattgcgccattacttcgaagcattcaaggtccgagtcacctcagacaggggacttggtgaattgttcagaaacccggaggcatcggtgaggattgccaagtgggcggccgaactcttcggctaccacatcagcttcgagcccaggacagccatcaagtcacaagtcctggcagacttcgtcgtcgactggactgggccaacaacacagccagatccgtccgtagagaaggccctaaacaaataccaagcccagacaaaagcatggcgcgaccacacagtcatcccgagggaattcagcgaacgggacctcgtactcgtccgaacagctcggacagagtccaggggcaagctggagcccaagtgggagggcccctttatagtcaagacgaaagcttcccccagcgcttacaggctcacaacgccaaacggcgaagacctggagcactcctggaacatcgacaacctccgcaaattttttgtttga

SEQ ID NO: 87811 - DNA, 529 bp, Zea mays
  Clone ID: MRT4577_180081C.1
gtaactcgtaacattagactgcctgccattgcacaacatcacacattttacttacaaaaggtgcatccttgatcctaacactgggactccaccttcaccctcttccatttttgcggggtttccctagtagacctagacacaccagaggactgaacacgacttagagagcagcagcagtaaactaccagaccagctgcgttttgttatatttttggtcattttttttacttgcttgctatacacagaaggaacttctacagttgtactactactcattactactcgaacccaccaccagtacttgacttgaaactttgttgaaagagcagagcagaccgcaacggcagcagccagggagcaaaggctggaagaggggcagcagccttgctgagttccccatgcgatgcgaacctagcgaggctggtggatcacgcggggggcgctgctcttggggctgccggcgtacttggtcggcttctcggagtgcctgggcttctcccggaacccacgcggggcgtcgccgcccttc

SEQ ID NO: 87812 - DNA, 747 bp, Zea mays
  Clone ID: MRT4577_180082C.1
gaacggcaagatgtggtgggaatccacgccagcgtccggaggccagcatggagagcacatgagcctcatcctgcacttccagctcgtctatggagtggcatcaccctctgcctcctccccggcaggcggcggcggattctaccacatcggtggcagattcggagtgccctcgccgtccaccagtgctcctcctcagcacaacttcaacggcctgcgcgtcctgctcttgaacactgatgacaccagccgggaggtgacgcggaagctcctggagaggctcggctgccaggtgcttccagttccatcggccgcccgctgcctcagccttctactggggagcgccaccgccaccggcggcggcgatcagccgtcattccagtccccgtacttggtactgcaggcggtgcttgtagacctccacacacctgccgcagctatcgccgacgccgccactgcaatggatgatgggtttgaggttgccctcaggatccgggaggtcaccggcgacaggttcagctggctgctcatacttgtcgcgctgccactgccgccgagagcgagccgcatcgacgttcgcgacgtgtgcaagcggacgggagtgaatggcgtgatctacaaacccatcagtccatcacgctgccagcgctggcagctgagctttacagggttctccaaaacgacaactgaccggtgatagatcatagatccccatgtacttgcggcctgtttgaaacgcgtttgattcac

SEQ ID NO: 87813 - DNA, 1261 bp, Zea mays
  Clone ID: MRT4577_180083C.1
ggaccctggagcccggcggggccccgcctttgggaattcttctcgtctcgctcggctcctctgggcccacagcggccagcaaactgcctccgtcctccctgcgggctgtgccgcctcttcttcgcgtcggcgccgccctccttccttctcttctgctgctgatggaactggatcctcgcctctacgagaacgtctctgtcagcgacaacgatgtccgaaacatagttctatcttatcttatgcacaactgttttaaagagacggcagaggcattcctatctagcaccgggttgaatttacctgtcgactatagtgtggatgtggataagcgtaaagcaatttttaattttgtgctagaagggaatgcccttaaagccatagagctgacagaagaaatggcacctaacttgctagagaatgatatggatctacattttgatcttcttagtctccacttcattgagctagttcgctccaaaaaattcacagaagctcttgactttggccagaaaaaattgacatcatttcagaaggttaccaagtatattgagaaactagaggactttatggccctcctggcttatgaagagcctgagaagtcacctatgtttcatctactaagcccagagcacaggcagaatgttgcagagggcttgaatcgggctgtccttgcacatgctaatcttccggcatattcatcgttggagagggtggtccagcaagcgactgtggttagacaatacctacagcaggaagttggcaaggattcttacccaccattttctttgaaggcctttctgagcaagtaaaatgtgcaaatggtcacttcttcagaacagggtaaccacctctccaggccatcatgtacatgtacccttgtggagtgcatacacgatgaagtagtttatacagttcaggtgttgttgacaccacttatacagttgcaatggtgttgtactttgaaaaggagggtgctgtatgctgtctgcttccttgatttacattctgttttacttgtctctctgccttagacatggcgaaagcatgtatgtattgacctgttgagctattctgtgcgttcgttcggtgaactcagttcgagtcggtttgtaattggtctttttttattactaccgccatgtgcagaggctaaaggtccgaactctggatgcgtaagcgtaacgggttattctgtccatggactcctattgcgatttccatatataaggctgtgtaaattcttaaaaaaaaaaaaaaaaaa

SEQ ID NO: 87814 - DNA, 320 bp, Zea mays
  unsure (1)..(320): unsure at all n locations
  Clone ID: MRT4577_180084C.1
tcgcatcacaagcnngccgggaaaaaaaaaataacaaaaaaaaaggaaaaaaaaaaaaaaaaaaaaaaaaaaaaaaaaaaaaaaaaaaatctttgccaaccgcaaagacgggggtcttcgaactcgcctatctccgggactcaaagttttccccaattcccccccttctcccttttttcaccaccgcggcggttccccccgttcaacaacaccttgagggagggcatcccgatccacttcggccaggtgggtatccaggtcggaaacgcgggcggggagttgaattgcctcgggttgggatttagggtggatggccaaat

SEQ ID NO: 87815 - DNA, 451 bp, Zea mays
  unsure (1)..(451): unsure at all n locations
  Clone ID: MRT4577_180085C.1
ccgggcgcgcccgcgcgcccgggccgcccngcggcccgccgggggggnggcgcgcccgccccccgcacgccgcggcggcgccggcacccacgcgcgccccgcgccggagggcaggcccggagcggcggcgccgcgggcccgggcaccccccgaccgcgcagacgcccccgacgccgacaccgccccagcccaggcggggggggcaggcgccacaggaaccgacggccccgacgccgngggggaccgcggcaagcggcagaaggccggccgccgggggcgancggcaagaacacgggcgggcccacagcgaccccccccgacgccgagagcgacgacgccccgnccgacgacacgagcaccggcgacaaggaccggcagagcgacgcgcgagcaccaggancagcccacacgcccgaccgcagccgggcggccggggagcacagcgaccacg

SEQ ID NO: 87816 - DNA, 287 bp, Zea mays
  unsure (1)..(287): unsure at all n locations
  Clone ID: MRT4577_180086C.1
tagcttcttctagctctaactaggatcgactgctgaaagaaggnaacagtaacagcaggaatggaggggaaagaggaggacaaccgactgagcgccaacgagatctcggaggggcaggccataggcacggaggggaagggaacggaacgagaaggacgacaaggagaccccggcggggacgaatattaaagccaggagagataaagacctggagcttctaccgcgacgaaatcgccgaggtcggcgccacgttcctccttccactagatctccatcctcaccgacat

SEQ ID NO: 87817 - DNA, 182 bp, Zea mays
  unsure (1)..(182): unsure at all n locations
  Clone ID: MRT4577_180087C.1
gcgnggcacccggagggggagccagcccaggggcgagaggaggcgnggccgggcacgcccngccaacaggcgcacagggcccacccaagcggcgccaggnngagggcgcccggaccaccgaacngngcaggccgccgagcaggggcggacccacgccgggcggggggggggcacgagcccgc

SEQ ID NO: 87818 - DNA, 260 bp, Zea mays
  Clone ID: MRT4577_180088C.1
cgagattctacgcgtggacaaccttgtcatcaccggcaagggaaagctcggcgggcaggggccagccgtgtggagcagaactcctgcgtcaagaagtacgactgcaagatccttcccaactcgctggtgatggacttcgtgaacaacggggaggtgtgcgggatcacgctgctcaacttcaaggtgttccacatgaacatgttcaagtgcaaggacatgctgatcaaggacattaatgtgacagggcccggtgacaggcc

SEQ ID NO: 87819 - DNA, 717 bp, Zea mays
  Clone ID: MRT4577_180089C.1
tcgaggccggcccgggcccgggaattaaaaaaaaaaaaaaaaaaaaaactctgctcattggattttgacataggaataccgatgtctgttaataatacgatgtcttgaactgacagaaaaaaaaaaaaaaaaaaaaaaaaacctctgctcattggattttgacataggaataccgatgtctgttaataatacgatgccttgaactgccggaaaaaaaaaaaaaaaaaaaaaaaacctcggcccttgggtttttgacaaagaaaaaccgaggccggtaaaaaaaacgaggcctggacctgccggaaaaaaaaaaaaaaaaaaaaaaaacccccgcccattggattttgacaaaagaaaacccgtggcgggaaaaaaaaacaaggcttggaccggccgaaaaaaaaaaaaaaaaaaaaaaaaccccgccccttggattttgaacaaaaaaaacccggggggggaaaaaaaaaaagggtttgaaccggcaaaaaaaaaaaaaaaaaaaaaaaaaaaccccccccctgggattttgaaaaaaaaaacccaagggcggtaaaaaaaaaagggctttaaacgggcaaaaaaaaaaaaaaaaaaaaaaaaaatccccccctttggtattttaaaaagaaaaaaccagggtgggaaaaaaaaagagtgtttggaccggcgaaaaaaaaaaaaaaaaaaaaaaaaaaccccgcccctttggatttg

SEQ ID NO: 87820 - DNA, 411 bp, Zea mays
  Clone ID: MRT4577_18008C.1
actcatttgtgtttgtgagatgagcactatgttgggtaaacatggaggcggatatattaatactactggagaatactcatctgatctcttcgctggtgaaagaggataatgagggcacttcaccgtgatggatgttaaggggatgcctatactccatcagattatcctgaatgggaagtgcgtcatacattacacggtacaagcgcattgctgaacatctctagatctgtggatggttcatgatacagcatttcaatccatgccatcatccaatctgtcagatacactaatagaagaatgataggagacgactatgcattattagaacaacatataggcacaaatgcgtaggaaggacgctgacgctggccagataggctgacaatgaggacaactatgatgcaaggcgga

SEQ ID NO: 87821 - DNA, 216 bp, Zea mays
  Clone ID: MRT4577_180090C.1
ccttcactagctagcttagctagccagccacctccgttcactccatcgatcgacccgtagccaaccaccaacagctagctagctagcaacaatggctgccgtcgtcaacgcgcgagccgcaactgctcgttgctcggccgccggcgggccaccacgcggtgctgcgtctttgtttccgccgtcgataaggatgaggaagaggacgacggcggcggc

SEQ ID NO: 87822 - DNA, 1050 bp, Zea mays
  Clone ID: MRT4577_180091C.1
cctcgagtcgggccgcggggaccaggcccaaacgaagagaaaagagaagaacctcaatccggaagcgaaaaggaccagaagaaaccagaggcgactccaggttcgtgggcgatgctgcgcgcgggaggtaggcagctccttgccccggggctccggcggctcggtctgggcaccggcgccgccggtgaggtgggcccggccgccgcggcggcggggatgagggcgtaccacgagcgggtggtggaccactacaacaacccgcggaacgtcggttccttcgacaaggaggaccccaacgtcggtactgggctggtcggcgcgccggcctgcggcgacgtcatgaagttgcagatccgcgtcgacgaggactccggtaaaatcgtcgacgcctgcttcaagacctttggctgcggctccgccatagcgtcctcgtccgtcgctactgaatgggtgaagggaaaaccaatggatgaagtcttgacaatcaagaatactgagattgcaaagcacttgtcccttccaccagtaaagctccattgcagcatgcttgcggaggatgccattaaagctgctgtgaaagactacgaagccaagaaggcgaagatggggcaaaagagtgaagacagtccatcagagaaagctgctgaagcatgaaagtttctgccttttttaagtgtaattgagctgatatgtttctcagtccatgactccccgctgcttaagataaatgcttctgattgcgaggcgaggcgagggaccgcgtgtaatgttcacaaattctggtagtgcggcatgtgccttaactcttttgaggatggtgacaaccaatttcaaataaatttggtgccatcttagaattagaagtactatgtggatatcacatagtggaagtgttttctgtcaactacataattgaattacggccgtcgttgcacggaggctattttaaaatgttgtattgtatgtggtatggattcgcttacgggcctgaaactgttctattggaatcgataattttatttatactaaaaaaaaaaaaaaaaaaaaaaa

SEQ ID NO: 87823 - DNA, 522 bp, Zea mays
  Clone ID: MRT4577_180092C.1
atgagtcctgcttatcacaatggggctcccaaacttggctgtgcagtggaaactccgggggaattttgaagaacactgacacccatcttccaccccgacactctgatttaattgggctgcagtgagtacagagcatcaatttaaaaagctgcccagaatgttctcctgggcagcgtgtgatctttgccaccttcgtgactttatgcaatgcatcatgctatgtcatacctaatgagggagttccaggtgattcaaccaggaaatgcatggttctctaaggaaactaacacccaataaactcggagtggcagactgacaactgtgagacatgcacttgctacgaaacagaaatttcatgttgcacccttgtttctacacctgtgggttatgacaaagacaactgccaaagaatcttcaagaaggaggactgcaagtatatcgtggtggagaagaaggacccaaaaaagacctgttctgtcagtgaatggataatctaatgtgcttctagtaggcacagggctc

SEQ ID NO: 87824 - DNA, 358 bp, Zea mays
  Clone ID: MRT4577_180093C.1
acgagcaacacgaatytgtgtatatctcagccttgaacaacgkataacartggcactcggccaaaatttagttgggatccaatttagcagggtakcaaatgagagaagaccaagaataagatatccaackaacaaataaaakcttatataaaatgtttatatgtggggttkccttttagacactagacgaccacacagttgttckgctcctgtggcctgtcatgtgctartacygccgcgggcaggggttggcggcggctactggcggkggtggcggccggcggcgcggccagaggagttckttgtcygggatgggcagcycgtcgcggaacgagttctacggcgtttacaccbgagg

SEQ ID NO: 87825 - DNA, 296 bp, Zea mays
  Clone ID: MRT4577_180094C.1
attcccattaggcccagattacataagcggtctttggcataaaacagggggccttagtttttacaacgcatttaacagggggttttccaggccagtttcatttttcaaaccttaacgggaatacaagggggggggttaaggtgccttctttcagtattcagggccatagaacggcccacacagccaaagggggcccccacccaggtccattttttgggggttttttttttaaaaccatacttttggggctcatagaaaagacccctcttggggcttccgggattaacgatctgggg

SEQ ID NO: 87826 - DNA, 347 bp, Zea mays
  unsure (1)..(347): unsure at all n locations
  Clone ID: MRT4577_180095C.1
ccagcggccgcgacgcagcgaaccgaccgaccagcacgagggccaaaaaaagaaccaccacaaaaggaccaaccaaccacaaagaaaggcgaagcggacacaccgcaccaacggacgagaacncncggcggggggggggccagccagcaacggcagcacacgcaagacngacaacaaaccgcnaagcccacccccncgannccggggccagggcccgccgcgccgggaggggcgccccggnccaagccgccagcgccgcccangncngcacccgcgccccggnacaccncggcgaagacgggggggcagaggcgcnccagcccccccacgnngcccccgaacccgcc

SEQ ID NO: 87827 - DNA, 307 bp, Zea mays
  Clone ID: MRT4577_180096C.1
atattcacgggccaataacagctataggagaaagaagatagaacgatggacatttggcttcttgtcagcactatgcgcccatggaaactcaaaggcccggggatatatataaacatgtcctccatatttcctttaaaaccaaggcgaatccatctcagatccacaggacgctaccaaggtttaaggtcgcctgggggaccaacggtccaattcagggccctctccccggcttaaggaagacattgttgacgtgcgggagcttgtgcgctaggccgtttaggatctgggagaaacgcatctacctggc

SEQ ID NO: 87828 - DNA, 1746 bp, Zea mays
  Clone ID: MRT4577_180098C.1
atggcacccaagagagctaacccgaaggctgacgaggctacgaaggcagcactgcttgccgcaagaaagggcaaggccctcgccctcacccaattcacccaccaagagcccactgaagacaatgttccccgcacctgcgaagacgacaccttccacacctgcgggcccgaaggacaatcgcagccacccccaggcttcgccccactggaaggcgcggacctcaccgaggacggtgaggtcctcggcgtctcaacagaagaacagctacagctgcgcgccctgcgcctcaagaaccgcaatctccagaggcagaaagagatactggaggccaagcgccagcgtgtgtctgcactagccaaggtgcggcaaatgatacgcgatgaggagcagaaggcccaagacctcgagcgcgagatcgcgctgatgcagcgtgaaggccaccttggcctgcagcaagagccacccctccagcagcgcgaacaaccggaagacacacgcgaaggccacctcggcctgcagcatggcccacccctgcaacaccgagcacagccagacccgtccacagagaaggtttggactatccattgcgacggtgcatggtgccatgcgggggcaggcgtcgctgcagtcgtcacctcaccagccggagtcaagcacagatatgcagcacgcctcagcttcgctctggaatccgacagatgcacaaacaatatagcagagtatgaagcggttatcctcggcctccgcaagctaagggccctcggagtcaccacatgtatcatcaaaacagactccaagatagttgccggccaggtcgagaaagactacgcagcaaaagaccccgcgctcatgcaatacctagcggccatccgaagtctcgagagacagttcaagggattcaccttgcagcatgtggatagggccaagaacgaggaggccgacgcattggccaaggccgccgccaggggcgagaccttgccctccgacgggtactatcatccaaccgacgtcagcgaggccaagcgcctcagacatcgaagccgggacttcgcactgattgagggccaactttacaagaaaggggtcagtcagccaatgcttaagtgcgtcaccgaaaccgagggcatgcagatcctacgtgaagtccacagtggcacgtgcggctcgcacgcagggccaagggccctagctgccaaggtgatccgccaagggttttactggcccgcgatgatctgcgtcgcaaatcgggtcacaaggtcctgcgaagcctgccagaagttttctcctcggtcaggcaacccctcgcagtatacaaagctaattgtccatacatggcctctccagcgctggggcctggacattgtcgggcccctgcccaccgctcaggggaaccttaagttcgccttcgtagccgtcaaatacttcaccaaatggatcgaggcgagggctgtttctacaataacatcaaagactgcccaaaaattcttctggcaaaacattgtttgccgcttcggagtaccgtccgaactaacagttgacaacggcaagcagtttgacagccaagatttcaaggatttttgtttctccatcggcaccaagcttgccttcgcttcagtttatcatccgcagtccaacggggtcgtggagcgcgccaatgggaaaatcttcacagctgtcaagaaagtgctcctcgatgaaaaaaaggcagatggaccgatttgttacctgaggcagtctgggcgctaa

SEQ ID NO: 87829 - DNA, 1377 bp, Zea mays
  Clone ID: MRT4577_180099C.1
atgtcactcctcgactgcttctccggttaccatcaaatatacatgaaggaggaggacaaggccagcaccagcttcataacacccttcggcacgtattgcttcatcagaatgccggagggactcaagaacgccgggtccactttctcctggcttaccaaaacggtgctcgaggggcaggtcggtagaaatatattcacgtatgtggacgacatcgtcgtcgccagcagaagcaaggaggatcatctcgccgacctcgccgaaacgtttgcgaacatgcgggatgcacaacttcgcctaaaccccgaaaagtgcgtcttcggcgttcgccaggggaaaatattgggctacctggtgtcacaccgcggaatcgaggccaaccaaaccaaaattcaggccatcatcaacatgacgcccccgcagtcagccagagacgtccagcgcctgacaggcagattggccgccctcaacagattcatctccaaatccgcagagcgaagtctccccttcctcaaatctctccgcggcgcgaaagacttcgcttggggaccagagcaggcggtggccttcgcctcattgaaacagtacctatcggaattggcagttcttacaagccccgactcttcgctacccctgttgctttatgttgcggcttcgccgcatgcggtcagcgcgacactggttcaggagcagacagtagagggcgtggtcaggcaatgtccagtttattacatctctgaagttctcacaccatcaaaatgtaatatgatggaactagaaaagatagcctacgcagttgttatggcttcgtgcaaattgcgccactattttgaagctttcaaggtccgggtcacctcagataggggactcgacaaattgttcagaaacccggaggcatcggtcaggattgccaaatgggcggccgaactctccggctaccacatcacgttcgagcccaggacagccatcaaatgcactaacaacatagcagaatacgaagctgtcatcctcagcctccgcaagctaagggcccttggtgtcaccacctgcattatcagaacagactccaaggtagtcgccggccaagtcgagaaagactatgcagcaaaggaccccgcacttatgcaatacctcgcggctatccgtagtctcgagagacaattcaagggtttcaccttgcagcatgtggaccgggccaagaatgaggaggccgacgcattggccaaggctgccgctagaggcgagtccctgccctccgacgtgttctaccatgttattggcacgccagccgtccgcagccccgaagggctccaaataaccaatgacaacgagggtgttgggggccttcggcttccgaaggtcctcaaaaacaagatttaa

SEQ ID NO: 87830 - DNA, 588 bp, Zea mays
  unsure (1)..(588): unsure at all n locations
  Clone ID: MRT4577_18009C.1
acggggggggggggggggagggggttttggggggggggggggcagaaanaccatttagctttcgtagaaggaattttgtaatattagcggttaatgacaatgcagctaaaactagggctcacaaccccccagaaaaattaatagaagggcgaacccagtaggccctaaataacaagccgtatgcgcactactagtccaagtgctagtcgtatagtactgctattaggcttagagtaatattaagcatacgaacatagtagttattagacggccttttccttaagattcggtgattacgaaatactaatttagggaatcaatacagaatgcccagtcaccggcaggctaaatgccgatggttaggccctgtaagtaattggtgaaaccggggctaagtttcgcatgttcgcacaacctgcggggtgacctagtattaaattactacctgggatgttgcatcgcaaggcttggcttattatgcttgccttgctccaacctgctatctgttccaaagccaaaaatatactcgcatacacccctgatggggttggcctagcgggctaccatgcccctgttgtgccctccgcc

SEQ ID NO: 87831 - DNA, 398 bp, Zea mays
  Clone ID: MRT4577_1800C.1
tataaatgagtcatattaggacatcggatacggtgctgtaaagcgtgtgcgtgacaggcgctggcagtatcgacgcgtctagagctggtgcagctcctcctctcccggggcctattgccggtcagcagcatcgtgcacgagtctgatgtgcacaagagggtgcaactgactgtgccggcaagatttgaggaatcgttgcagattctcatggctgatttgatggcatatgacagcagtgcatcagcagttgctagctgtgacggtgtcgtccatgtacctattgctgtcctttcggatcaactctccatccctgaggtgtatgtcatacactcccgctgttatacgtactgccgattgtattaaatgcttgctattctgcaggagttatgcaatttatg

SEQ ID NO: 87832 - DNA, 5244 bp, Zea mays
  Clone ID: MRT4577_180100C.1
atggcacgcaagagagctaacccgaaggctgacgaggctgcgaaggcagcactgcttgccgcaagaaagggcaaggccctcgtcctcacccaatccacccaccaagagcccactgaagacaatgttccccgcacctgcgaagacgacaccttccgcacctgcgggcccgaaggacaatcgcagccgcccccaggcttcgccccactggaaggcgcggatctcaccgaggacggcgaggtcctcggcgtctcaacagaagaacagctacagctgcgcgccctgcgcctcaagaaccgcaatctccagaggcagaaagagatactggaggccaagcgccagcgtatgtccgcactagccaaggtgcggcaaatgatacgcgacgaggagcagaaggcccaagacctcgagcgcgagatcgcactgatgcagcgcgaaggccacctcggtctacagcaagagccacccctccagcagcgcgcacaaccggaagacacccgcgaaggccacctcggcctgcagcatggcccacccctgcaacaccgagcgcagccggagaacccgcgtttcccccagcatgactacaccttccagcacgacgcgccattccaaggggtcaactacctcgacgagcgaagtcccctggcgccacacctgcaagtgacaccttggccagcaaacttccgagcagggacctatcccaagtacaacggcaacaccgacccggcgcaatacataatgagttatcaggtcgccgttgcatccgccggaggggacgacgccacaatggcgaagtctttcatcatcgccctagagggcccagcactcacctggttcaccagattgcctccgctgtccattgattcatggagaagtctcagggacaagttcctgctcaacttccaagggtaccgtccagacaccgacgccttggccaagctctcgctttgcaagcagctggaaaaggagactctgcgggagtactaccgtaaattcttaacactcaagtcacagctgccctccgtcgacgatcagatcgctatccactacgccatcagtggccttcgtgccggcgtcctctacagtcattctaccagagatccacccaaaaacctccaggagctatatcagctctttgaaaaatatgccaaatccgaagagctccaccagcgcaagattgagtcacagcggaagcccaaagatgccccgcagtctagccgcacatggacgaggactccgcagccagactccggtcgagacggccgcagtcagcagcaagtgcacaacatcgccaaccagcatcccgctgctgaccccctcgccgccaggaatatcccccccaaggccgcggaaatggaactcgcggcaggggccgagggcgcgcacagccgccgcgccgattctactgcctttttcacggcgaagactgcgcccaccaaaccaaagactgccccgaaacgaaggccaccagagacagaatggcacgggcgcagccagccgacaaccccagaattgtcgcgcacaactaccagcaaccccctccaccatatatccacgcccccgctccgcatccactgcaccacgcttaccaacaccatcaggaacactgacttcgacaccaagcggcagaagcgggaccactaccgcagcatcaaccatgtcgccgtcactggcccagtcgtgcagacaaagtggtcccacataccgctaaccttcgacgcacgagacgtcgacctgcgcagcgccccccacatcgacgccatggtcatcaattgcagcgtggcaggctgggacttacacaaagtcctagtcgacaacggcagtcaggcggacatcatcttcctccacgccttcgactgcatgggtataagccacagcctgctcaagccttcggacaacccgttgtatggcttcggcggcaagggcacctttcccgttggcaaaatagagttgcccctctccttcggtgtagcacccaatgcccgaagcgagcaagtaaccttcgacattgtcgacatggtatatccatacaacgccatcatgggccggggctccatcaataagttcgaagctgccatccacggactgtacctatgtatgaagataccaggtccgctaggcgctattatgatctacggcaaccagcagacggcgcgcaacatagagcgggacttcgtgcctggtcagaggaacgtgcactgtctcacgacccagcgcgaggtccctgcgcccgccagcccaaccgataagcagcatgacaaggcacagttgcagagccaagacgggaccaagactgtccccctcgatcaggccatacccaagcagacagtcactgtcagcgaagaccttacctcacatgaagaagagaagcttctctgctgcctggccaagaataaagatgtcttcgcctggtccgccctcgacctggttgaagtcagccgatccataattgagcacagcttgggaattgacccttcggtgcgaccaaaaaagcaaaggcttcgcaaaatgtccgacgaaaagacagaggccaccaaggcggaggtgcaccgcctcctagaagctaaattcattgagccagtggcttaccccacgtggctctccaatgtcgtaatggtgcagaaaaaaagcgggaaatggcgaatgtgcatagacttcaccagtctcaataaggcctgcccaaaggacaatttcccgttaccgcggatcgacaaaatagtcgatagcgcggccggatgcgaggtcatgtcactcctcgactgcttctccggatatcaccagatatacatgaaggaggaagacaaggctagcaccagctttataacacccttcggcacttattgcttcatcagaatgccggagggactcaagaatgccaggtccaccttctctagactcaccaaaacagtacttgaagggcaggttggcagaaatatatttacatatgtggacgacatcgtcgtcgccagcaagaataaggaggaccatctcgccgacctcgccgagacattcgcgaacatgcgagatgcacgactccgcctaaacccggaaaagtgcgtcttcggtgttcgccagggcaagatattgggctacctggtgtcacaccgcggcatcgaggccaacccaaccaagatccaggccatcgtcgacatgtcgcctccgcagtccgccagggacgtccagcgtctgacaggcagattggccgctctcaacagattcatctccaggtccgccgagcgaagtctccccttcctcaaaacactccgcggtgcaaaagacttcgcctggggaccggagcaagcagcggccttcgcctcactaaaacagtacctgtcggagctggccatcctcacgagccccgactcctcgctccccctattgctctatgtcgcggcttcgccgcacgcggtcagcacggcactagtgcaggagcagacagttgagggcgcggtcagacaatgccctgtttactatgtctccgaggtcctgacactgtccaaatgcaacatgacagagctggagaagatcgcctacgcagttgttatgtcttcgcgcaaactgcaccattactttgaagcattcaaggtccgagtcacctcagacagggggctcggcgaactattcagaaacccggaggcatcggtgaggattgccaagtgggcagccgaactctccggctaccacatcagcttcgagcccaggacagccatcaagtcacaagtcctggcagacttcgtcgtcgactggactgggccaataacacagccggacccgtccacagagaaggtttggaccatccattgcgacggcgcatggtgccatgcgggggcaggcgtcgccgcagtcgtcacctcaccagccggagtcaaacacagatatgcagcacgcctcagcttcgctctggaatccgacagatgcacaaacaatatagcagagtatgaagcggtcattctcggcctccgcaagctaagggccctcggagtcaccacatgtatcatcaaaacagactccaagatagttgccggccaggtcgagaaagactatgcagcaaaagaccccgcgctcatgcaatacctcgcggccatccgaagtctcgagagacagttcaagggattcaccttgcagcatgtggatagggccaagaacgaggaggccgatgcattggccaaggctgccgccaggggcgagcccttgccctccgacgtgttctttcacaccatcggcacgccagccgtccggagccccgaagggctccaaataactaatgatagcgagggccaccgcatagtcaacctaatcatgaccgaagactggcgggcaccaataaccctgttcctacaggggtactatcatccaaccgatgtcagtgaggccaagcgcctcagacatcgaagctgggacttcgcactgattgagggccaactctacaagaaaagggtcagtcagccaatgcttaagtgcgtcaccgaaaccgaaggcatgcagatcctacgtgaagtccacagtggcacgtgcggctcgcacgcagggccaagggccctagcggccaaggtgatccgccaagggttttactggcccgccatgatctgcgccgcaaatcgggtcgcaaagtcctgcgaagcctgccagaagttttctcttcggtcaggcagcccctcgcagtatacaaagctgattgcccatacatggcctctccagcgctggggcctggacattgtcgggcccctgcccaccgctcaggggaacctcaagttcgccttcgtagccatcgaatacttcaccaaatggatcgaagcgagggctgtttctacaataacatcaaagactgcccaaaaattcttctggcaaaacatcgtttgccgcttcggagtaccgtccgagctaacagttgataacggcaagcagtttgacagccaagatttcaaggatttttgtttttccatcggcaccaagcttgccttcgcttcagtctatcacccgcagtccaacggggccctaaataaataccaagcccagaccaaagcatggcgcgaccacgcagtcatcccgagggagttcagcgaaggggacctcgtactcatccgaacagctcggacggagtccaggggcaagctggagcccaagtgggagggcccctttatagtcaagacaaaagcttcccccagcgcctacaggctcacaacgccgaacggcgaggacctggagcactcctggaacatcgacaaccttcgcaaattttttgtttga

SEQ ID NO: 87833 - DNA, 2481 bp, Zea mays
  Clone ID: MRT4577_180101C.1
atggcacccaagaaagctagctcgaaggctgacgaggctacgaaggcagcacttctggccgcaaaaaagggcaaggccctcgccctcacccacaccacccaccaagaggccactgaaggcgacgctctccgcacctgcggctctgaaggacagccgcaacctcccccaggcttggctccaccggagggcgcggacctcaccgaggacggcgaacacaaaggccacttcggcctgcaacacgggccacccctgcaacagcgcgcacaagtcgaagacctgcacttcccccagcgcgaccacgccatcccacacgccgcggcattccaaggtgtcaattacctcgacgagcgaagtcccctggcgccacacctgcaagtgacaccctggcctgccaacttccgggcagggacctatcccaagtacaacagcagcactgacccaacacaatacatcatgagttatcaggtcgccgttgcatcttccggaggggacgacgccacgatggccaagtctttcatcatcgccctcgagggcccagctctcacctggttcaccaggttgcccccgttgtccattgactcctggagaagcctccgggacaaattcctgctcaacttccaagggtaccgcccagacaccgacgccttggccgaactctcactctgcaagcagctggaaaaagagactctgcgggagtactaccgcaagtttctgacactcaagtcacagctgccctcggtcgatgaccagatcgccatccactacgccatcagtggccttcgggccagcgtcctttatagccactgcatcagggatccgcccaagaacctccaggagttatatcatctatttgaaaaatacgccaaatccgaagagctccaccagcgcaaagttgagtctcagaggaaacccaaagatgctccacagtccagccgcacgtggacgaggactccgcagccagactccggtcgggacggccgcaatcagcagcaggtgcacaacatcaccaaccagcaccccgctggtgaggcccctcgccgccaggaatatcccccccagggccgcggaaacggaactcgcggacagggccggggacgtacgcagccgtcgtgccgattttactgcctgtttcacggcggagactgcgcccaccaaaccagagactgtccagagacgaaggccaccagagacaggatggcacgggtgcaaccagtcgacaaccctagagttgtcgcgcacacatatcagcaaccccctccaccatacatccacgcccccgctccgcatccacagcaccacgcataccaacaccaccaggaagtacaaatcgtacctcccccacccccacctccacaccagcaacaacaaaacatccaccacccccatgccccaaagcaagaagacttcgccgatcagccgtatcgcggagtcattcatatgatcactggggggtccagcgccgacttcgacacgaagcggcagaagcgggaccactaccgcagcatcaaccacgtcgccatcaccggtccggtcgtgcagacgaagtggtcccatgtgccgctaaccttcgacgcccgagacgtcgatctgcacagcgccccccacatcgacgccatggttatcaactgcagcgtggcaggctgggacctgcacaaagtcctagtcgacaatggcagtcaagcagacatcattttcctccatgccttcgaccgcatgggcataagccacagcctgctcaagccttcggacaacccgttgtatggtttcggcggcaagggcacatttcccgtcggcaaaatagagttgcctctctccttcggtgtagcacccaatgcccgaagtgagcaagtgaccttcgatatcgtcaatatggtgtatccgtacaacgccatcatgggccggggctccatcaacaagtttgaggcagccattcatggactttacctgtgcatgaagataccaggtccgctaggcgccatcacggtctacggcaatcagcagactgcgcgaaacatagagcgggacttcgtccccgggcaaagaaacgtgcactgcctcacgactcagcgcgaggccacgcccaagcagacggtcaccatcagcgaagacctcacttcgcatgacgaggagaaactcctctgctgtttgtccaagaacaaagacgtcttcgcctggtccgccctcgacctggtcggggtcagccgatccatcattgagcacagcttgggaatcgacccttcggtgagaccgaaaaaacagcggctccgcaaaatgtctgatgagaagacagaagccgccaaggccgaggtacatcgcctcctggaggccaaatttatcgagccagtggcctaccccacgtggctcgccaacgttgtgatggtgcagaaaaaagcggcaaatggcggatgtgcatcgacttcaccagtctcaacaaggcctgcccaaaggacaactttccgctgcctcggatcgacaaaatag

SEQ ID NO: 87834 - DNA, 1722 bp, Zea mays
  Clone ID: MRT4577_180102C.1
gccgcgccggcgtcggggacgtctggctctggctgcttcgactgcaacatctgcctcgagtgcgccacggagccggtggtcacgctctgcggccacctctactgctggccctgcatctacgagtggctacgccacgacgtcgccgaagccggcgccaggagctcggcgaggcggcagtgccccgtgtgcaaggccgcggtgtccccggacgctctcgtgccgctctacggccgcggcgggagctccagcgccaagaagccgctggccagcatcccgcgcccgcgccggccggccctgcgacagagcacgcatgacagcggcagcggtggccaccaccaccaccatcggcacgcagagaccggcacgccagcccggtcgctgcggcacccagcccacgcccacgccgcgcagttcgacgccctcctctccgcgccgttcggggaccgcgggatgctgcactcgacgtcgacgaccggcgggatgctcggagggatggcggtggccgtcctcccgttggtgctccgcgggcaggcgcgggtgccgggcatgtactacccgagcccgtatcatctgatgagccccaggcagagacggtggcatgtggaggtagagagatccctgcatcagatatggttcttcctctgcgtgttcgtggtgctttgcttgctcttgttctgatttctgaagcaggacaccatcctgcgcctgcgggccacgagacgtgctctgtacatagcaaagggtgcgcgatatggatatggtgcggcagtgacctatatttggtgattgcatgacgggcgttcaagatgttaaattgagaaccagctgagttctggtcctagaaaggagaaatcggtttcgaaactgcaaaggacccttgagaagattatcagaagccatcgtccacatgttcatgcgcagacagtaacacataagctactggtaatatagagcgtcagaaaaaaaatgcttcagtatctaaatgtcacgctaccattttgagcgctttgatgacctgtgcagctgtgctccctccatctcggtctcggtggtcaccagcaatgcagcatttaactctaaaagtctgcaatgtgtgcgaaaaaggaatgccactcgtggcagcttacatagctccctttgccaaaagaacaacagcaccttgattcaaaacgtcacttaagattgtgttaagatctatgatcatcttctgtcaactctgctgattttgcagctgattaatccggctgaggaatgaggatgttgccggagcgcgtctcaaaatcacgaatctggatgagagcacttcacgacaggacctgctaccaccgacgtgagtgtgatttgccattgatatacagcctgatcagttgcaactccacttagtactatgatgacgagtaacagagcgtctgtgaaagggagcacggccggctacaacagcagctgaagtagcgcataagtcacaagttacagtccactacaactgatcattcgagctttgcttcttttttttttgtaacggcaacagtcgttgatgactaacataacgaacaatacatgattattatatcctgcgcctgcgggcacgagacgtgctctgtacatagcaaagggtgagatatggatatggtgctggtgcggcagtgacctatatttggtgattgcatgacggggcgttcaagatgttaaattgagaagcagctgagttgtggttctagaaag

SEQ ID NO: 87835 - DNA, 772 bp, Zea mays
  unsure (1)..(772): unsure at all n locations
  Clone ID: MRT4577_180103C.1
ctcgaagccggccgggccgggatagcaaagaccaagaaaaggccatcactgacggcaagagagagaggaaggagaccccccgaggggccgacgtctcgcgatttccggcggcaaggttcggttttgatccagacgcggccccaggttgctcatcccagtaacagtcgccgcttccggcggagcaaccgtaggaaaagatcccgatttcctttggcgccggtaccggttcgtggtggcgccgccgccccccgctaccttcgttttgcgaggttccgattcgccagctgctggagtgaggtggggagcgcgtgtcgtgggattcccgttcggatctgcggagggggctgttctcctgctccaatttggtcggccggcaatgagggtccttgaatcttgttgatgcgctgccagatgcgggaggagtactgggggaaggtttcttgaaatcttcgtctgggctccgtggagtgaggtccctcgccgggatcgccctgtcgtcctatgggctgtgtcagttccagacaattccacggcggggacgaccgtggggacggcaagccgcgccggcggccctcgagcaactcgctgaagcgcctggttagttccagttccagcaagaggcatgaggagttagaagaggagtatgagganaggngtggctgtggcagccacgtcctcaagcgccggacgccgcgctgggaatgacgccagcacggcgaggttgatccggaagcctccagcattggtggtcgaggctgtgccggcattgtta

SEQ ID NO: 87836 - DNA, 642 bp, Zea mays
  Clone ID: MRT4577_180104C.1
agcagtggtaacaacgcagagtacgggggaagcggagaccggaagccgggcggcgggattcgcggggaagcggcgaaagaagacgagcgagcgagcgagaacgcaacggggagagagagagagagaggagagaccccgagtggagcgctggttttttatagtgtggcacatcacatcgcatatagacacataatagtacgtacagcagtgggacgagacaaagcaccacaccaagcgggcaagggacagttggcgagaagcacccatgtgggcgcacggctctcctctcctgtgcgatgctgcgcgcctgggcgatgccgtcgaggacgaggagggcgacgacaccggcgcagcgcggaggccggagatcgacatgtggggctggtccggctggacgtcgccgtggtgcagagatttcagattccacgacgctgatacgttggcaccgatcaggtgacagtggcacctcgacgcaggcaggtcatccagcccttggccgtgttggtttgttgcttgttgctcactttggttcgtcgtggagcgggaggacacatcagcaagtagcaacagacaagaccttcgctgttctgcattgtgcataatagtactgttagtttgggccgtgcccatggagccagcaca

SEQ ID NO: 87837 - DNA, 5634 bp, Zea mays
  Clone ID: MRT4577_180105C.1
atggtgtcgctccccttggaccgtgcaaagatcaagtgctctctacagatccctagatctagagatgtcaatggagacccgatacccgctaactcatggggaattcccctattaagatctattggtgatgtatttgttggggcgaaggcgaagacgccacccttcgctcgatgccttcgtcgtcctcgctgcaccaacggagacaagacaacgggcagactaacccttcgtcccatacgtcaccggacgaagacctgtgacgaggtcgtctcatcttgcgacctcgtccagcatggaggcccacgtgtgatccggcccattgtaacaggccctgcgtggccgctgcgcattacgggcctaatttgtaaaggcatccctgtaattacggagagcaagttccaacatttggtgcccaccattcgtgctacgaaaaagccacccgcgatggcacccaagaaagctagctcgaaggccgacgaggctgcgaaggcagcactgctggccgcaaaaaagggcaaggccctcgccctcacccactccacccaccaagaggccaccgaagacgacgttctccgcacctgcgaagacgacactctccgcacctgcggccctgaaggacaatcgcagccacccccaggcttcgccccactggggggtgcggacctcaccgaggacggtgaagtcctcggcgtctcagcggaagaacagctacagctgcgcaccctgcgcctcaagaaccgcaatctccagaggcagaaagagatactggaggccaagcgccagcgcgtgtccgcactagccaaagtgcggcagatgatacacgacgaagagcagaaggcccaggacctcgagcgggagatcgcgctgatgcagcgcgaaggccacctcgacctgcagcacgggccacccctgcagcagcgcgcacaactcgaagacacgcgcgaaggccacctcggcctccagcatgggccacccttgcagcagcgcgcacaaccggaagacccgcgtttcccccagcgcgaccacaccttcccgcacgccgcggcattccaaggggtcaactacctcgacgagcgaagtcccctggcgccacacctgcaagtgatgccttgtcccgctaacttccgggcagggacctatcccaagtacaacggcagcaccgacccagcacaatacataatgagttatcaggtcgtcgttgcatcttccggaggggacgacgccacaatggccaagtctttcatcatcgccctcgagggcccagctctcacctggttcaccaggttgcctccgctgtccattgattcctggagaagcctccgggacaagttcctgctcaacttccaagggtaccgcctagataccgacgccttggccgaactctcgctctgcaagcagctggaaaaggagactctgcgggagtactaccgcaaatttttaacactcaagtcacagctgccctcagtcgatgaccagatcgctatccattacgctatcagtggccttcgcgctggcgtcctctatagccactgcatcagagatccgcccaagaacctcctggaattatatcagctctttgaaaaatacgccaaatccaaagagctccaccagcgcaaggttgagtcccaaaggaagcccaaagatgctccacagtccagccgcacgtggacgaggactccgcagccagactccggtcgagacggccgcaatcaacaacaagtgcacaacatcgccaaccagcaccccgctgctgacgcccctcgtcgccaggaatatcccccaccccagggccgcggaaatggaactcgcgccagccgacaacccagagttgtcacacacacttaccaacaaccccctccaccatatatccatgcccccgccccgcatccaccgcaccacgcttaccaacaccatcaggcagtacaaatcgtacctcccccacccccaccaccacaccagcaacatcaaaacatcccccacgccccaaagcaggaagacttcgccgatcaaccgtatcgcggagtcattcacatgataactggggggtccagcactaacttcgacaaaaagcggcagaagcgggaccactaccgcagcatcaaccacgtcgtcgtcactggcccagtcgtgcagacaaagtggtcccacataccgctaaccttcgacgcacgagacgttgacctgcgcagcgccccccacatcgacgccatggttatcaattgcagcgtggcaggctgggacctgcacaaagtcctagtcgacaatggcagtcaggcggacatcatcttcctccacgccttcgatcgcatgggcataagccacagcctgctcaagccttcggacaacccgttgtatggcttcggcggcaagggcacctttcctgtcggcaaaatagaattgcctctctccttcggtgtagcacccaatgcccgaagtgagcaagtaacctttgatattgtggatatggtatatccatacaatgccatcatgggtcggggctccatcaataagttcgaagcagtcattcacggactgtacctatgtatgaagataccaggtccgttaggcgtcattacggtctacggcaaccaacagactgcgcgcaacatagagcgggacttcgtgcccggtcagagaaacgtgcactgcctcatggcccagcgcgaggtccccacgcccgccagcccaaccaataaacagcatgacaaagcacagctgcagagaaacgacgggaccaagactgtccccctcgatcaggccacgcccaagcagacagtcactatcagcgaagacctcacttcgcatgaagaggagaaactcctctgctgcctgaccaagaataaagatgtcttcgcctggtctgccctcgacctggtcggggtcagccgatccataattgagcacagcttgggaattgacccttcggtgagaccaaaaaagcagcggcttcgcaaaatgtccgacgagaagacagaggccgccaaggcggagaaaaagagcgggaagtggcgaatgtgcatcgacttcaccagtctcaacaaagcctgcccaaaggacaacttcccgttgccgcggatcgacaaaatagtcgatagcgcggccgggtacgaggtcatgtcactcctcgactgcttctccggttaccaccagatatacatgaaggaggaagacaaggctagcaccagctttataacacccttcggcacttattgcttcatcagaatgccggagggactcaagaacgccgggtccaccttttccaggcttaccaaaacagtgctcgaagggcaagttggcagaaatatattcacatatgtggacgacatcgtcgtcgctagcaagagcaaggaggaccatctcgtcgacctcgccgagacattcgcgaacatgcgagacgcacgactccgcctcaacccggaaaagtgcgtcttcggcgttcgccagggcaaaatattgggctacctggtatctaaccgcggcatcgaggccaacccaaccaagattcaggccatcataaacatgacgcctctgcagtccgccagagacgtacagcgcctgacaggcagattggccgctctcaatagattcatctccaggtctgctgagcgaagtctccccttcctcaaaacactccgtggtgcaaaagacttcggttggggaccagagcaggcagcggccttcgcctctttaaaacagtacctgtcggagttggtcgttctcacaagccccgactcctcgctccccctgttgctttatgttgcggcttcgccgcatgcggtcagcgcggcactggtgcaggagcagacagttgagggcgtggttaggcagtgcccaatttattatgtctccgaagtgctgacaccgtccaaatgtaacatgatagagctggagaagattgcctacgcagtcgttatgtcttcacgcaaattgcgccactattttgaagcattcaaggtccgggtcacctcagacaggggactcggcgaattgttcagaaacccggaagcatcagtgagtattgccaagtgggcggccgaactctccggctaccacatcaatttcgagcccaggacagccatcaagtcacaagtcctggtagacttcgtcgtcgactggactgggccaatagcacagccggacccgtccgcagagaaggtttggacaatccactgcgacggtgcatggtgccatgcaggggcaggcgccgcggcagtcatcacctcgccaaccggagtcaagcacagatatgcggctcgccttagcttcgctctggaatccgacagatgcacaaataacatagcagaatacgaagcagtcatcctgggtctccgcaagctgagggcccttggggtcaccacctgcatcatcagaacagactccaaggtagttgccggccaggtcgagaaagactatgcagcaaaggaccccacactcatgcaatacctcgcggccatccgaagtctcgagagacaattcaagggattcactttgcagcatgtggaccgggccaagaatgaagaggccgacgcattggccaaggctgccgccagaggagagtccctgccctccgacgtgttctaccatgtcatcggcacaccagccgtccggagccccgaagggctccaaataaccaatgacagcgagggccaccgcatagtcaaccttatcatgaccgaagacggacgggcaccaataactctgttcctacaggggtattatcacccaaccgacatcaacgaggccaagcgcctcaagcatcgaagccgggacttcgcactgattgagggccaactctacaagaagggggtcagtcagccaatgctcaaatgcgtcactgaaaccgaaggtgtccagatcctacgcgaagtccacagtggtacctgcggctctcacgcagggccaagggccctagctgctaaggtaatccgccaaggtttctactggcccgcaatgatctgcgccgcgaatcgggtcacaaagtcctgtgaagcctgccagaagttttcccctcgatcaggcagcccttcgcagtttacaaagctgatcgcccacacatggcctctccagcgctggggcctagacatcatcgggcctttgcccacggctcaggggaaccttaagttcgccttcgtcgctgtcgattacttcaccaaatggattgaggcaagggctgtctccacaataacatcaaagactgcccaaaaattcttctggcaaaacattgtttgccgcttcggagtaccgtccgaactaaaagtcgacaacggcaagcagtttgacagccaagacttcaaggatttttgtttctccatcggcaccaagcttgccttcgcctcagtctatcacccgcagtccaacggagttgtggaacgcgccaatagaaaaatcttcacagctgtcaaaaagatgctcctcgacgaaaaaaagggcaagtgggccgatttgttacccgaggcggtttgggcactaaatacgactgagtgcagggcgaccgggttcacccctttccgccttctatacggatcagaggccatgaccccacaagaaataaagcatgggtccccgcgaacagttccttcagctgtccccgacgtggacgagcccacttcaaaggatctcatcgatggagactga

SEQ ID NO: 87838 - DNA, 289 bp, Zea mays
  Clone ID: MRT4577_180106C.1
ctttttcctgcgaacacgtgctgaatagaggaggcggacttcaacagcgacacaactgcccacctttctaatcctgaagatgatgctgacgaggcctgtgaccaaaacagtaggccaggagctgacctggacgtcgcgaggggtgaagcgaaagtgctacatggtggatattcgcttgctgacggggagaccgttgatttaattggtgtgcctcccgggcatagcatgcaaagatagaaggcttgttcggcactcgatctgatccaagcaacagttcccgccactgctg

SEQ ID NO: 87839 - DNA, 2547 bp, Zea mays
  Clone ID: MRT4577_180107C.1
atggcacccaagaaagctaactcgaaggctgacgaggctgcgaaggcagcactgcttgccgcaagaaagggcaaggccctcgccctcacccaatccacccaccaagaggccactgaagacgacgttctccgcacctgcgaagatgacactctccgcacctgcggccctgaaggacaatcgcagccccccaggcttcgccccactggagggcgtggacctcaccgaggacgaggcctccgggacaagttcctgctcaacttccaagggtaccgccgagacaccgacgccttggccgaactctcgctctgcaagcagctggaaaaggagactctgcgggagtattaccgcaaatttttaacactcaagtcacagctgccctcagtcgatgaccagatcgctatccactacgctatcagtggccttcgcgccggcgtcctttacagccactgcatcagagatccgcccaagaacctccaggaattatatcagctctttgaaaaatatgccaaatccgaagagctccaccagcgcaaagttgagtcgcagcggaaacccaaagatgctccacagtccagccgcacgtggacgaggactccgcagccagactccggccgagacggccgcaatcagcagcaagtgcacaacatcgccaaccagcaccccgctgctgacgcccctcgtcgccaggaatatcccccccagggccgcggaaatggaactcgtggtaggggtcgagggcgtgcgcaaccgccgcgccgattctactgcctcttccacggcgaagactgcgcccaccaaaccaaagactgccccgaaacgaaggccaccagagacagaatggcacgggcgcagccagccgacaaccccagagttgtcgcacacactcaccagcaaccccctccaccatatatccacacccccgccccgcatccaccgcaccacgcttaccaacaccatcaggaagaagacttcgccgatcagccgtatcgcggagtcattcacatgataactggggggtccagcactgacttcgacaccaagcggcagaagcgggaccactaccgcagcatcaaccacgtcgccatcactggcccagtcgtgcagacaaagtggtcccacataccgctaaccttcgacgcacgagacgtcgacctgcgcagcgccccccacatcgacgccatggttatcaattgcagcgtggcaggctgggacctacacaaagtcctagtcgacaatggcagtcaggcggacatcatcttcctccatgccttcgatcgcatgggcataagccacagcctgctcaagccttcggacaacccgttgtatggcttcggcggcaagggcacctttcctgtcggcaaaatagagttgcccctctccttcggtgtagcacccaatgcccgaaaaaaaagcgggaagtggcgaatgtgcatcgacttcaccagtctcaacaaggcctacccaaaggacaatttcccgttgccgcagatcgacaaaatagtcgatagcgcggccggatgcgaggtcatgtcactcctcgactgcttctccggttaccaccagatatacatgaaggaggaggacaaggctagcaccagctttataacacccttcgacacatattgcttcatcagaatgccggagggactcaagaacgtcgggtccaccttctcaaggcttaccaaaacagtcctcgaagggcaagttggcagaaacatattcacatatgtggacaacatcgtcgtcgccagcaagagcaaggaggaccatctcgccgacctcgccgagacattcgcgaacatgcgagacgcacgactccgcctaaacccggaaaattgcgtcttcagcgttcgccaaggcaaaatattgggctacctggtatcacaccgcggcatcgaggccaacccaaccaagattcaggccatcataaacatgacgcctccgcagtccgccagggacgtccagcgcctgacaggcagattggccgctctctacagattcatctccaggtccgctgagcgaagtctccccttcctcaaaacactccgtggtgcaaaagacttcgcctggggaccagagcaggcagcggccttcgcctcattaaaacagtacctgtcagacttggccgtccttacaagccccaactcctcgctccccctgttgctctacgtcgcggcttcgccgcatgcggtcagcgcggcactagtgcaggagcagacagttgagggcgtggtcaggcagtgccccgtttactatgtctccgaagtgctgacaccgtccaagtgcaacatgacagagctggagaagattgcctacgcagtcgttatgtcttcgcgcaaattgcgccattacttcgaagcattcaaggtccgagtcacctcagacaggggactcggcgaattgttcagaaacccggaggcatcggtgaggattgccaagtgggcggccgaactctccggctaccacatcagcttcgagcccaggacagccatcaagtcacaagtcctggcagacttcgtcgtcgactggactaggccaataacatag

SEQ ID NO: 87840 - DNA, 5118 bp, Zea mays
  Clone ID: MRT4577_180108C.1
atggcacccaagagagctaacccgaaggctgatgaggctgcgaaggcagcactgctcgccgcaagaaagggcaaggccctcgccctcacccaatccacccacgaagaggccactgaagacaatgttccccgcacctgcaaagacgacactttccgcacctgcggcccggaaggacaatcgcagccacccccaggcttcgccccactggaaggcgcggacctcaccgaggatggtgaagtcctcggcgtctcagcggaagaacagctacagctgcgcgccctgcgcctcaagaaccgcaatctccagaggcagaaagagatactggaggccaagcgccagcgtgtgtccgcactagccaaagtgcggcaaatgatacgcgacgaagagcagaacgcccaagacctcgagcgggagatcgcgctgatgcagcgcgaaggccaccttggcctgcagcaagggccacccctccagcagcgcgcacaactggaagacatgcgcgaaggccacctcggcctgcagcatgggccacccctgcaacaccgaccacaaccggaagacccgcgtttcccccagcgcgaccacaccttccagcacgccgcgccattccaaggggtcaactacctcgacgagcgaagtcccctggcgccacacctgcaagtgacgccttggccagctaacttccgagcagggacttatcccaagtacaacggcagcaccgacccggcgcaatacataatgagttatcaggtcgccgtggcatccgctggaggagacgacgccacaatggcgaagtctttcatcattgccctagacggcccagctctcacctggttcaccagattgcctccgctgtccattgattcctggcgaagtctcagggacaagtttctgctcaacttccaagggtaccgcccagacactgacgccttggccgagctctcgctttgcaaacaactagaaaaggagactctgcgggagtactaccgcaaatttttaacactcaagtcacagctgccctccattgatgatcagatcgctatccactacgccatcagtggccttcgtgccggcgtcctctacaaccactgtatcagagatccacccaagaacctccaggagctatatcagctctttgaaaaatatgccaaatccgaagagctccaccagcgcaaggttgagtcgcagcggaaacccaaagatgccccgcagtccagctgcacgtggacgaggactccgcagccagactccggtcgagacggccgcaatcagcagcaagtgcacaacatcgccaaccagcatcccgctgctaacccccacgccgccaggaatatccaccctagggccgcggaaatggaactcgtggtaggggccgagggcgtgcgcagccgccgcgccgattctactgccttttccatggcgaagactgcgcccaccaaactaaagactgccccgagacgaaggccaccagagacagaatggcacgggcgcagccagctgacaaccccagaattgtcgcgcacaattaccagcaaccccctccaccatatatcaacgctcccgccccgcatccaccgcaccacgcttaccaacaccatcaggaacgtggcaggctgggacctacacaaagtcctagtcgacaacggcagtcaggcggacatcatattcctccacgccttcgaccgcatgggcataagccacagcctgctcaagccttcggacaacccgttgtatggcttcggcggcaagggcacctttcccgtcggcaaaatagagttgcccctctccttcggtgtagcacccaatgcccgaagtgagcaagtaactttcgatatcatggatatggtatatccatacaacgccatcatgggccggggctccatcaataagttcgaagtcgccattcacggactgtacctatgtatgaagataccaggtccgctaggcgccattacggtctacggcaaccagcagacggcgcgcaacatagagcgggacttcgtgcccagtcagagaaacgccacgcccaagcagacagtcattatcagcgaagacctcacctcgcatgaagaagagagactcctctgctgcctatccaagaataaagatgtcttcgcctggtccgccctcgacctggtcggagtcagccgatccataattgagcacagcttgggaattgacccttcggtgcgaccaaaaaagcagaggcttcgcaaaatgtccgacgaaaagacagaggccgccaaggcggaggtgcaccgcctcctagaggctaaattcatcgagccagtggcttaccccacgtggctctccaatgttgtaatggtgcagaaaaaaagcgggaaatggcgaatgtgcatagacttcaccagtctcaacaaggcctgcccaaaggacaatttcccattgccgcggatcgacaaaatagtcgatagcgcagccggatgcgaggtcatgtcactcctcgactgcttctccggttaccaccagatatacatgaaggaggaagacaaggctagcaccagctttataacacccttcggcacatattgcttcatcagaatgccggagggactcaagaacgccgggtccaccttctccagactcaccaaaacagtactcgaagggcaggttggcagaaatatatttacatatgtggacgacatcgtcgtcgccagcaagaacaaggaagaccatctcgccgacctcgccgagacattcgcgaacatgcgagacgcacgactccgcctaaacccggaaaagtgcgtctttggtgttcgccagggcaaaatattgggctacctggtatcacaccgcggcatcgaggccaacccaaccaagatccaggccatcgtagacatgtcgcctccgcagtccgccagggacgtccagcgtctgacggtcagattggccgctctcaacagattcatctccaggtccgccgagcgaagcctccctttcctcaaaacactccgcggtgcaaaggacttcgcctggggaccagagcaggcagcggcctttgcctcactaaaacagtacctgtcggagctggccatcctcacaagccccgactcctcgctccccctattgctctacgtcgcagcttcgccgcatgctgtcagcgcggcactagtgcaggagcagacagttgagggcgtggtactgacaccgtccaagtgcaacatgacagagctggagaagattgcctacgcagtcgttatgtcttcgcgcaaactgcgccactactttgaagcattcaaggtccgagtcacctcagacaggggactcgacgaattattcagaaacccggaggcatcagtgaggattgccaagtgggcagccgaactatccggctaccacatcagcttcgagcccaggacagccatcaagtcacaagtcctggcagacttcgtcgtcgactggactgggccaataactcaaccaggcctgtccacagagaaggtttggacgatccattgcgacggcgcatggtgccatgcgggggcaggcatcgctacagtcgtcacctcgccagccggggtcaagcacagatatgcagcacgcctcagcttcgctctggaatccgacagatgcacaaacaatatagcagaatatgaagcagtcatcctcggcctccgcaagctaagggcccttggagtcaccacttgtatcatcaaaacagactccaagatagttgccggccaggtcgagaaagactacgcagcaaaggaccccacacttatgcaatacctcgcggccatccgaagtctcgagagacaattcaagggattcaccttgcagcatgtggatagggccaagaacgaggaggccgacgcattggccaaggccgccgccaggggcgagtccttgccctccgacgtgttctttcataccatcggcacgccagccgtccggagccccgaagggctccaaataactaatgacagcgagggccaccgcatagtcaacctaatcatgaccgaggactggcgggcaccaataaccctgttcctacaggggtactatcatccaaccgacgtcagcgaggccaagcgcctcagacatcgaagccgggacttcgcactgattgaaggccaactctacaagaaaggggggccaagggcactagctgccaaggtgatccgccagggcttttactggcccgcaatgatctgcgccgcaaatcgggtcacaaggtccagcgaagtctgccagaagttttctcctcagtcaggcagcccctcgcagtatacaaagctgatcgcccatacatggcctctccagcgctggggcctggacattgtcgggcccctacccaccgctcaggggaaccttaagttcgccttcgtcgccgtcgagtacttcaccaaatggatcgaggcgagggttgtttccacagtaacatcaaagactgcccaaaaattcttctggcaaaacattgtttgccgcttcggagtaccgtccgaactaacagtggacaacggcaagcagtttgacagccaagacttcaaggatttttgtttctccattggcaccaagcttgccttcgcctcagtttatcatccgcagtccaacggggtcgtggaacgcgctaatgggaaaatcttcacagctgtcaagaagatgctccttgatgaaaaaaagggcagatggaccgatttgttacctgagacagtctgggcactaaacacgactgaatgcagggcgactgggtttactcccttccgccttctatacggatcggaggccatgaccccgcaagaaataaagcatgggtccccacgaacaattccgtcagccgtccccgacgtggacgagccaacttcaaaggatctcattgacggagaccgagtcttcgccctacaggccctaaacaaataccaagcccagaccaaagcatggcgcgaccacacggtcatcccgagggagttcagcgaaggggacctcgtactcgtccgaacagctcggacggagtccaagggcaagctggagcccaagtgggagggcccctttatagtcaagacaaaagcttcccccagcgcttacaggctcacaacgccaaacggcgaggacctggagcactcctggaacatcgacaacctccgcaaattttttgtttga

SEQ ID NO: 87841 - DNA, 3285 bp, Zea mays
  Clone ID: MRT4577_180109C.1
atggcacccaagagagctaacccgaaggccgacgaggctgcgaaggcagcactgcttgccgcaagaaagggcaaggccctcgccctcacccaatccacccaccaagagcccactgaagacaatgtcccccacacctgcgaagacgacaccttccgcacctgcgggcccgaaggacaatcgcagccgcccccaggcttcgccccactggaaggcgcggacctcaccgaggacggtgaggtcctcggcgtctcaacagaagaacagctacagctgcgcgccctgcgcctcaagaaccgcaatctccagaggcagaaagagatactggaggccaagcgccagcgtgtgtccgcactagccaaagtgcggcaaatgatacgcgacgaggagcagaaggcccaagacctcgagcgcgagatcgcgctgatgcagcgcgaaggccaccttggcctgcagcaagagccacccctccagcagcgcgcacaaccggaagacacgcgcgaaggccacctcggcctgcagcatgggccacccctgcaacaccgagcgcagccggagaacccgcgttttccccagcgtgactacaccttccagcacggcgcgccattccaaggggtcaactacctcgacgagcgaagtcctctggcgccacacctgcaagtgacgccttggccagctaacttccgagcagggacctatcccaagtacaacggcagcaccgacccgacgcaatacataatgagttatcaggtcgccgttgcatccgccggaggggacgacgccacaatgacgaagtctttcatcatcgccctagagggcccagcactcacctggttcaccagattgcctccgctgtccattgattcatggagaagtctcagggacaagttcctgctcaacttccaagggtaccgcccagacaccgacgccttggccgagctctcgctttgcaagcagctggaaaaggagactctgcgggagtattaccgcaaattcttaacactcaagtcacagctgccctccgtcgatgatcagatcgctatccactacgccatcagtggccttcgggccggcgtcctctacagccactgtatcagagatccacccaagaacctccaggagctatatcagctctttgaaaaatatgccagatccaaagagctccaccagcgcaaggttgagtcacagcggaaacccaaagatgccccgcagtccagccgcacgtggacgaggactccgcagccagactccggtcgagatggccgcagtcagcagcaagtgcacaacatcgccaaccagcagcctgccgctgacccccctcgtcgcccggagtacccccagggccgcggaaatggaactcgtggcaggggccgagggcgcgcacagctgccacgccgattctactgccttttccacggcgaagactgcgcccaccaaaccaaagactgccccgaaacgaaggccaccagagacagaatggtgcgggcgcagcctgccgacaatcccagaattgtcgcgcataattaccagccaccccctccaccatatatccacgctcccgccctgcatccaccgcaccacgcttaccaacaccatccggaagtacaaatcgtacctcctccacccccaccaccacaccagcaacatcaaaacatcccccatgctccaaagcaggaagacttcgccgatcaaccatatcgcggagtcattcacatgataacagggggatccagcactgacttcgacaccaagcggcagaagcgggaccactaccgcagcatcaaccatgtcgccgtcactggcccagtcgtgcagacaaagtggtcccacataccgctaaccttcgacgcacgagacgtcgacctgcgcagcgccccccacatcgacgctatggtcatcaattgcagcgtggcaggctgggacttacacaaagtcctagtcgacaacggcagtcaggcggacatcatcttcctccacgccttcgaccgcatgggtataagccacagcctgctcaagccttcggacaacctgttgtatggcttcggcggcaagggcacctttccgataccaggtccgctaggcgctattacgatctacggcaaccagcaaacggcgcgcaacatagagcgggacttcgtgcctggtcagaggaacgtgcactgtctcacgacccagcgcgaggtccctccgcctgccagcccaaccgataagcagcacgacaaggcacagttgcagagccaagacgggaccaagactgtccccctcgatcaggccacgcccaagcagacagtcactatcagcgaagaccttacctcacatgaagaagagaagcttctctgctgcctggccaagaataaagatgtcttcgcctggtccgccctcgacctggtcggagtcagccgatccataattgagcacagcttgggaattgacccttcggtgcgaccaaaaaagcaaaggcttcgcaaaatgtccgacgaaaagacagaggccaccaaggcagaggtgcaccgcctcctcgaggctaaatttatcgagccagtggcttaccccacgtggctctccaatgttgtaatggtgcagaaaaaaagcgggaaatggcgaatgtgcatagacatcaccagtatcaataaggcctgcccaaaggacaatttcctgttaccacggatcgacaaaatagtcgatagcgcggctggatgcgaggtcatgtcactcctcgactgcttctccggctatcaccagatatacatgaaggaggaagacaaggctagcaccagctttataacacccttcgacacttattgcttcattagaatgccggagggactcaagaatgccgggtccaccttctctagactcaccaaaacagtactcgaagggcaggttggcagaaatatatttacatatgtggacgacatcgtcgtcgccagcaagaataaggaggaccacctcgccgacctcgccgagacgttcgcgaacatgcgagatgcacgactctgcctaaacccggaaaagtgcgtcttcggtgttcgccagggcaagatattgggctacctggtgtcacatcgcggcatcgaggccaacccaaccaagatccaggccatcgtagacatgtcgcctccgcagtccgctagggacgtccagcgtctaacaggcagattggccgctctcaacagattcatctccaggtccgccgagcgaagtctccccttcctcaaaacactccgcggtgcaaaagacttcgcctggggaccggagcaagcagcggccttcgcctcactaaaatag

SEQ ID NO: 87842 - DNA, 246 bp, Zea mays
  Clone ID: MRT4577_18010C.1
gcgtacgaccccgattctgggccagtgcgtcaagtttctgaagcatcagtgcagcccgacggcgacgccctactgatgcgctcaggtccagtcgcatgtgctgctagggtgaccatagttcaggcatgctgacgacctgctatagctccaggcgatcttcggcttggttctccagtccatcctgcagcatcagacgacaaacggccaggtcgctgcgctgttggccgcgcaaatagcgcagcaact

SEQ ID NO: 87843 - DNA, 370 bp, Zea mays
  Clone ID: MRT4577_180110C.1
ggtgttgttagtaaaaaaaggaagcttatgctctcggcacaacccatacacgtgatagggtttttgactgcgcacacaactggacaaggatatgtttgcatataactggctgctaagcgcgattacaagaaaaattagggaagagcttttgatggaccggatttgccgccacatatacacacataacgtagaattgcttaatataaggaccctttcagaaagaaatttaaactgagttttgtcacataataatgataaatcttgtcagggatggctgtctttgctctaagagatcaaaggggctgctcacgggcttcaacacgtatttacgtctgatctgaccgtactcttgcagagttggaaactcttt

SEQ ID NO: 87844 - DNA, 807 bp, Zea mays
  Clone ID: MRT4577_180111C.1
ttttttttttttttttcgctaatgcctgcagctgcacataatttacctttccaagcagaggcaggcctgctgcatgaaaaacagcaggttttgtcaactgttacttattattacaccataatccgtgctgatttgtagccgtttcttcttcttcttctttgcaatggatgtttcacagcaatgagatattcagtcggtaatttcggagcagtaaatgcgaaacagaacccatcacctgagctgcttcctgtatgaagctttgtattcttctaacatcactttatttttccttcctttacctcacactgtaaacccgagacaaactatctgaccaccatgccatgacaatccactataaaggcatcctaccctatcctcttctctccagagcaaaactccgaccaaaaaaaaactgaaaattctcactcacatcttagttaatgaggaactaaaaggccaaaaacgcgctgggaaaaaagaagaagaagaaatggctagcaaaaattactgcctgtctagctaggtctcttcctccagggcctgccgaagaagagacgggctcctaacgaaccttcccttcatccgaggccggcagtcggcgttcaccttgcgcacctggtaccggatcttcttggagaagagccgtgtgcgcctcttctccttgtaccgcagcacgctggcttccctgacgccaccgccgcctgctccgttctctggaaacaggtcgatgtctgcaagcttagcccgcacttcggtggccgacgtcggcgactccggcccgctgccctcggcaaacatggacccttt

SEQ ID NO: 87845 - DNA, 2040 bp, Zea mays
  Clone ID: MRT4577_180112C.1
atggcccaaggacacatttccctttcagccatcaccggtccggtcgtgcagacgaagtggtcccatgtgccgctaaccttcgatgcccgagacgtcgatctgcgcagcgccccccacatcgacgccatggttatcaactgcagcgtggtaggctgggacctgcacaaagtcctagtcgacaatggcagtcaagcagacatcattttcctccatgccttcgaccgcatgggcataagccacagcctgctcaagccttcggacaacccgttgtatggtttcggcggcaatggcacatttcccgtcggcaaaatagagttgcctctctccttcggtgtagcacccaatgcccgaagtgagcaagtgaccttcgatattgtcgatatggtgtatccatacaacgccattatgggccggggctccatcaacaagtttgaggcagccattcacggactttacctgtgcatgaagataccaggtccgctaggcgccatcacggtctatggcaaccagcagactgcgcgaaacatagagcggaacttcgtccccgggcaaagaaacgtgcactgcctaacggcccagcgcgaggtccccgcgtccgacagcccaactgacaaagaacacgacaaagcacaactacagagcaacgacgggaccaagactgttcccctcgaccaggccacgcccaaacagacagtcaccatcagcgaggacctcacttcgtatgacgaggagaaactcctctgctatttgtccaagaacaaagacgtctttgcctggtctgccctcgacctggtcggggtcagtcgctccatcatcgagcacaacttgggaatcgacccttcggtgcgaccgaaaaaacagcggctccgcaaaatgtctgatgagaagacaaaagccgccaaggccgaggtacatcgcctcctggaggccaagtttatcgagccagtagcctaccccacatggctcgccaacgttgtgatggtgcagaaaaagagcgaaaaatggtggatgtgcatcgatttcaccagcctcaacaaggcctgcccaaaggacaacttcccgttgcctcggatcgacaaaatagtcgatagcgcggccgggtgcgaagtcatgtcactcctcgactgcttctccggttaccatcaaatatacatgaaggaggaggacaaggctagcaccagcttcataacacccttcggcacgtattgcttcatcagaataccggagggactcaagaacgccgggtccactttctcccggcttaccaaaacggtgctcgagcggcaagtcggcagaaatatattcacgtatgtggacgatatcgtcgtcgccagcagaagcaaggaggatcatctcgccgacctcgccgaaacgtttgcgaacatgcgagacgcaccacttcgcctaaaccccgaaaagtgcgtcttcggcgtttgccaggggaaaatattgggctacctggtgtcacaccgcggaatcgaggccaacccaaccaaaattcaggccatcatcaacatgtcgcccccgcagtcagccagagacgtccagcgcctgacaggcagattggccgccatcaacagattcatctccaaatccgcagagcgaagtctccccttcctcaaaaccctccgcggcgcaaaagacttcgcttggggaccagagcaggtggcggccttcgcctcattaaaacagtacctgtcagaattggcagttcttacaagccccgactctttgctacccctgctgctttatgttgcagcttcgccgcatgcggtcagcgcggcactggttcaggagcagacagtacagggtgtgatcaggcaatgtccagtctattatgtctccgaagtgctcaacccatcaaaatgtaatatgacggaactggaaaagattgcctatgcagttgttatggcttcacacaaattgcgccactattttgaagcattcaaggtccgggtcacctcagataggggactcggcgaattgttcaggaacccggaggcatcggtcaggattgccaaatgggtggccgaactgtga

SEQ ID NO: 87846 - DNA, 5607 bp, Zea mays
  Clone ID: MRT4577_180113C.1
atggcacccaagagagctaaccccaaggctgacgaggctgcgaaggcagcactgctggccgcaagaaagggcaaggccctcgtcctcacccaatccacccaccaagagcccactgaagacaatgttccccacaccggcgaagacgacaccttccgcacctgcggaaccgaaggacagtcgcagccgcccccaggcttcgccccactggaaggcgcggacctcaccgaggacggtgaggtcctcggcgtctcaacagaagaacagctgcagctgcgcgccctgcgcctcaggaaccgcaatctccagaggcagaaagagatactggaggccaagcgccagcgtgtgtccgcattagccaaagtgtggcaaatgatacgcgacgaggagcagaaagcccaagacctcgagcgcgagatcgcgctgatgcagcgcgaaggccacctcggtctacagcaagagccacccctccaacagcgcacacaaccggaggacacgcgcgaaggccacctcggccggcagcatggcccacccctgcagcaccgggcgcagccggagaacccgcgtttcccccagaatgactacgtctcccagcacggcgcgccattccaaggggtcaactacctcgacgagcgaagtcccctggcgccacacctacaagtgacgccttggccagctaactttcgagcgggggcataccccaagtacaacggcagcaccgacccggcgcaatacatcatgagttatcaagtcgccgttgcatcagccggaggggacgacgacgccacaatggcgaagtctttcatcatcgccctagagggcccagcactcacctggttcaccagattgcctccgctgtccattgattcgtggagaagtctcagggacaagttcctcctcaacttccaagggtaccgtctagacaccgacgctttggccgagctctcgctttgcaaacagctggaaaaggagactctgcgggagtattaccgcaagttcttaacactcaagtcgcagctgccctctgtcgacgatcagatcgccatccactacgccatcagtggccttcgggccggcgtcctctacagccactgtatcagagatccacccaagagcttgcaggagctatatcagctcttcgaaaaatatgccaaatccgaagagctccaccagcgcaaggtcgagtcacaacggaaacccaaagatgcccagcagtccagccgcacatggacaaggactccgcagccagactccggtcgagatggccgcagaatatccccccagggccgcggaaatggaactcgcggcaggggtcgagggcgggcgcagcagccgccgcgccggttctactgccttttccacggcgaagactgcgcccaccagaccaaagactgccccgagacaaaggccaccagagacagaatggcgcgggcgcagccagccgacaatcccagaattgtcgcgcataattaccagcaaccccctccaccatatatccacgctcccgccccgcatccaccgcaccacgcttaccaacaccatcaggaagtacaaatcgtacctcctccacccccaccaccacaccagcaacaccaaaacatcccccatgccccaaagcaggaagacttcgccgatcagccatatcgcggagtcattcacatgataacaggggggtccagcactgactttgacaccaagcggcagaagcgggaccactaccgcagcatcaaccatgtcgccgtcactggcccagtcgtgcagacgaagtggtcccacataccgctaaccttcgacgcacgagacgtcgacctgcgcagcgccccccacatcgacgctatggtcatcaattgcagcgtggcaggctgggacttacacaaagtcctagtcgacaacggcagtcaggcggacatcatcttcctccacgccttcgaccgcatgggtataagccacagcttgctgaagccttcggacaacccgttgtatggtttcggcggcaagggcacctttccagttggcaagatagagttgcccctctccttcggtgtagcgcccaatgcccgaagtgagcaagtaaccttcgacattgtcgacatggtatatccatacaacgccatcatgggccgaggctccatcaacaagttcgaagctgccatccacgggttgtacctatgtatgaagataccaggcccgctaggcgccatcacaatctacggcaaccagcagacggcgcgcaacatagagcgggacttcgtgcccggtcagagaaacgtacactgtctcacgacccagcgcgaggtccctgcgccggccagcccaaccgacaagcagcacgacaaggcacagttgcagtgccaagacgggaccaagactgtccccctcgatcaggccacgcccaagcagacagtaactatcagcgaagacctcacctcacttgaagaagagaaacttctctgctgcctggccaagaataaagatgtcttcgcctggtctgccctcgatctggtcggagtcagccgagccataattgagcacagcttggggattgacccttcggtgcgacccaaaaagcagagacttcgcaaaatgtcagacgaaaagacagaggccgccaaggcggaggtgcatcgcctcctggaggctaaattcatcgagccagtggcttaccccacgtggctctccaatgttgtgatggtgcagaaaaaaagcgggaaatggcgcatgtgcatagacttcaccagtctcaataaggcctgcccaaaggacaatttcccgttgccgcggatcgacaaaatagtcgatagcgcggccagatgcgaggtcatgtccctcctcgactgcttctccggctatcaccagatatacatgaaggaggaagacaaggctagcaccagctttataacacccttcggcacttattgctttgtcagaatgccggagggtctcaagaatgccggatccaccttctccagactcaccaaaacagtgctcgaggggcaggtcggcagaaatatattcacatatgtggacgacatcgtcgtcgccagcaagaataaggaggaccatctcgccgacctggcagagacattcgcgaacatgcgagatgctcgactccgcctaaacccggaaaagtgcgttttcggtgttcgccagggcaagatattgggctacctggtgtcccgccgcggcatcgaggccaacccaaccaagatccaggccatcgtcgatatgtcgcctccgcagtccgccagggacgtccagcgcctgacaggcaggatggccgctctcaacagattcatctccaggtccgccgagcgaagtctccccttcctcaaaacactccgcggcgcgaaggacttcgcttggggaccggagcaggcagcggccttcgcctcactaaaacagtacctgtcggagctggccatcctcacaagccccgactcctcgctccccttattgctctatgtcgcggcttcgccgcacgcggtcagcgcggcactggtacaagagcagacagtcgagggcgcagtcagacagtgccctgtctactatgtctccgaagtcctgacaccgtccaaatgcaacatgacagagctggagaagattgcctacgcagttgttatgtcctcgcgcaagctgcgccattattttgaagcattcaaggtccgagtcacctcagacagggggctcggcgaactattcaggaacccggaggcatcagtgagaattgccaagtgggcagccgaactctccggctaccacatcagcttcgagcccaggacagctatcaagtcgcaagtcctggcagacttcgtcgtcgactggactgggccagtaacacagccggacccatccacagaaaaggtctggactatccattgcgacggtgcatggtgtcatgcgggggcaggcgtcgctgcagtcgtcacctcaccagccggagtcaaacacagatatgcagcacgcctcagcttcgctctggaatccgacaaatgtacaaacaacatagcagagtatgaagcagtcatcctcggcctccgcaagctaagggccctcggagtcaccacatgtatcatcaaaacagactccaagatagttgtcggtcaggtcgagaaagactatgcagcaaaagaccccgcgctcatgcaatacctcgcggctatccgaagtctcgagagacagttcaagggattcaccctacagcatgtggacagggccaagaacgaggaggccgatgcattagccaaggccgccgccaggggcgagcccctgccctccgacgtattctttcacaccatcagcacgccagccgtccggagccccgaagggctccaaataactaatgatagcgagggccaccgtatagtcaacctaatcatgatcgaagactggcgggccccaataaccctgttcctacagggatactatcatccaaccgacgtcagtgaggcaaagcgcctcagacatcgaagccgggacttcgcactgatcgagggccaattatacaagaaaggggtcagtcagccaatgcttaaatgcgtcaccgaaaccgaaggcatgcaaatcctgcgcgaggtccacagtggcacgtgcggctcgcacgcagggccaagggccctggctgcaaaggtgatccgacaagggttttactggcctgcaatgatctgcgccgcaaatcgagtcacaaggtcctgcgaagcctgccagaagttctctcctcggtcaggcaacccctcgcaatacacaaagctgattgcccacacatggcctcttcagcgctggggcctggacattgtcgggcccctgcccaccgctcaagggaaccttaagttcgctttcgtagccgtcgaatacttcaccaaatggattgaagcgagggccgtttccacaatcacatcaaagactgcccaaaaattcttttggcagaacattgtttgccgcttcggagtaccgtccgagctaacagttgacaacggcaagcagtttgacagccaagatttcaaggatttttgtttttccatcggcaccaagcttgccttcgcttcagtctatcatccgcagtccaacggggtcgtggagcgtgccaatgggaaaatcttcacagctgtcaagaagatgctcctcgatgaaagaaaaggcagatggaccgacttgttaccggaggcagtctgggcgctaaacacaaccgagtgcagggcgaccgggttcactcctttccgccttctatacggatcggaggcaatgaccccgcaagaaataaagcatgggtctccgcgcacagctccgtcagccgcccctgacgtggatgagccaacctccaaagatctcattgacggagaccgagtcttcgccctgcaggccctaaacaaataccaagcccagaccaaagcatggcgcgaccgcgcagtcatcccaagggagttcagcacgggggacctcgtactcatccgaacagctcggacggagtccaagggcaagctggagcccaggtgggagggccccttcatagtcaaaacaaaagcttcccccagcgcttacaggctcacaacgccaaatggcgaggacctggagcactcctggaacatcgacaaccttcgtaaattttttgtttaa

SEQ ID NO: 87847 - DNA, 376 bp, Zea mays
  Clone ID: MRT4577_180114C.1
gcagtgtgtgggccactacaacgaggtgaaaagcgtcaccatcggcgagtacctgcccccccacctggtgatttacatcgatgtgcccgttccacaggtccagagggggggtcagaagaaaggacatccagattagctggggatcacctctgcctatctacaggacattgagaatgcctataagaaaacctttctccctgagatgactgaaaaatgtgaggttttacaacattctgcaagggaagctcaagattcagaaaaggtggtagacgacattgaatacctgaagttcgataaagggccgtggctcaagcaggacaatcgcactttataccacctgcgaatactggttcacgataagtttgatgtgcggaat

SEQ ID NO: 87848 - DNA, 152 bp, Zea mays
  Clone ID: MRT4577_180115C.1
ctatcacacttctttgggtcggctattggtttccacacagggtacaacctttctttaagaagcttcggaaggtcctcccgaaccgagaaaagagcccccaacttttctttttaaaagccctggttctaaactttttacaaaaaaaagaattt

SEQ ID NO: 87849 - DNA, 917 bp, Zea mays
  Clone ID: MRT4577_180116C.1
gcttccactagccacaggccaacgaaatcgcaaagcgaagctacggccaccgaccgacgttccaagaagcgaaacgaaacgaaaatgatgatgatgatgggagagagagcgcacgcgcctccgtggcagcgctcgccggcggccagcggcgtcacggacgcggacgacgcgtctccgtacgccctcctagcggcgctgcagcattacctgccgtcgaacgaggtggcggcgtacgacgaagacgacgaggaggcggccctggcggcggcgaccgccgccgtcgacgcgtacgcctgcgacgagttccgcatccgccaacgttgagggagcggcccccgccccggatgttggatgggtctccgacctcatcaactgagggaactcgtggaactaccagctcagaagttcaggggggaataaccaaaaaaaaagtaggaagatttttaattttttagtttttttacaaatattttcctggtccttgtacagatgttcctgctttgtgaatagtcttggatggttgtcgaagggaggggagacagggaatggttgatttgttatgaggtttcagatgatggcatgtcggtgaagggaagaagcctagggaggagaaaaaaggtgcccagcaaaccatggtggaaaatggatcaagaagacatgtgcaggcgaccatgtatacgggttgtctagatgcacatggtgtcttccctgtctgtgtgaggtgggagcatgggaggcgatcatggcggcgatccaagaccgaactcataatttcagcgagcgattccagaacgaacggcgtcttgagttgatgttcattcagctatttgcctttaagattcgacgagttattactgctctgtgatttttctcaaatgtatttccatattgatctacaaaaaagagagggggggggg

SEQ ID NO: 87850 - DNA, 510 bp, Zea mays
  Clone ID: MRT4577_180117C.1
aaggagcaaagctaccgtcgccgaagccgagcgacgttccaagaaacgaaacagccatgatgatgatgggagagggagcgcacgcgccgccttggcagcagtcaccggcggccagcggcatcatggacgcggacgaggtgtcgccgtacgccctcctggcggagctgaagcattacctgccgtcaaacgaggtgatggcgtacgacgaggacgacgaggaggccctggcggcggcggccgccgtcgacgcgtacgcatgcgacgagttccggatgtacgagttcaaggtgcggcggtgctcgcgcgggcggagccacgactggacggactgcccctacgcgcacccgggggagaaggcccggcggcgcgaccccaggcggtaccactactccggcgcggcgtgcccggacttccgcaagggcgggtgcaagcgcggcgacgcgtgcgagctggccacggggtgttcgagtgctggctccacccgtcgcgctaccggacgcagccctgcaa

SEQ ID NO: 87851 - DNA, 2000 bp, Zea mays
  Clone ID: MRT4577_180118C.1
gctcgagcaacggagccaccgaaaaaaaaaaaaaaaaaaaaaaaacaaacaaaaaaaaaacagaaaaaaaaacaaaaaaaaaatgggttacctacctcgaggccggccgggacgcctccacggccaagcgcctcgaaggcaaagcttccactagccacaggccaacgaaatcgcaaagcgaagctacggccaccgaccgacgttccaagaagcgaaacgaaacgaaaatgatgatgatgatgggagagagagcgcacgcgcctccgtggcagcgctcgccggcggccagcggcgtcacggacgcggacgacgcgtctccgtacgccctcctagcggcgctgcagcattacctgccgtcgaacgaggtggcggcgtacgacgaagacgacgaggaggcggccctggcggcggcgaccgccgccgtcgacgcgtacgcctgcgacgagttccggatgtacgagttcaaggtgcggcggtgctcgcgcgggcggaaccacgactggacggcctgcccctacgcgcacccgggggagaaggcccggcggcgcgaccccaggcggtaccactactccggcgccgcgtgcccggacttccgcaagggcgggtgcaagcgcggcgacgcgtgcgagttcgcgcacggggtgttcgagtgctggctccacccgtcgcgctaccggacgcagccctgcaaggacggcaccggctgccgccgccgcgtctgcttcttcgcgcacacgccggaccagctccgcgtgccgccgccgcggcagtccagccctaggggcgcggcggcggcgtcgtcgccgctggcccgagtcgtacgacggctcgccgctccgccgccaggcgttcgagagctacctcaccaagagcggcatcgtgtcgtcgccgccgccgaccagcacgctcgtctcgccgccgaggtcgccgccgtcggagtccccgccaatgtcgccagacgccgccgccgcgctccgccgcggctcgtggccgggcgtagggtcgcccgtcaacgaggtcctcgcgtcgatgcgccagctgcggctcggcggcggctcgccgaggtcggcgccttccggcgggtcgttcttgggcggaggctacccgttcgggtccccaaagtcaccggccgggctgtacagcctcccgtccacgccaatcaggccgtctccggtgaccgtgaccacctcctgcggcgccaccgtcctcaccgtggaacgcctcaacctcggactcatcggggacgaggagccggtgatggagagggtcgagtccgggagagccctccgcgagaaggtgttcgagcggctcagcaaagaagccgccgttcccagcgacaccgccgcatccgccaacgttgagggagcggcccccgccccggatgttggatgggtctccgacctcatcaactgagggaactcgtggaactaccagctcagaagttcaggggggaataacaaaaaaaaagtaggaagatttttaattttttagttctttacaaatattttcctggtccttgtacagatgttcctgctttgtgaatagtcttggatggttgtcgaagggaggggaggcagggaatggttgatttgttatgaggtttcagatgatggcatgtcggtgaaggagacaaggtgcccagcaaaccatggtggaaaatggatcaagaagacatgtgcaggcgaccatgtatacgggttgtctagatgcacatggtgtcttccctgcctgtgaggtgggagcatgggaggcgatcatggcggcgatccaagaccgaacccataatttccgcgagcgattccagaacgaacggcgtcttgagttgatgttcattctgctatttgccttttaagattcgacgagttattactgctctgtgatttttctcaaagtatttccatattgatctatgcatgcatgtacaatgtcagtactgctactttcgctgatactccgtaacaaaattaattaaaaccggcgttgctaaaaaaaaaaaaaaa

SEQ ID NO: 87852 - DNA, 1275 bp, Zea mays
  Clone ID: MRT4577_18011C.1
gtaccactcgggctcgtccgggagactggtcataccttcgttccaaaaagctctcctcttccggtcttccccccttctgcagctgtgctcccctgccccgcggcgccgccgctagcctctcgtgcgccatgccaccgcgaaagcgcccggcgctgccgccggatgagccctccccttcctcgaagcatcaacctgaagcacagccgtccgaaccctccaaaccctcccccgattccgagcagccgatcatctcggcggcgatcctcgcccaactgcccccccaggagcgcctggcttacaagctcatcttcgaggcgggcaacaagggtatgtggatgctggatatccgcaagaagttgttgatgggccccaacatcgccaccaaggtcgtgcgtaccctcgtgacgcggcggctcctcaaggaggtcagcgatgtgcgccaccgtagcaggaagatcttcatggccaccgacttccagccctctgccgagatcaccggcggcacctggtaccacgacggccgcctggacactgacgccgtaaccactgcgcgccgctgctgccaggcgcaggtcgagaggctcggcgccgccaccgtgcagatgatccaccacggtattctgaaggacgatcccagggccgggtacactatcgacaagatcagggatatcatcaagaccatggttctcgacaaggtcctcgaggaggtcaagagcaccggcacgggggagttcagggatgtcagggccggcacaatgtgctatcggctggtgactggggctccgcagggagggatgatggagggaattccttgtggggtttgccccaggattgatgagtgctcgccggaggggatcatctcaccgagcacgtgcgtttactacaagaagtggctgcagatggacttctaggcggttacggtgagccgtcttctgtctgtacctgtatatgtgtatgatggggtgttggagtccattggagaactcagtttcatattgaccaattggggctgttggatctcatcacacgaatgttcaattggaacctctgaaaggatagtcatagaagcgcagtttcagattgtgatactcatattaataatcatctctatagttatttctacttagtccttttagcttgtcataatcttccatttgtatttattccaccaagtttggatgtctttactgagtaccatatcaacttcctaaatatttaggtaatcggcaaacctttcagctcttctatctactgaagtcatgtattgagcatgtg

SEQ ID NO: 87853 - DNA, 269 bp, Zea mays
  unsure (1)..(269): unsure at all n locations
  Clone ID: MRT4577_180120C.1
cacaaagntnctcctcgatcctcatcttctcctactcatctcctccccctccctccctcggtctctcgagtcaagagcagagcacctcccaaccagctttccctttgcttccaccttgggctgaccccccacctgagcgcaccgactcgcttgctgctgggccagacacacacacgcactggaaaaagcgcgcctcgcgggcacgccttggacacgaccagagcgagctaggccacacgcgcgggactgacttacacacacaaccgcgg

SEQ ID NO: 87854 - DNA, 117 bp, Zea mays
  Clone ID: MRT4577_180121C.1
acttggccgggatcgacccagtgcggccaaggccttttttagttgctgatagagggtctcgaagacgatgggcacaaagaggctcaggggggtgcatcactctacggtctctactct

SEQ ID NO: 87855 - DNA, 283 bp, Zea mays
  unsure (1)..(283): unsure at all n locations
  Clone ID: MRT4577_180123C.1
gcagcaccaagaagcaccattttttccttaagattaacttacaataaatccctnnnnctgtaacagtatccatcgatccgcactccatgctgttcagatgcatgggtctgtttaaaccgtcgatgaacacattattaacaactgacacatatctaccttgtattcaaatacacagatgtggatcatacaatcaccacatcgatcgactataaaccctttggactatggttaacctcacctttatcgaacatgataacttggctcctcggccccaacttcttat

SEQ ID NO: 87856 - DNA, 388 bp, Zea mays
  unsure (1)..(388): unsure at all n locations
  Clone ID: MRT4577_180124C.1
ccatcctccatctaagcagctgtttgacaagaaacacatatttgatcacgtcacgcgaagcaccattttttagtatgacttctnncaccacttccacaataaaccacttccaccaaatccaaaaccaaaacctaagccagaaccaaaacccaatccctaaccatactaccactctccaactccaacatatgactcgcccacaccaatctaccaccctccgcctagacatttacttgataagaagccctatctagatcacttacatatacaccatgactatcaccacttcttacaccacttccacaaaaaacccacgccacaaaaaccaaagccagaacccaaaccagaacccataccacagactaagcccgagtaccaccctgcaaca

SEQ ID NO: 87857 - DNA, 482 bp, Zea mays
  unsure (1)..(482): unsure at all n locations
  Clone ID: MRT4577_180125C.1
ccatgccggaccgtacccagtaggcctnccagctctaccttagagagactaattacgggggcgagatcggcgtcagtagctgtgctggtgctcgccgcggcgcacgttacgctataggtgtgctttttttaccgactctcaacctgcgggcgtgggcgggtgctgcagtttgtttggaggttatatttgagcttgctttggtgttcttgttgaatctgtttcgctgtgccatatgcgatgtttgctgtgctaacttgttaggtcttacgaggttcgtggctcttcgtttagggttcatccgggttacagttgcctgtttaattcgtttaagggatttggtcctcttgtggtgcttcggcttggactcatgtgtcgattggtgttgtgcttctatttcacctgataggcctcgtactgctgatatccctggggctttcagacgctgaagttggttgccctggtctttttcttctttctggtct

SEQ ID NO: 87858 - DNA, 279 bp, Zea mays
  Clone ID: MRT4577_180126C.1
caaacgtccgggtttaactcaatactccaaaaactgacaagctatctgaaaatggagaaaatgatagacttaagtttgggccttcaaccatgcaaggatggccagcaaccatggcagatgctcaatcagcaatgccagattttgaaaaccagacaacaatccttggtgtttttgaagggcaaggaagaaaaatccttgccaaattctgttgcaaaaaaccgcatggtcaagtcctcaaaagccaagcccattcaactggtgacctaggcactgctgtcc

SEQ ID NO: 87859 - DNA, 293 bp, Zea mays
  Clone ID: MRT4577_180127C.1
attaggggccaaaaaaggcccctaagaaaaaagaaactgtacaattgcagcccagaaaaaaaaagggtgtaaaaaaaaaggggaagacagttttccctaaacggaaaaatttaattgggggagaaagggggtactaaaattttaaaaaaaagaccaacgacagggccactaccaaacaatagccaaacttaaaaagcctacctccacagggacctatgcccttgagaacgcattaaaatataaaaaaaaaaggccccgaatccctcccaaaaaagcttaaccctttaaagggg

SEQ ID NO: 87860 - DNA, 263 bp, Zea mays
  Clone ID: MRT4577_180128C.1
cgacgcacaccagcacctgccctcctcgccgtcgccgactccctccgcgcgaccgatctaccctccgccgccaccatgtcgctgatcgccggggaggacttccagcatatcctgcatttgctgaacaccaacgtggatgggaagcggacgatcatgttcgccatggactcaatcaagggtgtcgggcgccgcttctgcaacatcgtctgcaagaaggccgacatcgacatgaaccagacggctggcgagctgacgcctgatga

SEQ ID NO: 87861 - DNA, 721 bp, Zea mays
  unsure (1)..(721): unsure at all n locations
  Clone ID: MRT4577_180129C.1
ggccgcttttttttttttttttttggcatcaataacatctcctttattatatacttacaatctttcttatgatggatagatgaggaagacaggagtaactttcctacaattactattgcagatattgatcaaaccatgaagtactctgatatccacttgcatgcactggaaggtgtaagctcaaggctttcacagatggagacagaactcatcaactataaaactctattgatgagttgaagttaacaattggtaactataaacttctatagagaagttggtttccttcctcgaattttcagtagcatcatcatttcaactgcattggtttcttcagagcatcgatttagttcagcattgcatcaaggctacaatagngctttttgtgttcctactctgttcccttgttttcctctctgtttttcttctgaagaaataaaagataggaatatacagtttcatagataactgaatttatttacctgtagatctgccttttgatatttatctgtttctcccccaaattcagtcatcgcttcaccataagtcgttatatggttttgggatccacaaccgactcctatggaagggggttcctgactttttcacggagtacgcaaatgccaaatggaaacaaaaaaatggactcagcctatcgtgaagctatgaaggaagagcactgtcccattattctgtttttttcggtaattaaagcatcatc

SEQ ID NO: 87862 - DNA, 1181 bp, Zea mays
  unsure (1)..(1181): unsure at all n locations
  Clone ID: MRT4577_18012C.1
gggaccctcgaggccggccgggctcctccttcttcctcccttttgcatttgtgctacctgccctgccctgccccgcgccgccgccgccgccgccgccaacccgccattacctgtgccatgccaccgcgaaaacgcccgccgtcgccgccggaggagccctcccttgcctcgaagcctcgacctgacgcgcagccgtccaaacccgaccccgattccgagcagtcgaccatcaacccgaggatcctcgcccaactccccaaccaggagcgcctggtgtacaagctcatcttcgaggcgggcaacaagggcatgtggatgctggacatccgcaagaagctgctgatggcccccaacgtcgccaccaaggtcgtgcgcaccctcgtggcaagcgggctcctcaaagaggtcagcgacgtgcgccaccgcagcaggaagatcttcatggccaccgacttccagccctccgccgagatcaccgggggcacctggtaccacgacggccgcctggacaccgacgccgtaaccaccgcgcgccgctgctgccaggcgcaggtccagaggctcggcgccgcgaccgcgcagatgatccaccaaggcattctcaaggaagaccccagggccgggtacactatcgacaaggtcagggatatcatcaagaccatggtgctcgacaaggtgctcgaggaggtcaagagcaccggcgcgggggattttagcgccgtcagggccggcacaatgtgctaccggctggtcactggggctccgcagggagggatgatggagggaatcccttgtggggtttgccccaggattcatgagtgctcgccggaggggatcatctcacccagcacctgcgtttactacaagaagtggctgcagatggacttctaggcggtgacggtgagccctcttctgtccgtcacgatgggggtgttggagtccattggagaatttagtttcatattgaccagtcgggacctctgaattctgaaaggataggtttgcatctctacgctcatgggacactttggtcatacgtactggcacttaatacgtctggatcgaaggggttgaagaggcttctanttgtaatatattttagtaatatattttatttataatgtattgtatgattttatgttatttttttacttgcaatatagaaactagaaataagaact

SEQ ID NO: 87863 - DNA, 577 bp, Zea mays
  Clone ID: MRT4577_180130C.1
ttttgttttttttttttttttttttttttttttttttttttttttttttttttttttttttttttttttttttttttttttttttttttttttttttttttttttttttttttttttttgggcccccaaaaacaaaaaattaggggggggggggggcacccccacccggggctaggaaaacgggccagggggcccaaattaagccttggccaaagccccagggccccacaaaaggctggggggccaaaaccgccaaattttttccgggaaaaacaaaaccccaatttggggggtcacaatggcccccagggccaaaaaccccctggttccctcccggggggaaaagggttcccccccaaaaggggggtttttaaagaaaaaaaaacccccatttggaaaggttggggggggcccttttggaggaaaaaaaaaaagccctttcaacccaaaaaatttttttcaaaaaagggggggaaaaaaaggggcgcctcaaaaggggctttttcccttggggaaaaaaaaaaaggcccccttaaccccccccaaaaattccctggaaaaaaagggggcaaaaacc

SEQ ID NO: 87864 - DNA, 4389 bp, Zea mays
  Clone ID: MRT4577_180131C.1
atggcacccaagagagctaacccgaaggctgacgaggctgcgaaggcagcactgctggccgcaagaaagggcaaggccctcgccctcacccaatccacccaccaagagcccactgaagacaacattccccgcacctgcgaagacgacaccttccgcacctgcgggcccgaaggacaatcgcagccgcccccaggcttcgccccagtggagggcgcggatctcaccgaggacggcgaggtcctcggcgtctcaacagaagaacagttacagctgcgcgccctacgcctcaagaaccgcaatctccagaggcagaaagagatactggaagccaagcgccaacgtgtgtctgcactagccaaggtgcggcagatgatacgcgacgaggagcagaaggcccaagacctcgagcgcgagatcgcgctgatgcagcgcgaaggccacctcggtctacagcaagagccacccctccagcagcgcgcgcaaccggaggacacgcgcgaaggccacctcggcctgcagcatggcccacccctgcaacaccggccgcagccggagaacccgcgtttcccccaacatgattacgccttccagcacggcgcaccattccaaggggtcaactacctcgatgagcgaagtcccctggcgccacacctgcaagtgacgccgtggccagctaacttccgagcaggggcatatcccaagtacaacggcagcactgatccggcgcaatacataatgagttatcaagtcgccgttgcatccgccggaggggacgacgccacaatggcgaagtctttcatcatcgccctagagggcctagcactcacctggttcaccagattgcctccgctgtccattgattcgtggagaagtcttagggacaagttccttctcaacttccaagggtaccgcccagacaccgacgctttggccgagctctcgctttgcaaacagctggaaaaggagactctgcgggagtattaccgcaaattcttaacgctcaagtcacagctgccctccgtcgatgatcagatcgctatccactacgccatcagtggccttcgggccggcgtcctctacagccactgtataagagatccacccaagaaccttcaggagctatatcagctctttgaaaaatatgccaaatccgaagagctccaccagcgcaaagttgagtcacagcggaagcccaaggatgccccgcagtccagccgcacatggacgaggactccgcaaccagactccggtcgagatggccgcagtcagcagcaagtgcacaacatcgcaaaccagcagcctgctgctggcccccctcgtcgccaggaatatcccccccaaggccgcgggaacggaactcgtggcaggggccgagggcgcgcgcagccgccgcgccggttctactgccttttccacggcgaagactgcgcccaccaaacgaaagactgccccgaaacgaaggccaccagagacagaatggcgcgggcgcagccagccgacaatcccagaattgtcgcgcataattaccagccaccccctccaccatatatccacgctcccgctccgcatccaccgcaccacgcttaccaacaccatcaggaagtacaaatcgtacctcctccacccccaccaccacaccagcaacaccaaaacatcccccacgccccaaaacaggaagacttcgccgatcaaccatatcgcggagtcattcacatgataacaggggggtccagcactgacttcgacaccaagcggcagaagcgggaccactaccgcagcatcaaccatgtcgcggtcaccggcccagtcgtgcagacgaagtggtcccatataccgctaaccttcgatgcacgagacgtcgacctgcgcagcgccccccacatcgacgctatggtcatcaattgcagcgtggcaggctgggacttgcacaaagtcctagtcgacaacggcagtcaggcggacatcatcttcctccacgccttcgaccgcatgggtataagccacagcctgctcaagccttcggacaatccgttgtatggcttcggcggcaaaggcaccttccccgttggcaaaatagagcttcccctctccttcggtgtagcacccaatgcccgaagtgagcaagtaaccttcgacattgtcgacatggtatatccgtgcaacgccatcatgggccggggctcaatcaataagttcgaagccgccatccacggactgtacctatgtatgaagataccaggtccgctaggcgctatcacgatctacggcaaccagcagacggcgcgcaacatagagcgggacttcgtgcctggtcagaggaacgtacattgtctcacggcccagcgcgaggtccccgcacccgccagcccagccgacaagcagcacgagaaggcacagttgcagagccaagatggaaccaggactgttccccttgaccaggccacgcccaagcagacagtcactatcagcgaagaccttacgtcacatgaagaagaaaggcttctctgctgcctggccaaaaataaagatgtcttcgcctggtccgccctagacctggtcggagtcagccgatccataattgagcacagcttgggaattgacccttcggtgcgaccaaaaaagcaaaggctccgcaaaatgtccgacgaaaagacagaggccgccaaggcggaagtgcaccgcctcctagaagctaaattcatcgagccagtggcttaccccacgtggctctccaatgtcgtaatggtgcagaaaaaaagcgggaaatggcgaatgtgcatagacttcaccagtctcaataaggcctgcccgaaggacaacttcccgttgccgcggatcgacaagatagtcgatagcgcggccgggtgcgaggtcatatcactcctcgactgcttctccggctatcaccagatatacatgaaggaggaagacaaggctagcaccagctttataacacccttcggcacttattgcttcatcaggatgccggagggactcaagaatgcggggtccaccttctccagactcaccaaaacagtactcgagggccaggtcggcagaaatatatttacatatgtggacgacatcgtcgtcgccagcaagaataaggaggaccacctcgccgacctcgccgagacattcgcgaacatgcgagatgcacgactccgcctgaacccggaaaagtgcgtcttcggtgttcgccagggcaagatattgggttacctggtgtcacaccgcggcatcgaggccaacccaaccaagatccaggccatcgtcgacatgtcgcctccgcagtccgtcagggacgtccagcgtctgacaggcagactggccgctctcaacagattcatctccaggtccgccgagcgaagtctccccttcctcaaaacactccgcggcgcgaaagacttcgcctggggaccggagcaagcagcggccttcgcctcactcaaacagtacctgtcggagctggccatcctcaccagccccgactcctcgctccccctattgctctatgtcgcggcttcgccgcacgcggtcagcgcggcactagtgcaggagcagtcagtcgaaggcgcagtcagacagtgccctgtttactatgtctccgaagtcctgacaccgtccaaatgcaacatgacagagctggagaagatcgcctacgcagttgtcatgtcctcgcgcaaactgcgccattactttgaagcattcaaggtccgagtcacctctgacagagggctcggcgaactattcagaaacccggaggcatcggtgaggattgccaagtgggcagccgaactctccggctaccacatcagcttcgagcccaggacagccatcaagtcgcaagtcctggcagacttcgtcgtcgactggactgggccagcaacacagctggacccgtccacagagaagatctggaccatccattgcgacggtgcatggtgccatgcgggggcaggcgtcgctgcagtcgtcacctcacctgccggagtcaaacacagatatgcagcacgcctcaacttcgctctggaatccgacaaatgtacaaacaatatagcagagtatgaagcggttatcctcggcctccgcaagctaagggccctcggagtcaccacatgtatcatcaagacagactccaagatagttaccggacaggtcgagaaagactatgcagcaaaagaccccgccctcatgcaatacctcgcggctatccgaagtcttgagagacaattcaagggattcaccctgcagcatgtggatagggccaagaacgaggaggccgatgccttagccaaggccgccgccaggggcgagcccctgccctccgacgtgttttccacaccatcggcactccagccgtccggagccccgaagggctccagataa

SEQ ID NO: 87865 - DNA, 696 bp, Zea mays
  Clone ID: MRT4577_180132C.1
atttgcctcccaccccagccgcccaatctttcttcctctcttctcctttcagctgacgtgttgctcaagcagggagcctttctccccagcgcgcagaagcatctcctggcgtcttccccttcccagcgtaggagcaagggcctctcatggcggcctcccttgtgacatctccccctgcaggttctaggtcgacgcccttctctagcctggacttgtagcgcctgatgcccatattctccctctgctgtccaaggcgcgagcaccattttcccccatggccgagctcaacacctgtcaggacaagccacgggcccctctgctccagccatggcgcgggatcttctctggtccgagctcgagcaggtgagctcaccccatggccttggctccttgtttgcttcctgcacgtacgctccctctctcacctggctttctgcccttctcaagtccgtccatccccgccttgccgtggatttcctcgagcaaccccacctggtcgccatcctcctcagatcgacctccccttttgtgcagctcaccatctccccctacacgcgctatctggacgccatccgagctccgccagccggtctgcaactccctctcgctgcttcccttggacgccggagctccagggccgcacctctgtttccatggccgaccagcaaacctcgatggttgagctctctaggactt

SEQ ID NO: 87866 - DNA, 5196 bp, Zea mays
  Clone ID: MRT4577_180133C.1
atggcacccaagagagctaacccgaaggctgacgaggctgcgaaggcagcactgcttgccgcaagaaagggcaaggccctcgtcctcacccaatccacccaccaagagcccactgaagacaatgttcctcgcacctgcgaagacgacaccttccgcacctgcgggcccgaaggacaatcgcagccgcccccaggcttcgccccactggaaggcgtggatctcaccgaggacggcgaggtcctcggcgtctcaacagaagaacagctacagctgcgcgccctgcgcctcaagaaccgcaatctccagaggcagaaagagatactggaggccaagcgccagcgtgtgtccgcactagccaaggtgcggcaaatgatacgcgacgaggagcagaaggcccaagacctcgagcgcgagatcgcgctgatgcagcgcgaaggccacctcggtctacagcaagagccacccctccagcagcgcgcacaaccgaaagacacgcgcgaaggccacctcggcctgcagcatggcccacccctgcaacaccgagcgcagccggagaacccgcgtttcccccagcatgactacaccttccagcacggcgcgccattccaaggggtcaactacctcgacgatcgaagtcccctggcgccacacctgcaagtgacgccttggccagctaacttccgagcaggaacctatcccaagtacaacggcagcaccgacccggcgcaatacataatgagttatcagaagtctcagggacaagttcctgcgctcaacttccaagggtaccgcccagacaccgacgccttggccgagctctcgctttgcaagcagctggaaaaggagactctgcgggagtattaccgcaaattcttaacactcaagtcacagctgccctccgtcgatgatcagatcgctatccactacgccatcagtggccttcgtgccggcgtcctctacagtcattgtatcagagatccacccaaaaacctccaggagctatatcagctctttgaaaaatatgccaaatccgaagagctccaccagcgcaaggttgagtcacagcggaagcccaaagatgctccgcagtccaaccgcacatggacgaggactccgcagctagactccggtcgagacggccgcagtcagcagcaagtgcacaacatcgccaaccagcatcccgctgctgacccccctcgccgccaggaatatccaccccaaggccgcggaaatggaactcgcggcaggggccgagggcgcgcacagccgccgcgccgattctactgcctttttcacggcgaagactgcgcccaccaaaccaaagactgccccgaaacgaaggccaccagagacagaatggcacgggcgcagctagccgacaaccccagaattgtcgcgcacaactaccagcaaccccctccaccatatatccacgcccccgctccgcatccaccgcaccacgcttaccaacaccatcaggaagtacaaatcgtacctcctccacccccacctccacaccagcaacatcaaaacatctcccatgccccaaagcaggaagacttcgccgatcaaccatatcgcggagtcattcacatgataacaggggggtcaagcactgacttcgacaccaagcggcagaagcgggaccactaccgcagcatcaaccatgtcgctgtcactggcccagtcgtgcagacaaagtggtcccacataccgctaaccttcgacgcacgagacgtcgacctgcgcagcgccccccacatcgacgccatggtcatcaattgcagcgtggcaggctgggacttacacaaagtcctagtcgacaacggcagtcaggcggacatcatcttcctccacgccttcgaccgcatgggcataagccacagcctgctcaagccttcggacaacccgttgtatggcttcggcggcaagggcacctttcccgttggcaaaatagagttgcccctctccttcggtgtagcacccaatgcccgaagtgagcaagtaaccttcgacattgtcgacatggtatatccatacaacgccatcatgggccggggctccatcaataagttcgaagctgccatccacggattgtacctatgtatgaagataccaggtccgctaggcgctattacgatctacggcaaccagcagacggcgcgcaacatagagcgggacttcgtgcctggtcagaggaacgtgcactgtctcacgacccagcgcgaggtccctgcgcccgccagcccaaccgataagcagcatgacaaggcacagttgcagagccaagacgggaccaagactgtccccctcgatcaggccatgcccaagcagacagtcactgtcagcgaagaccttacctcacatgaagaagagaagcttctctgctgcctggccaagaataaagatgtcttcgcctggtccgccctcgacctggtcggaatatacatgaaggaggaagacaaggccagcaccagctttataacacccttcggcacttattgcttcatcagaatgccggagggactcaagaatgccgggtccaccttctccagactcaccaaaacagtacttgaagggcaggttggcagaaatatatttacatatgtggacgacatcgtcgtcgccagcaagaataaggaggaccatctcgccgacctcgccgagacattcgcgaacatgcgagatgcacgactccgcctaaacccggaaaagtgtgtcttcggtgttcgccagggcaagatattgggctacctggtgtcacaccgcggcatcgaggccaacccaaccaagatccaggccatcgtcgacatgtcacctccgcagtccgccagggacgtccagcgtctgacaggcagattggccgctctcaacagattcatctccaggtccgccgagcgaagtctccccttcctcaaaacactccgcggtgcaaaagacttcgcctagggaccggagcaagcagcggccttcgcctcactaaaacagtacctgtcggagctggccatcctcacaagccccgactcctcgctccccctattgctctatgtcgcggcttcgccgcacgcggtcagcgcggcactagtgcaggagcagacagttgagggcgcggtcagacaatgccctgtttactatgtatccgaggtcctgacaccgtccaaatgcaacatgacagagctggagaagatcgcctacgcagttgttatgtcttcgcgcaaactgcgccattactttgaagcattcaaggtccgagtcacctcagacagggggctcggcgaactattcagaaacccagaggcatcggtgaggattgccaagtgggcagccgaactcttcggctaccacatcagcttcgagcccaggacagccatcaagtcacaagtcctggcagacttcgtcgtcgactggactgggccaataacacagccggacccgtccacagagaaggtttggaccatccattgcgacggcgcatggtgccatgcgggggcaggcgtcgccgcagtcgtcacctcaccagccggagtcaaacacagatatgcagcacgcctcagcttcgctctggaatccgacagatgcacaaacaatatagcagagtatgaagcggttattctcggcctccgcaagctaagggccctcggagtcaccacatgtatcatcaaaacagactccaagatagttgccggccaggtcgagaaagactatgcagcaaaagaccccgcactcatgcaatacctcgcggccatccgaagtctcgagagacagttcaagggattcaccttgcagcatgtggatagggccaagaacgaggaggccgatgcattggccaaggctgccgccaggggcgagcccttgccctccgacgtgttctttcacaccattggcacgccagccgtccggagccccgaagggctccaaataactaatgatagcgagggccaccgtatagtcaacctaatcatgaccgaagactggcgggcaccaataaccctgttcctacaggggtactatcatccaaccgacgtcagtgaggccaagcgcctcagacatcgaagctgggacttcgcactgattgagggccaactctacaagaaaggggtcagtcagccaatgcttaagtgcgtcaccgaaaccgaaggcatgcagatcctacgtgaagtccacagtggcacgtgcggctcgcacgcagggccaagggccctagcggccaaggtgatccgccaagggttttactggcccgcaatgatctgcgccgcaaatcgggtcgcaaagtcctgcgaagcctgccagaagttttctcctcggtcaggcagcccctcgcagtatacaaagctgattgcccatacatggcctctccagcgctggggcctggacattgtcgggcctctgcccaccgctcaggggaacctcaagttcgccttcgtagccgtcgaatacttcaccaaatggatcgaagcgagggctgtttctacaataacatcaaagactgcccaaaaattcttctggcaaaacatcgtttgccgcttcggagtaccgtccgagctaacagttgacaacggcaagcagtttgacagccaagatttcaaggatttttgtttttccatcggcaccaagcttgccttcgcttcagtctatcacccgcagtccaacggggtcgtggagcgcgccaatgggaaaatcttcacagctgtcaagaaaatgctcctcgatgaaaaaaaaggcagatggaccgatttgttaccggaggcagtctgggcgctaaacacaaccgagtgcagggcgactgggttcactcctttccgccttctatacggatcggaggccatgaccccgcaagaaataaagcatgggtccccgcgtacagttccgtcagccgtccctgacgtggacgagccaacttcaaaagatctcattgacggagaccgggtcttcgccctacaggccctaaacaaataccaagcccagaccaaagcatggcgcgaccacgcagtcatcccgagggagttcagcgaaggggacctcgtactcgtccgaacagcttggacggagtccaggggcaagctggagcccaagtgggagggcccctttatagtcaagacaaaagcttcccccagcgcctacaggctcacaacgccgaacggcgaggacctggagcactcctggaacatcgacaaccttcgcaaattttttgtttga

SEQ ID NO: 87867 - DNA, 3225 bp, Zea mays
  Clone ID: MRT4577_180134C.1
atggcacccaagaaagctagctcgaaggttgacgaggctgcgaaggcagcactgctggccgcaaaaaagggcaaggccctcgccctcgtccacaccacccaccaagaggccactgaagacgacgctctccgcacctgcggctctgaaggacagccgcaacctcccccaggcttcgctccaccggagggcacggacgtcaccgaggacggcgaagtcatcggtgtctcagcggaagaacagctacagctgcgcgccttgcgcatcaagaaccgcaatctccagaagcaaaaagagatacttgaggccaaacaccaacgtgtgtctgcacaagccaaggtgcggcaaatgatacgcgacgaagagcagaaggcccaggagctcgaacaggagatcgcgctaatgcagcgcgaaggtcacttcggcctgcaacacgggccacccctgcaacagcgcgcacaagtcgaagacctacacttcccccagcgcgaccacgccatcccacacgccgcggtattccaaggtgtcaactacctcgacgagcgaagtcccctggcgccacacctgcaagtgacaccttggcctgccaacttccgggcagggacctatctcaagtacaacggcagcactgacctagcacagtacatcatgagttatcaggtcgccgttgcatcttccggaggggttgacgccacgatgaccaagtccttcatcatcgccctagaaggcctaactctcacctggtacaccaggttacccccgttgtccatcgactcctggagaagcctccgggacaaattcctgctcaacttccaagtgtaccgcccagacaccgacgccttggctgaactttcactctgcaacgccgacttcaacacgaagcggcagaagcgggaccactaccgcagcatcaaccacgtcgccatcaccggtccggtcgtgcagacgaagtggtcccatgtgccgctaaccttcgatgcccgagacgtcgatctgcgcagcgccccccacatcgacgccatggttatcaactgcagcgtggcaggctgggacctgcacaaagtcctagttgacaatggcagccaagcagacattattttcctccatgccttcgaccgcatgggcataagccacagcctgctcaagccttcggacaacccactgtatggcttcggcggcaagggcacgtttcccgtcggcaaaatagagttgcctctctccttcggtgtagcacccaatgcccgaagtgagcaagtgaccttcgatatcgtcgatatgatgtatccgtacaacgcaattatgggccggggctccatcaacaagtttgaggcagccattcacggactttacctgtgcatgaagataccaggtccgctaggcgccatcacggtctacgacaaccaacagactgcgcgaaacatagagcgggacttcgtccctgggcaaagaaacgtgcactgcctcacgacccagcacgaggtccccacgtccgccagcccaactgacaaagagcacgacaaagcacaactacaaagcatcgacgggaccaagactgttcccctcgaccaggccacgcccaagcagacggtcaccatatgcgaagacctcacttcgcatgacaaggagaaactcctctgctgtttgtccaagaacaaagacgtcttcgcctggtctgccctcgacctggtcggggtcagtcgctccatcatcgagcacagcttgggaatcgacccttcgaaaacaaaagccgccaaggccgaggtacatcgcctcctggaggccaaatttatcgagccagtggcctaccccacatggctcgccaacgttgtgatggtgcagaaaaagagcggcaaatggcggatgtgcatcgatttcaccagtctcaacaaggcctgcccaaaggacaacttcccgttgcctcggatcgacaaaatagtcgatagcgtggccgggtgcgaagtcatgtcacttctcgactgcttctctggttaccatcaaatatacatgaaggaggaggacaaggccagcaccagcttcataacacccttcggcacgtattgcttcatcagaatgccggagggactcaagaacgccgggtccactttctcccggcttaccaaaacggtgctcgaggggcaagtcggcaaaaatatattcacgtatgtggacgacatcgtcgtcgccagcagaagcaaggaggatcaccttgctgacctcgccgaaacgtttgcgaacatgcgggacgcacgacttcgcctaaaccctgaaaagtgtgtcttcggcgttcgccaggggaaaatattgggctacctggtgtcacaccgtggaatcgaggccaacccaaccaaaattcaggccatcatcaacatgacgcccccattggccgccctcaacagattcatctccaaatctgcagagcgaagtctccccttcctcaaaactctccgcggcgcaaaagacttcgcttggggaccagagcaggcgacggccttcgcctcattgaaacagtacctatcggaattggcagttcttacaagccccgactcctcgctacccctgttgctttatgttgcggcttcgccgcatgcggtcagcgcggcactggttcaggagcagacagtagagggcgtgatcaggcaatgtccagtttattacgtctccgaagtgctcacaccatcaaaatgtaacatgacagaactggaaaagataacctatgcacttgttatggcttcgcgcaaattgcgccactattttgaagcattcaaggtccgggtcacctcagataggggactcggcgaattgttcagaaacccggaggcatcggtcaggatttccaaatgggcggccgaactctccggctaccacatcacgttcgagcccaggacagccatcatgtcacaagttctggcagacttcgtcgttgactggactgggccaataacacagccggacccgtccgcagagaaggtttggacaatccattgcgacaacgcatggtgccacgcgggggcaggcgctgctgcagtcattacctcacccgccggggtcaagcacagatacgcggcatgcctcaactttgctctggaatctgacagatgcactaacaacatagcagaatatgaagctgtcatcctcggcctccgcaaactaagggcccttggtgtcaccacctgcattatcagaacagactccaaggtagtcaccggccaagtcgagaaagactattga

SEQ ID NO: 87868 - DNA, 4449 bp, Zea mays
  Clone ID: MRT4577_180135C.1
atggcacccaagagagccaacccgaaggctgacgaggctgcgaaggcagcactgcttgccgcaagaaagggcaaggccctcgccctcacccaatccacccaccaagagcccactgaagacaatgttccccgcacctgcgaagacgacaccttccgcacctgcgggcccgaaggacaatcgcagccgcccccaggcttcgccccactggaaggcgcggacctcaccgaggacggcgaggtcctcggcgtctcaacagaagaacagctacagctgcgtgccctgcgcctcaagaaccgcaatctccagaggcagaaagagatactggaggccaagcgccagcgtgtgtccgcactagccaagcgtgactacaccttccagcacgccgcgccattccaaggggtcaactacctcgacgagcgaagtcccctggcgcctcacttgcaagtgacgccttggccagctaacttccgagcagggacctatcccaagtacaacggcagcaccgacccggcgcaatacataatgagttatcaggtcgccgttgcatccgccggaggggacgacgccacaatggcaaagtctttcatcatcgccctagagggcccagcactcacctggttcaccaggttgcctccgctgtccattgattcatggagaagtctcagggacaagttcctgctcaacttccaagggtaccgcccagacactgacgccttggccgagctctcgctttgcaagcagctggaaaaggagaccttgcgggagtattaccgcaaattcttaacactcaagtcacagctgccctctgtcgatgatcagatcgctatccactacgccatcagtggacttcgtgccggcgtcctctacagtcattactgcgcccaccaaaccaaagactgccccgaaacgaaggccaccagagacagaatggcacgggcgcagccagccgacaaccccagaattgtcgcgcacaactaccagcaaccccctccaccatatatccacgcccccgctccgcatccaccgcaccacgcttaccaacaccatcaggaagtacaaatcgtacctcctccacccccaccaccgcaccagcaacaccaaaacatcccccatgccccaaagcaggaagacttcgccgatcaaccatatcgcggagtcattcacatgataacaggggggtccagcactgacttcgacaccaagcggcagaagcgggaccactaccgcagcatcaaccatgtcgccgtcactggcccagtcgtgcagacaaagtggtcccacataccgctaaccttcgacgcacgagacgtcgacctgcgcagcgccccccacatcgacgctatggtcatcaattgcagcgtggcaggctgggacttacacaaagtcctagtcgacaacgacagtcaggcggacatcatcttcctccacgccttcgaccgcatgggtataagccacagcctgctaaagccttcggacaacccgttgtatggcttcggcggcaagggcacctttcccgtcggcaaaatagagttgcccctctccttcggtgtagcacccaatgcccgaagtgagcaagtaaccttcgatattgtcgacatggtatatccatacaacgccatcatgggccggggctccatcaataagttcgaagctgccatccacggactgtacctatgcatgaagataccaggtccgttaggcgtcatcacagtcttcggcaatcaacagactgcgcgcaacatagagcgggacttcgtgcccggtcaaagaaacgtgcattgtctcacgactcagcgcgaggtccctgcgcccgccagcccaaccgataagcagcacgacaaggcacagttgcagagccaagacgggacaaagactgtccccctcgatcaggccacgcccaagcagacagtcactatcagcgaagaccttacctcacaggaagaagagaagcttctctgctgcctcgccaagaataaagatgtcttcgcctggtccgccctcgacctggtcggagtcagccgatccataattgagcacggcttgggaattgacccttcggtgcgaccaaaaaagcaacggcttcgcaaaatgtccgacgaaaagactgaggccgccaaggcagaggtgcaccgcctcctagaggccaaattcatcgagccagtggcttaccccacgtggctctccaatgttgtaatgatatacatgaaggaggaagacaaggccagcaccagcttcataacacccttcggcacttattgcttcatcagaatgccggagggactcaagaatgccgggtccaccttctccagactcaccaaaacagtactcgaagggcaggttggcagaaatatatttacatatgtggacgacatcgtcgtcgccagcaagaataaggaggaccatctcgccgacctcgccgagacattcgcgagcatgcgagacgcacgactccgcctaaatccggaaaagtgcgtcttcggtgttcgccagggcaagatattgggctacctggtatcacatcgcggcattgaggccaacccaaccaagatccaggccatcataaacatgacgcctccgcagtccgccagagacgtccagcgtctgacaggcagattggccgctctcaacaggttcatctctaggtccgccgagcgaagtctcccctttctcaaaacactccgcggtgcaaaagacttcgcctggggaccggagcaggcagcggccttcgcctcgctgaaacagtacctgtcggagttggcaatcctcacgagccccgactcctcgctccccctattgctctatgtcgcggcttcgccgcacgcggtcagcgcggcactagtgcaagagcagacggttgagggtgcggtcagacagtgccctgtttactatgtctccgaagtactgacaccgtccaagtgcaacatgacagagctggagaagatcgtctacgcagtcgttatgtcttcgcgcaagctgcgccattactttgaagcattcaaggtccgagtcacctcagacaggggactcggcgaactattcagaaacccggaggcatcggtgaggattgccaagtgggcagccgaattatccggctaccacatcagcttcgagcccaggacagccatcaagtcacaggtcctggcagacttcgtcgtcgactggactgggccaataacgcagccagacccgtccacagagaagcatgtggatagggccaagaacgaggaggccgatgcattggccaaggctgccgccaggggcaagcccttgccctccgacgtgttctttcacaccatcgacacgccagccgtccgaagccccgaagggctccaaataactaatgatagcgagggccaccgcatagtcaacctaatcatgaccgaagactggcgggcaccaataaccctgttcctacaggggtactatcatccagccgacgtcagtgaggccaagcgcctcagacatcgaagccgggacttcgcactgattgagggccaactctacaagaaaggggtcagtcagccaatgcttaagtgcgtcaccgaagccgaaggcatgcaaatcctacgtgaagtccacagtggcacgtgcggctcgcacgcagggccaagggccctggctgccaaggtgatccgccaagggttttactggcccgcaataatctgcgccgcaaaccgggtcacaaggtcctgcgaagcctgccagaagttttctcctcggtcaggcaacccctcgcagtatacaaagctgattgcccatacatggcctctccagcgctggggcctggacattgtcgggcccctgcccaccgctcaggggaacctcaagttcgccttcgtagccgtcgaatacttcaccaaatggattgaagcgagggctgtttctacaataacatcaaagactgcccaaaaattcttctggcaaaacattgtttgccgcttcggagtaccgtccgagctaacagttgacaacggcagatggaccgatttgttaccggaggcagtctgggcactaaacacaactgagtgcagggcgactgggttcacccctttccgccttctatacgggtcggaggccatgaccccgcaagaaataaagcatgggtccccgcgtatagttccgtcagccgtccccgacgtggacgagccaacttcaaaagatctcattgacggagagcgggtcttcgccctacaggccctaaacaaataccaagcccagaccaaagcatggcgcgaccacgcagtcatcccgagggagttcagcgaaggggacctcgtactcgtccgaacagctcggacagagtccaggggcaagctggagcccaagtgggagggcccctttatagtcaagacaaaagcttcccccagcgcctacaggctcacaatgccaaacggcgaggacctgcagcactcctggaacatcgacaaccttcgcaatttttttgtttga

SEQ ID NO: 87869 - DNA, 1593 bp, Zea mays
  Clone ID: MRT4577_180136C.1
atggcacccaagaaagctagctcgaaggctgacgaggctgcgaacaccgacttcgacacgaagcggcagaagcgggaccactaccgcagcatcaaccatgtcgccatcaccggtccggtcgtacagacgaagtggtcccatgtgccgctaaccttcgacgcccgagacgtcgatccgcgcagcgccccccacatcgacgccatggttatcaactgcagcgtggcaggctgggacctgcacaaagtcctagtcgacaatggcagccaagcagacatcatctttctccatgccttcgaccgcatgggcataagccacagcctgctcaagccttcggacaactcactgtatggttttggcggcaagggcacgtttcccgtcggcaaaatagagttgcccctctccttcggtgtagcacccaatgcccgaagtgagcaagtgaccttcgatatcgtcgatatggtgtatccgtacaacgccattatgggccggggctccatcaataagtttgaggcagccattcatggactttacctgtgcatgaagataccaggtccgctaggcgccatcacggtctacggcaaccagcagactgcgcgaaacatagagcgggacttcgtccccggacaaagaaatgtgcactgcctcacggcccagtgcgaggtccccgcgtccgccagcccgactaacaaagaacacgacaaagcacaactacagagcaacgacgggaccaagacggttcccctcgaccaggccacgcccaagcagacggtcaccatcagcgaagacctcacttcgcacgatgaggagaaactcctccgctgtttgtccaagaataaagacgtcttcgcctggtccgccctcgacctggtcggggtcagccgatccatcattgagcacagcatgggaatcgacccttcgaaaaagagcgacaaatggaggatgtgtatcgacttcaccagtctcaacaaggcctgcccaaaggacaacttcccgctgcctcgaatcgacaaaatagtcgatagcgtggccgggtgcgaagtcatgtcactcctcgactgcttctccggttaccatcaaatatacatgaaggaggaggacaaggccagcaccagcttcataacacccttcgacacgtattgcttcatcagaatgccggagggactcaagaacgtcgggtccactttctcccggcttaccaaaacggtgctagaggggcaaatcagcagaaatatattcacgtatgtggacgatatcgtcgtcgccagcagaagtaaggaggaccatcttgctgacctcgccgaaacgtttgcaaacatgcgggacgcacgacttcgcctaaaccccgaaaagtgcatctttggcgttcgtcaggggaaaatattgggctacctggtgtcacaccgcggaatcgaggccaacccaaccaaaattcaggccatcatcaacatgacgccctcgcagtcagccagagacgtccagcgcctgacaggcagattggccgccctcaacagattcatctccaaatccgcagagcgaagtctccccttcctcaaaactctccgcgacgcaaaagacttcgcttggggaccatag

SEQ ID NO: 87870 - DNA, 576 bp, Zea mays
  Clone ID: MRT4577_180137C.1
gaaaaaaaattcccggttttttcaatcccaaaagggccaaaacttacggttttaaacctttttttttggaaaagaaaaaaaaaacccaaggcccaagggaagggaagggggcttctcccagggcagccgggggagcttaaccccccatggggcctttaaacgttaaaaacatccaacaaaatattggcccggggtttcaaaccccattttttgcccccagcaagggggccgggcaaaaaagggcacccttgtttataaacaaaaccccccctaattggccccccggaaaacacccaacaacattttgggggaggggcacccgtcccttttattgaaaaaaaaacctgtcgttttgaatagggggcacaggtttttaataaaaaaccatggttttatgcaattaaaaggggcctggggaccccattaaagggtcccaaaaagttttttaccttaaaccccccccgggaaaattaggcaagcttttttccccaaaaaaagctaaaaaaactgatcaaacatgctagttgctccgggaacataaaaacgggcccccaagtttcccgggaaaaacctttc

SEQ ID NO: 87871 - DNA, 2352 bp, Zea mays
  Clone ID: MRT4577_180138C.1
atggcgagggcgcagccagccgacaatcccagaattgtcgcgcataattaccagccaccccctccaccatatatccacgctcccgctccgcatccaccgcaccacgcttaccaacaccatcaggaagtacaaatcgtacctcctccacaaccaccaccacaccagcaacatcaaaacatcccccatgccccaaagcaggaagacttcgccgatcaaccatatcgcggagtcattcacatgataacaggggggtccagcaccgacttcgacaccaagcggcagaagcgggaccactaccgcagcatcaaccacgttgccgtcactggcccagtcgtgcagacgaagtggtcccacataccgctaaccttcgacgcacgagacgtcgacctgcgcagcgccccccacatcgacgctatggtcatcaattgcagcgtggcaggctgggacttacacaaagtcctagtcgacaacggcagtcaggcggacatcatcttcctccacgccttcgaccgcatgggcataagccacagcctgctgaagccttcggacaacccgttgtatggtttcggcggcaagggcacttttcccgttggcaaaatagagttgcccctctccttcgatgtggcacccaatgcccgaagtgagcaagtaaccttcgacattgtcgacatggtatatccatacaacgccatcatgggccggggctccatcaataagttcgaagctgccatccacgggctgtacctatgtatgaagataccaggtccgctaggcgccattacaatctacggcaaccagcagacggcgcgcaacatagagcgggacttcgtgcctggtcagaggaacgtacactgtctcacgacccagcgcgaggtccccgcgcccgccagcccaaccgataagcagcacgacaaggcacagttgcagagccaagacgggaccaagactgtccccctcgatcaggccacgcccaagcagacagtcactatcagcgaagacctcacctcacttgaagaagagaaacttctctgctgcctagccaagaataaagacgtcttcgcctggtccgccctcgacctggtcggagtcagccgatccataattgagcacagcttgggaattgacccttcggtgcgacccaaaaaacagaggcttcgcaaaatgtccgacaaaaagacagaagccgccaaggcggaggtgcaccgcctcctagaggctaaattcattgagccagtggcttaccccacgtggctctccaatgttgtaatggtgcagaaaaaaagcgagaaatggcgaatgtgcatagacttcaccagtctcaataaggcctgcccaaaggacaatttcccgttgccgcggatcgacaaaatagtcgatagcgcggccggatgcgaggtcatgtctctcctcgactgcttctccggctatcaccagatatacatgaaggaggaagacaaggctagcaccagctttataacacccttcggcacttattgcttcgtcagaatgccggagggtctcaagaatgccgggtccaccttctccagactcaccaaaacagtactcgaagggcaggtcggcagaaatatatttacatatgtggacgacatcgtcgtcgctagcaagaataaggaggaccatctcgccgacctggccgagacattcgcgaacatgcgagatgcacgactccgcctaaacccggaaaagtgcgtcttcggtgttcgccagggcaagatattgggctacctggtgtcacaccgcggcatcgaggccaacccaaccaagatccaggccatcgtcgacatgtcgcctctgtccgccgagcgaagtctccccttcctcaaaacactccacggtgcaaaagacttcgcctggggaccggagcaagcagcggccttcgcctcactaaaacagtacctgtcggagctggccatcctcacaagccccgactcctcgctccccctattgctctatgtcgcggcttcgccgcacgcggtcagcgcggcactagtgcaggagcagacagtcgagggcgcagttagacagtgccctgtttactatgtctccgaggtcctgacaccgtccaaatgcaacatgacagagctagagaagatcgcttacgcagttgttatgtcctcgcgcaaactgcgccattactttgaagcattcaaggtccgcgtcacctcagacagggggctcggcgaactattcagaaacccggaggcatcggtgaggattgccaagtgggcagccgaactctccggctaccacatcagcttcgagcccagaacagccatcaagtcgcaagtcctggcagacttcgtcgtcgactggactgggccagtaacatag

SEQ ID NO: 87872 - DNA, 551 bp, Zea mays
  unsure (1)..(551): unsure at all n locations
  Clone ID: MRT4577_180139C.1
gttagcacgatatgcatccatgtccaatttctatgaccaccggttatcacacgataagagtattaggttagcacataagacgtttatgactatgcaaacgaacatcgactcaccctatactgatgccctgttattatacaataaaagctatcaggttcttacttgcccattcttgtaccgtgataaccatgancacactcttgctacgcagattgaggcagtgataatcggtacgcatgccaaagacatctgaccagccagggaacttaagttgctcacctgacaatggtcttacatgactggcttgccgggagcctcactacccgctacgagctaggtcttgttggcaccctggatcggctcgctcctgttttcttcctgagactaggggaggttggttatgcaggcaccgagcttgccgagatgaccatcacggccttgtgatcaggggcttgaagagctcatacgcctttttatgatactagccacagctcttatgcttccacagttgaggttgtgcaccgacctggctagtgaatgaacaggacata

SEQ ID NO: 87873 - DNA, 441 bp, Zea mays
  Clone ID: MRT4577_18013C.1
cctcgagccgtccggaacatcctaaagtcaagcaccaaggtgctacattattaatgtatgaaaataatatcgctgatccaaaatggaacatgctgtttcaaacatcacaaggaagaggaaacaaatcagtacatgttgcgccccatcgtctgtacctcctgtggaagctcgtcgcatacgtagacaattgttgaatgagagaaggttaatatcctcaggtgcattcgcatgcgtgtaacaagcctcatttttatcttgtggtcacttcgacccaaattttattgaagcactcaaaggatgaagcacacccaggttagcaaaggtatgccagattctacatgttcaaagaatgacaacagttagtccatcatgagatacatcaaggtatgaggttccatcacttttggtcctgagacttttatgtacatattaacctggggg

SEQ ID NO: 87874 - DNA, 3780 bp, Zea mays
  unsure (1)..(3780): unsure at all n locations
  Clone ID: MRT4577_180140C.1
atggcacccaagagagctaacccgaaggctgacgaggctgcgaaggcagcactgctcgccgcaagaaagggcaaggccctcgccctcacccaatccacccaccaagaggccactgaagacaatgttccccgcacctgcgaagacgacactttccgcacctgcggccctgaaggacaatcgcagccacccccaaacttcgccccactggaaggcgcggacctcaccgaggatggcgaagtcctcggcgtctcagcggaagaacagctacagctgcgcgccctgcgcctcaagaaccgcaatctccagaggcagaaagagatactggaggccaagcgccagcgtgtgtccgcactagccaaagtgcggcaaatgatacgcgacgaagagcagaaggcccaagacctcgagcgcgagatcgcgctgatgcagcgcgaaggccaccttggcctgcagcaagggccacccctccagcagcgcgcacaactggaagacacccgagagggccacctcggcctccagcatgggccacccctgcaacaccgagcacaaccggaagacccgcgtttcccccagcgcgactacaccttccagcacgccgcgccattccaaggggtcaactacctcgacgagcgaagtcccctggcgccacacctgcaagtgacgccttggccagctaacttccgagcagggacctatcccaaaagtctcagggaaaagttcctgctcaacttccaagggtaccgcccagacaccgacaccttggccgagctctcgctctgcaagcagctggaaaaggagactctgcgggagtattaccgcaaatttttaacactcaagtcacagctgtcctccgttgatgatcagatcgctatccactacgccatcagtggccttcgtgccggcgtcctctacagccactgtatcagagatccgcccaagaacctccaggagctatatcagctctttgaaaaatattccaagtccgaagagctccaccagcgcaaggttgagtcacagcggaaacccaaagatgccccacagtccagccacacatggacgaggactccgcagccagactccggtcgagatggccgcagtcagcagcaagtgcacaacatcgccaaccagcatcccgctgctgacccccctcgtcgccaggaatatcccccccagggccgcggaaatggaacttgcgcaaccttcttcacccctccaccatatatccacgctcccaccccgcatccaccgcaccacgcttaccaacaccatcagnaagtacaaatcgtacctcctccacccccaccaccacaccagcaacatcaaaacatcccccacgccccaaagcaggaagacttcgccgatccaccatatcgcggagtcattcacatgataaccgaggggtccagcactgacttcgacaccaagcggcagaagcgggaccactaccgcagcatcaaccatgtcgtcgtcactggcccagtcgtgcagacaaagtggtcccacataccgctaaccttcgacgcacgagacgttgacctgcgcagcgccccccacatcgacgctatggttatcaattgcagcgtggcaggctgggacctacacaaagtcctagtcgacaacggcagtcaggcggacatcatcttcctccacgccttcgaccgcatgggtataagccacagcctgctcaagccttcggacaacccgttgtatggcttcggcggcaagggcacctttcccgtcggcaaaatagagttgcccctctccttcggtgtagcacccaatgcccgaagtgagcaagtaactttcgatatcgtggatatggtatatccatacaacgccatcatgggccggggctccatcaataagttcgaagccgccatccacggactgtacctatgtatgaagataccaggtccgctaggcgccattacggtctacggcaaccagcagatggcgcgcaacatagagcgggacttcgtgcctggtcagaggaacgtgcactgcctcacgacccagcgcgaggtccctgcgcccgccagcccaaccgataaacagcatgacaaggcacagctgcagagccaagacgggaccaagactgtccccctcgatcaggccacgcccaagcagacagtcactatcagcgaagacctcacctcgcatgaagaagagaaactcctttgctgcctgtccaagaataaagatgtcttcgcctggtccgccctcgacctggtcggagtcagccgatccataattgagcacagcttgggaattgacccttcggtgcgaccaaaaaagcagaggcttcgcaaaatgttcgacgaaaagacagaggctgccaaggcggaggtgcatggcctcctagaggctaaattcatcgagccagtggcttaccccacctggctctccaatgttgtaatggtgcagaaaaaaagcgggaaatggcgaatgtgcatagacttcaccagtctcaacaaggcctgcccaaaggacaatttcccgttgccgcggatcgacaaaatagtcgatagcgcggccggatgcgaggtcatgtcactcctcgactgcttctccggttaccaccagatatacatgaaggaggaagacaaggctagcaccagctttataacacccttcggcacatattgcttcatcagaatgccggagggactcaagaacgccgggtccaccttctccagactcactaaaacagtactcgaagggcaggttggcagaaatatatttacatatgtggacgacatcgtcgtcgccagcaagaacaaggaggaccatctcactgacctcgccgagacattcgcgaacatgcgagacgcacgactccgcctaaacccggaaaagtgcgtcttcggcgttcgccagggcaaaatattgggctacctggtccgccgagcgaagtctccccttcctcaaaacactccgcggtgcaaaggacttcgcctggggaccggagcaagcagcggccttcgcctcactaaaatagtacctgtcggagctgtcagcgcggcactagtgcaggagcagacagttgacggcgtggtcaggcagtgcccattttactatgtctccgaggtactgacaccgtccaagtgcaacatgacagagctggagaagattgcttatggagtcgttatgtcttcgcgcaaactgcgccactactttgaggcattcaagcccaggacagccatcaagtcacaagtcctggcggacttcgtcgtcgactggactgggccaataacgcaaccagacccgtccacagagaaggtttggactatccattgcgacggcgcatggtgccacgcgggggcaggcgtcgctgcagtcgtcacctcaccagccggggtcaagcacatatacgcagcacgcctcagcttcgctctggaatccgacagatgcacaaacaatatagcagaatatgaagcagtcatcctcggcctctgcaagctaagggccctcggagtcaccacctgtatcatcaaaacagactccaagatagttgccggccaggtcgagaaagactacgcaacaaaggaccccgcacttatgcaatacctcgcggccaccagaagtctcgagagacaattcaagggattcaccttgcagcatgtggacagggccaagaacgaggaggccgacgcgttggccaaggccgccgccaggggcgagtccttgccctccgacgtgttctttcatatcatcggcacgccagccatccggagccccgaagggctccaaataactaatgacagcgagggccaccgcata

SEQ ID NO: 87875 - DNA, 355 bp, Zea mays
  Clone ID: MRT4577_180141C.1
ttctcacgtaagcccacggctagttattggcttttgaacaaggcgaacttgcatgagagctctaaacaaagtgagaacacgctttctttacatatggggggattctacggatcatgatcaatgctttgtgtcggccgcttgtgatgcacttacatgcatttgacgaatattgaattgtggcgcttgacgcttccaggtaaagtaaagagcaggggcacatgttaagccgccacaagacacaggctatactgtctagccacgggacgcgcacgaggctatttcacaacctgacctccgatgggacgtgtgaaagatccgccgcctagacaggctttgacggtataccgtgttgctt

SEQ ID NO: 87876 - DNA, 3192 bp, Zea mays
  Clone ID: MRT4577_180142C.1
atgggccggggctccatcaataagttcgaagcagccattcacggactgtacctatgtatgaagataccaggtccgttaggcgttattacggtctacggcaatcaacagactgcgcgcaacatagagcgagacttcgtgcccggtcagagaaacgtgcactgcctcacggcccagcgcgaggtccctgcacccgccagcccaaccgataaacagcacgacaaggcacagctgcagagcaacgacgggaccaagactgtccccctcgaccaggccacgcccaagcagacagtcactatcagcgaagacctcactgcgcatgaagaggagaagctcctctgctgcttgtccaagaacaaagatgtcttcgcctggtcagccctcgacctggtcggggtcagccgatccataattgagcacaacttgggaatcgacccttcggtgaggccgaaaaaacagcggcttcgcaagatgtccgacgagaagacagaggccgccaaggcagaagtgcaccgcctcctggaagccaatttcatcgagccggtggcttaccccacgtggctctccaatgttgtgatggtacagaaaaagagcgggaagtggcgaatgtgcatcgacttcaccagtctcaataaggcttgcccaaaggacaacttcccgttgccgcggatcgaccaaatagtcgataacgcggccggatacgaagtcatgtcactcctcgactgcttctccggttaccaccagatatacatgagggaggaagacaaggctagcaccagctttataacgcccttcggcacatattgcttcatcagaatgccggagggactcaagaacgtcgggtccaccttttccaggcttaccaagacagtgctcaacgggcaggttggcagaaatatattcacatatgtggacgacatcatcgtcgccagcaagagcaaagaggaccacctcgcagacctcgccgagacattcgcgaacatgcgggacgcacgacttcgcctgaaccccgataagtgcgtcttcggtgttcgccaggggaaaatattgggttatctggtatcacaccgtggcattgaggccaacccaaccaaaatccaggccattattaacatgacgcccccgcagtcacccagagaggtccagcgtctgacgggcagattggccgccctcaacaggttcatttccaaatccgctgagcgaagtcttcccttcctcaaaacactccgcggcgcaaaagacttcgtttggggaccagagcaggcggcggccttcgcctcactaaaacagtacctgatggaattggccgttcttacgagccccgactctttgctaccactgttgctttacgtcgcggcttcgccgcacgcggtcagtgcggcactggttcaggagcagacagtagagggagtgatcaggcagtgcccagtatattatgtctccgaggtgctcacaccgtcaaagtgtaacatgacagagctcgaaaagattgcatatgcagttgtcatgtcttcgcgcaaattgcgccactattttgaagcattcaaggtccgcgtcacctcagataggggactcggcgaattattcagaaacccggaggcatcggtgcggatcgccaaatgggcggccgagctctccggctaccacatcactttcgagccaaggacagcgatcaagtcgcaagttctagcagacttcgtcgtcgactggaccgggccaataacacagccggagccgtccgcagagaaggtctggacaatccactgcgacggcgcttggtgccatgcgggggcaggcgctgctgcagtcatcacctcacccgttggggtcaagcacagatacgcggcacgcttaagcttcgctctggaatctgacagatgcacaaacaacatcgcagaatacgaagctgtcatcctcggcctccgcaaattaagagccctcggtgtcaccacctgcataatccgaacagactccaaggtagtcgccggccaagtcgagaaagactatgcagcaaaggaccccgcacttatgcagtacctcgcggccatccgacgcctcgagaaacaattcaagggattcactttgcagcatgtggaccaggccaagaatgaagaagctgacgcattggccaaggcggccgccaggggtgaagccctcccctccgacgtgttctatcacgtcatcggcacaccagctgtccgtagccccgaagggctccaaataaccaacgacagcgagggtcagcgcacggtcaaccttatcatgaccgaagactggagggcaccaataaccctgtacctacaagggttctatcacccagtcgacagcaacgaggccaagcgcctccaccaccgaagccgggacttcgcattgatcgagggccaactgtacaaaaagggggtcagccagccgatgcttaagtgcgtcaccgagaccgagggcgttcaaatcctgcgcgaagtccatagggggacctgcggctcccacgcaggccccagggccctggcggcaaaggtgatacgacaaggcttctactggcccgccattatctacgccgcaaatcgggtcgtcagatcctgcgaagcctgtcagaaattttccccacgctcggggcgcccctcgcagttcacgaagttgatcgcccacacgtggccccttcagcgctggggcctagacatcgtcgggcccctgcccacggctcaggggaacctcaggttcacctttgtagccgttgaatacttcaccaaatggattgaagcaagggcagtctccaccatcacatcaaagatggcccagaaatttttctggcaaaatattgtttgccgctttggagtaccatccgaactaacggtcgacaacggcaagcagttcgacaaccaagatttcaaagacttctgcttctccatcggcaccaagcttgccttcgcctccgtgtaccatccccagtccaacggagtcatggagcgcgccaacggcaaaattttcacagctgtcaagaaaatgctcctcgacgacaaaaaaggcaagtggcccgacctgttacccgaagtggtctgggcactaaatacaactgagtgcagggcgactgtgtttaccccccttccgcctattatacggatcggaggccatgactccgcaagaaataaagcacgggtcgcctcggacagccgcgtcggccgtcccagacgtagatga

SEQ ID NO: 87877 - DNA, 3609 bp, Zea mays
  Clone ID: MRT4577_180143C.1
atggcaggctgggacctacacaaagtcctagttgacaatggcagtcaggcggacatcatcttcctccacgccttcgatcgcatgggcataagccacagcctgctcaagccttcggacaacccgttgtacggcttcagcggcaagggcacctttcctgtcggtaaaatagagctgcctctctccttcggtgtagcacccaatgcccgaagtgagcaagaaacctttgatatcgtggacatggtatatccatacaatgccatcatgggccggggctccatcaataagttcgaagcagccattcacggactgtacctatgtatgaagataccaggtccgtcaggcgtcattacggtctacggcaatcaacagactgcacgcaacatagagcgggacttcgtgcccggtcagagaaacgtgcactacctcacggcacagcgcgaggtccccgcgcccgccagcccaaccaataagcagcacgacaaggcacagctgcagagcaacgacgggaccaaaactgtccccctcgatcaggccacgcccaagcagacagtcactatcagcgaagacctcacttcgcatgaagaggagaagctcctctgctgcctaaccaagaataaggatgtcttcgcctggtctgccctcgatctggtcggagtcagccgatccataattgagcacagcttgggaatcgacccttcggtgcgaccaagaaagcagaggcttcgcaaaatgtccgacgagaagacagaggccgccaaggcggaggtgcaccgcctcctggaagccaaattcatcgagcccgtggcttatcctacgtggctctccaatgttgtaatggtacagaaaaaaagcgagaagtggcaaatgtgcatcgacttcaccagtctcaacaaggcctgcccaaaggacaatttcccgttgccgcggatcgacaaaatagtcgatagcgcggccggatgcgaggtcatgtctctcctcgactgcttctccggttaccaccagatatacatgaaagaggaagacaaggctagcaccagctttataatacccttcggcacatattgcttcatcagaatgccggagggactcaagaacgccgggtccaccttctccacgcttaccaaaacagtgctcgaagggcaagttggcagaaatatattcacatatgtggacgacattgtcgtcgccagcaggagtaaggaggaccatctcgccgacctcgccgagacattcacgaacatgcgagacgcacgactccgccttaacccggaaaagtgcgtcttcggtgttcgccaaggcaaaatattgggctacctggtatcacaccgcagcatcgaggccaacccaaccaagattcaggccatcataagcatgacacctccgcaatccgccagagacgtccagcgcctgacaggcagattagccgctctcaacagattcatctccaggtccgtcgagcgaagtctccccttcctcaaaacactccgtggtgcgaaagacttcgcctggggaccagagcaggcggcggccttcgcctcattaaagcagtacctgacagagttggccgtcctcacaagccccgactcctcgctccccatgttgctctacgtcgcggcttcgccgcatgcggtcagcgcggcactagtgcaggagcagacagttgagggcgtggtcaggcagtgccctgtttactatgtctccgaagtgctaacaccgtccaagtgcaacatgacagagctagagaagattgcctacgcagtcgtcatgtcttcgcgcaaattgcgccattacttcgaagcattcaaggtccgagtcacctcagacaggggactcggcgaattgttcagaaacccggaggcctcggtgaggattgccaagtgggcggccgaactctccagctaccacatcagcttcgtgcccaggacagccatcaaatcacaagtcctggcagacttcgtcgtcgactggactgggccaacaacgcagccagaccagtccgtagagagggtttggacgatccactgcgacggcgcatggtaccatgcgggggagggcgccgctgtagtcatcacctcaccagtcggggtcaagcacagatatgcagcacgcctcagcttcgctctggaatccgacagatgcacaaataatatagcagaatacgaagcagtcatcctcggcctctgcaagctaagggtcctcagagtcaccacctgcatcatcaaaacagactccaaggtagttgccggtcaagtcgagaaagactatgcagcaaaggaccccgcgcttatgcaatacctcgcggccatccgaagcctcgagagacaattcaagggattcaccttgcagcatgtggatcgggccaagaacgaagaggccgacgcattggccaaggccgccgccaggggcgagtccttgccctccgacgtgttctttcatgtcatcagcacgccagccgtccggagccccgaagggctccaaataactaatgacagcgagggccgccgcatagtcaaccttatcatgaccgaagattggcgggcaccaataaccctgttcctacaggggtactatcatccaaccgacatcagtgaggccaagcgcctcagacatcgaagccgagacttcgcactgattgcaggccaactctacaagaaaggggtcagtcagccaatgcttaagtgcgtcaccgaaaccgaaggcatccagatcctacgcgaagtccacagtggcacgtgcggctcgcacgcagggccaagggccctagccgctaagcgctggggcctagacattgacgggcccctgcccaccgctcaggggaaccttaagttcgccttcgtcgctgtcgaatacttcaccaaatggatcgaggcaagggctgtctccacaatcacgtcaaaaactgcccagaaattcttttggcaaaacatcgtttgccgcttcggagtaccgtctgaactaacagttgacaacggcaagcagtttgacagccaagacttcaaggatttttgcttctccattggcaccaagcttgccttcgcctcagtctatcatccgcagtccaacggagttgtggaacgcgccaatgggaaaatcttcacagctgtcaaaaagatgctcctcgatgaaaaaaagggcagatggaccgatttgttacccgaggcagtttgggcactgaacacgactgagtgcagggcgaccgggtttactcctttccgccttctatacggatcggaggccatgaccccacaagaaataaaacatgggtccccgcgaacagttccgtcagccgtccccgacgtggacgagccaacttcaaaggatctcatagacggagaccgagtcttcgccctgcaggccctaaataaataccaagcccagacaaaagcatggcgcgaccacgcagtcatcccgagggaattcagcgaaggggacctcgtactcgtccgaacaacccggacagagtccaggggcaagctggagcccaagtgggagggcccctttatagtcaagacgaaagcttcccctagcgcttacaggctcacaacgccaaacggcgaagacctggagcactcctggaacatcgacaacctccgcaaattttttgtttga

SEQ ID NO: 87878 - DNA, 259 bp, Zea mays
  unsure (1)..(259): unsure at all n locations
  Clone ID: MRT4577_180144C.1
cccgggtcgnacccacgncgtccgtaaaaaaaaaaaaaaaaaaaaaaaaaaagagggggggaaaaaaaaaaaaaaaaaaaaaaaagggcggaacgatataaagggtccaaagcttactaacgcatcgaatgctaacgtaactaaatgcttgtatagtggtcaccttaatttaatttcactgcgcccgtctttttacaactgtgccgcactggtaaaaacggtggggggggggcaaattaatgggccttggcgaactata

SEQ ID NO: 87879 - DNA, 190 bp, Zea mays
  Clone ID: MRT4577_180145C.1
ctatagtgtcacctaaatccaaaaaaaaaaaaaaaaaaaaaaaaaaaaaaaaaataaaaaaaaaaaaaaaaaaaaaaaaaaaaaggggtagactcggaaaatccgggaaattcagcctgcgggtcttccagggtttccatattttgggtatgggtaggagcttggggtgctcggtggtctagtgggtttc

SEQ ID NO: 87880 - DNA, 1500 bp, Zea mays
  Clone ID: MRT4577_180146C.1
atgccggagggactcaagaatgcggggtccactttctccagactcaccagagcagtactcgaagggcagtgcgtcttcggcgttcgccagggcaagatattgggttacctggtgtcacaccgcggcatcgaggccaacccaaccaagatccaggccatcgtcgacatgtcgcctccgcagtccgccagggacgtccagcgtctgacaggcagactggccgctctcaacagattcatctccaggtccgccgagcgaagtctccccttcctcaaaacactccgcggcgcgaaagacttcgcctggggaccggagcaagcagcggccttcgcctcactcaaacagtacctgtcggagctggccatcctcaccagccccgactcctcgctccccctattgctctatgtcgcggcttcgccgcacgcggtcagcgcggcactagtgcaggagcagtcagtcgaaggcacagtcagacagtgccctgtttactatgtctccgaagtcctgacaccgtccaaatgcaacatgacagagctggagaagatcgcctacgcagttgtcatgtcctcgcgcaaactgcgccattactttgaagcattcaaggtccgagtcacctctgacagagggctcggcgaattattcagaaacccggaggcatcggtgaggattgccaagtgggcagccgaactctccggctaccatatcagcttcgagcccaggacagccatcaagtcgcaagtcctggcagacttcgtcgtcgactggactgggccagcaacgcagtcggacccgtccacagagaagatctggaccatccactgcgacggcacatggtgccatgcgggggcaggcgtcgctgcagtcgtcacctcaccagccggagtcaagcacagatatgcagcacgcctcaacttcgccctggaatccgacaaatgtacaaacaatatagcagagtatgaagcggttatcctcggcctccgcaagctaagggccctcggagtcaccacatgtatcatcaagacagactccaagatagttgccggacaggtcgagaaagactatgcagcaaaagaccccgccctcatgcaatacctcgcggctatccgaagtctcgagagacaattcaagggattcaccctgcagcatgtggatagggccaggaacgaggaggccgatgccttagccaaggccgccgccaggggcgagcccctgccctccgacgtgtttttccacaccatcggcacgccagccgtccggagccccgaagggctccagataactaatgatagcgaaggccaccgtatagtcaacctaatcatgaccgaagactggagggcaccaataaccctgttcctgcagggatactatcatccagccgacgtcagtgaggcaaagcgcctcagacatcgaagccgggacttcgctctgatcgagggccaactatacaagaaaggggtcagtcagccaatgctcaaatgcgtcaccgaaaccgaaggcatgtag

SEQ ID NO: 87881 - DNA, 537 bp, Zea mays
  unsure (1)..(537): unsure at all n locations
  Clone ID: MRT4577_180147C.1
aatcaggaaacgagtgttcgttcacatgaacatagtttatcagatgggcaggacgaaaacagcatataaacgctgcaagggttctagtttcaacagagtttattctctaagcagaggtagactgccgtttcactccatcgaactcgcccatcattgctgtgccgccgggatcacacattggcacacaatttcacatagctgccagcatgagatcgtcataggctaactctatgtacataataactggatgactggatacaagcaggcctacaagctctaacagacttcggtctcaaacttgagggagatccccatgctgaataattcctggtagaacaacttctcgccgtaaggcacgttgattcttacaatgttctccgaagacttgcagaacccacagtaggggccacggatctttttgcctccggggacagacctcatgacaacattagccacgcgctctcacgtctggcagatgtgcatctgggagaagtcactcancatgaagaggcgctcatgcaggttggcagctgaccc

SEQ ID NO: 87882 - DNA, 379 bp, Zea mays
  Clone ID: MRT4577_180148C.1
cccacgcgtccggctacgcgtccgcactgagttctaaccacgcagacctcaacaagaagcagcgtgctcgtctccgaaaggtaaggcacgtgacaagatgtcgatacaagcatacgtcgaatagctcctgatgtcctagatcgaatgacagcatctaatctcctactacatcttctgtcacgacagcagcgtttgggcgcagtccgagtgcttaccccagttaaagcctgctgaggttactgctatcataaacgacttatatgaaccttgtactcttgtaccaactggtattttaattggatgtacaaagtacattatgatccaaagtgaacctggaattatcatccgatgacagaaggtcactgctggcattactatc

SEQ ID NO: 87883 - DNA, 340 bp, Zea mays
  Clone ID: MRT4577_180149C.1
cccgcggcgcatcatcaaggggacgcagcgactgctcagggagcgagcgccggggatcgacgcgtcgccctcggaggagaacactgccctactagaacgttatgaaccctgggccggcgcaagcaccctatggaggcggagctcataagcttggactgtgtgtacctggagaatatgccatgagtgacccaaaggtgaggggggtgaacaaaatgtgtaatgcgaacgttgacaaagtatgggggatatgcccagaaggttgccaagggcacatgggccgccgggctggatacagggaacagcggtttggagagtacagactggtactggagagcaccaa

SEQ ID NO: 87884 - DNA, 284 bp, Zea mays
  Clone ID: MRT4577_18014C.1
ttgttttctggagggtgtccgccctcttgggcagatttcctcaacgctcaagctattattttataccaaacgacggcacaacaatttgctcttttacgaaccttgcgaaaaaacttctagatggaccaactgacttcgctgacaaggaactagttctttcacaacttgacaatacagcagtttttactcattccactattgaataaatctaatcggaaaaatccctcatccgagaccaagcttaagaaaatattgagaaggccatcgaaacagtccaaactaac

SEQ ID NO: 87885 - DNA, 248 bp, Zea mays
  Clone ID: MRT4577_180150C.1
cggacgcgtgggcggacgcgtgggtgcttagctcggtggtctaatgccgttcgggtattactatcgacaactgctaaaacagagtggtcctatcctgtataaggagcactctggtgtaaatattggatttagaccgatggctgatgaacctacaagcttcttatatgcctcatatacatatttcttgatacacacaagtgcgtctaaatgtcacataaccttgcacccttactaggtcttaccgcttt

SEQ ID NO: 87886 - DNA, 953 bp, Zea mays
  Clone ID: MRT4577_180151C.1
gaaagaagaggaagcgaacgagaggcaacggtggccggtcgcgggacgggtggggccacgcctggcctgacgcgggaagccggccggaaccatccaactccgccgcgtcgtcgtcgccttcgtctcgcgtgctcaccaagagaacaaaacgcgagcagccaagaattcaacgtccacgatccctacccgtggcgttggtcgtgaattggcgccgtctccccctgccagccggattccctgctttgttctcaggcaacattttgttcactagtgtggtagctttgttgattggagtgcgcaatgggaggctgtgcgggaaaggtacgtcgtgatgacgaagaaaagcttgattttaaaggtggaaatgttcatattataacaagcaatgagggctgggaccagaagattgcagaagcaaacagagatgggaaaactgttgttgcaaatttcagcgcttcctggtgtgggccatgccgtgtcattgctcctgtctatgctgaaatgtcaaagacttatcctcaactcatgttcttgacaatagacgttgatgacctgatggacttcagctcttcatgggacatccgtgcaaccccgacattcttcttcctcaagaacgggcagcagatcgacaagctcgtgggcgcgaacaaacctgagctcgagaagaaagtgctagcagccgctgatgccagtacgtcctagtgacacaagtggaagtgggcaaacgatctgtgatggcttcccggtgtatagtttccatggttcatttgtgtgcttgtcccatgtttgcctggggacgatgacgttttacaattttggcccccatcgcgcgcactcgtctgtttctctcatggaagccgtgtgaacctgtgcgtgtgtgtgacgaatgaacggaactttatatggaccagtgcttaagagtcttcgcaacataattatgaaggtttgtttgc

SEQ ID NO: 87887 - DNA, 350 bp, Zea mays
  Clone ID: MRT4577_180152C.1
cgccccggaattcgcggcgccccacgcgcgcgcggcaagaagctgctaaacgctggaaaggaacagaaggcagggacagcacagctccatcatgaaagtgatatcacggggtggtagaactaacgatggatgttcataggcgatcaaaccgaagatggctgactcattaaagattgagaaatgacacactcgggcgtaatactgaggagctaagggtgatctgtgcaagctaatctgcagtagtaggcaccagccgatgatcatgtgtgttgctctactatgacagtaggcatgttcaaaaagggtggacataattcctggtcctcgcgaaaaggcaatagaacctgagc

SEQ ID NO: 87888 - DNA, 1420 bp, Zea mays
  Clone ID: MRT4577_180153C.1
gttctgggtctcaaaaaactcgagtgtgattttagaagatgaaatggtcctgaggcgaaggcattattcacgtggacccggagtccaacctgcagaaaatccacaagcgaaattggctgccagctttaattctgtgtctggaacttcgtttccttcctaaacagaaagaggcgtaaagaaaacgaaagcaaatttcgcaggtggaaagaagaggaagcgaacgagaggcaacggtggccggtcgcgggacgggtggggccacgcctggcctgacgcgggaagccggccggaaccatccaactccgccgcgtcgtcgtcgccttcgtctcgcgtgctcaccaagagaacaaaacgcgagcagccaagaattcaacgtccacggtccgcccaccctccgtttccgcttcctccctccacgtcgtctcggtcttcctctcctgtaatcccgtgacacgggtggctgcgacggcgaatcagatccctacccgtggcgttggtcgtgaattggcgccgtctccccctgccagccggattccctgctttgttctcaggcaacattttgttcactagtgtggtagctttgttgattggagtgcgcaatgggaggctgtgcgggaaaggtacgtcgtgatgacgaagaaaagcttgattttaaaggtggaaatgttcatattataacaagcaatgagggctgggaccagaagattgcagaagcaaacagagatgggaaaactgttgttgcaaatttcagcgcttcctggtgtgggccatgccgtgtcattgctcctgtctatgctgaaatgtcaaagacttatcctcaactcatgttcttgacaatagacgttgatgacctgatggacttcagctcttcatgggacatccgtgcaaccccgacattcttcttcctcaagaacgggcagcagatcgacaagctcgtgggcgcgaacaaacctgagctcgagaagaaagtgctagcagccgctgatgccagtacgtcctagtgacacaagtggaagtgggcaaacgatctgtgatggcttcccggtgtatagtttccatggttcatttgtgtgcttgtcccatgtttgcctggggacgatgacgttttacaattttggcccccatcgcgcgcactcgtctgtttctctcatggaagccgtgtgaacctgtgcgtgtgtgtgacgaatgaacggaactttatatggaccagtgcttaagagtctttgcaacataattatgaaggtttgtttgcatgttcttggttgtaaaaaaaaaaaaaaaaagcggccaaaagaaaaaaaaaaaaaagtaaaaaaaaggtggcctctcaaaaaaaaaaaaggaagacatctttttttactcaaacaaaatacccttttagccggctagaccattaactgggggggcccttttagggttt

SEQ ID NO: 87889 - DNA, 258 bp, Zea mays
  Clone ID: MRT4577_180154C.1
cgctcgcctctccgccccgcgtccagctcgcccagctcgcccagcgtccgccgcgcctcggccaaggcttcaacggaccacaccaaaatgccatctcaaatggaacacgccatggaaaccatgatgtttacatttcacaaattcgctggggataaaggctacttaacaaaggaggacctgagagtactcatggaaaaggagttccctggatgtttggaaaatcaacaagaccctctgtctgtggacagaataatgaag

SEQ ID NO: 87890 - DNA, 399 bp, Zea mays
  Clone ID: MRT4577_180155C.1
cagagataacaccatccattattatgccgctcagattatcaaacacgaggggtacatcggcaaatatataactggctataaggctccgggtgcagaagaaattgcataccatagcacagtaacctaggcgacatacacaacaaaggggcaattggtgggcagcacattgccaaacccaccagaatctaggcttgaatgcccaacctgttcaacatactccacgagcaacctcagcctgcgggtcaagacagcaagctcatccaacctctgtgctctccaccgattgcagagctcgctctccaccttgccaccattgataataccggagctctttgactccgttaggcattgctgaaacacatttaggacagctttagccattcagggtttagtgctgca

SEQ ID NO: 87891 - DNA, 555 bp, Zea mays
  Clone ID: MRT4577_180156C.1
ccacgcgtccgctaacgttgactgcactaacattgttctatttaatgctatctgagcttgacgataccggaatagataccaagacactgtaaatgggttaggtgattcactagttcgtgatttcctcttgatgagaaccttgaacaagacatcagctgcccatcataatgcaacagatcagggcacagaggactctcatatggatgaggctcattgatccattgtatttcccgtgacactatgcaacaaacacgcaagacattgcgtacgacccactaccgagattcacacctgagcaggacaatgtatgacagagggctcatcatattagtcttgagatcactcaatatactacatactacatcgctgatcatcacaatgcttagctttgaccacctaactactttgaccactgcagcgtgcaatattacgtctagatgactgcggtgcactgtgcacatatgctgcactctgttcgagtttacatcgaaccatagtgcatgtattgagctgcgatctacctaaaggaaatgtaccataactcacttatcatga

SEQ ID NO: 87892 - DNA, 341 bp, Zea mays
  Clone ID: MRT4577_180157C.1
tttacgcgtgcgctatgattgcgagacaaaggggataccatgctcatacattccacggcgtagcagacctgggagagtaggtctgtattactcacgctggtgcatgcactcagaggagtccagcatagggaacggaggaggatggggggctacggcctgtgagggtctgctgatccaccacgaggacatgggcatgctgtacgagatcgccaagctgggcatcaggcatggcatagggggatgcgtgtagaggatcgagaccaggacttccccctaccatcaggctacggacgcgggggcgccgaccactgtgagcgctctgatggtccggatcaacacca

SEQ ID NO: 87893 - DNA, 184 bp, Zea mays
  Clone ID: MRT4577_180158C.1
ggcctaccacacctacaccatcctgttgaacccctacgccatgaccttcttcatgggggacctgggcgttcgccggtacgagcgccggaccgagctcaccttaaccgaccgccccatgtgggtctacggctccatctgggacacctacgactggggcaccgactactgacgggcccgatccgac

SEQ ID NO: 87894 - DNA, 1730 bp, Zea mays
  Clone ID: MRT4577_180159C.1
aggttgagaacttttttttaagaattttattttctcaagaaaaaataaactaattttctaaagaaaaatgaaaatccctcgtaaaaatgagattctcaaactagtcctaaacatggtttccccacaaccaacgacactcaacagtcaacatactacaagaaaacagtgcagcccaggagagaaagtggctaacattcagacccaggggcatgcaacagaacccaaatcagccgtcgctagtagctgtgaaggcgatgaggacacaagacaaggtgaagatgatcgttcctgcggcgaaggccaggatcgccctctgcgagaagccctgcctctcctggccggatagctccacctccttcagcaggcctctgatctcatcgatgtcgctgtccttggcggcgtggaccagcctgctctggacctcctcgagcttggctagccgtctagctcgggccaggtctctggcggaccagatgaaccccgtcatcctccacaggaggacgccaacgtagatcgcggcgacgcagtccacgctgtagtggtgccgctcgcgtacctccctctgcgcgctgtgcaggacgaggagccatatcgcgacagagatccagcccccgtatgcttccgtccacgccattgcagtcaggacagcaacaagcatatgtccactgtacataaggtcattgcagccgccactagctttcttcagaagatggtaccacgaaggcccttctccaggagttggtctcaaaatgtctacaaggaagctcatacgtccccaatcgggcttatattcatctgggtaagcttgaacagcagcatatgccatatcctgtgttatgactctgcgaatagcattcgagtcagaagcatacggaacataatatttctgtgcccaaggatgaggatgttgaggtatttgataacgggctacagcgcaccaaggccttgcggatggaagaatggtagcgatgaaagttatcgtccgaagtacacgaccaattgccatagtgaacatgtatcttgtggcaataccaagaccaggagctttgatgcagtcgaacagaactgagaaacccagcatgataaacaacatcagataatggtggagagtgataacatgagctctcagtagatcgaccacgctctgagggagcttctcgttcaatgatagaagcagccattgaccagtgtcaggaagcggcgcggcagttctgtgccagtgcagtcccatgacggcggagacgaagcgaacagagatggcctcgcagaggaaggcggcgagcatgaaggcgatggatcccaggaagggcagtgcggcgcgcagctccgcggaccagtggcggtagaacggcgcgcgcgcggcggccgcgagcgccagcaccgcccacagcgccggctgcagccggccgtgccacgccggcgagaggtgccgcaagtagtccacgcccacgtacgccgccgccgcgacgcccagcccgccgaggccgacgaaccgccgggccggcgcccgcggcgtctgcagtttgggcctcggcgcccgcggcggcttcgccatggccggaagcctggaaccggatcgccccgaccagcccgaggtcggcgtcgctcactcggtcagttcagttggtcgtcggtagagatgggcagatggcaatgggcccgatcaccgacgcggggaattgctaagggctctgtgaatgcttggaagaaacacaacgccgtctcgcagt

SEQ ID NO: 87895 - DNA, 1710 bp, Zea mays
  Clone ID: MRT4577_18015C.1
gcattaaactggtatacttgagtgtccagcaatagtgtatctgtagagtttacatagacaaacatagttctaggaagacttcaactagagccatatgtacataaaagtctattgaccaaaagtgacctagcttttcttgcatacacacagttctaggaaggcttcaacatcagattaatatatatataaaagtcttatgaccaaaagtgatggagcctcttctatgcgtgcaaataaaagtctattgatcaaaagtgaccagtctttcttgcatagacacacagttctaggaaggcttcaacatcaggttaatatatacataaaagtctcatgaccaaaagtgatggagcctcttctatgcgtgcaaaaaaacaaggtgcaaataagagtctactgatcaaaagtgacctagcttttcttgcatagacaccgttctaggaaggtttaaacatcaggttaatatgtacataaaagtctcaggaccaaaagtgatggaacctcataccttgatgtatctcatgatggactaactgttgtcattctttgaacatgtagaatctggcatacctttgctaacctgggtgtgcttcatctttttgggtggtgatgataattcattcttggtcaggtgatctgtatattcgtcaacgttctgtgactttgagtgcttcaataaaatttgggtcgaagtgaccacattgtaatgttgaggcttgttgagaggatgcgaatgcacctgaggatattaaccttctctcattcaacaattgtctacgtatgcgacgagcttccacaggaggtacagacgatggggcgcaacatgtactgatttgttctggttgatgagtcactggacttgagatgacctgataagattggtgagactgaacttgttgacacggactatgatttggaactccagtttatcctggtctttggagcgccggtggagggaaaccgaagtccgaaagcggctgttgccggagcacgcaggtgagcggaggcgagcaggggaaggtggagctctaggggaggaggagagagcgcgagagggagatatgtgaaggaagcagccaaagagaaaggatccaatagaagaaagagccacaagcagccatagcagcatcctttttcttcgctttcttcaacaatgcgaatctacttcactcctcatcagaactcaaatacaaatttttagtatcatctggttctatttcctcactacagcaataaaatgtgaaaccaatattcatcatgaaacttcagacactgatgattgtgagggaagagagacgacgtaggctgattcaaagtgaacagaaaaccaacaaaagaatggaaattcattcttctaaacaggaggtctagagccaccttcctctagggggcatcctcacgatcctgctctttatcctttcttcttatcctcatcttccgaatcgtcaagtgagcaagactacataataagagaatgcgggaatggatctgagactgatggctgaccggcctgcacccaccgaacccttagcccttgcttcaattagagcaacatacgaatctgcagaagcatctaatagcgattcttagaatcagttcggaatgaatgctatactttttcttccccactcatcttattaagcctttttcttagcccgcttagcttccgtgcccagatagctttttttctcccggccggctcgaggtcccaat

SEQ ID NO: 87896 - DNA, 2474 bp, Zea mays
  Clone ID: MRT4577_180160C.1
attgggtccctcgaggccggccggggctttccttgtgcgtcccgaggggagatatttattttccgttccgctttccccgtgagaaaggagtacttccaacaaactgctccgctttcagcacctgcccagcggaggaagagtgcggattgcggcggcgccggcggacgaaacaatggcgtcggcgagggacgagcatcttgatgggattcgcgcgctgatggcggcccactcgccgccgctccacgggctggtcgtcccctccgaggatgcccaccagagcgagtacgtgtcggagcaggataaacggcgggagttcatctccgggttcacagggagcgctggcttggctcttatcaccatgaaagaggcattgttgtggacggatggccgctacttcttgcaggcaacacagcaactgagcgatcgttggaaacttatgcgcatgggagaagatccaccagttgaagcatggattgctgataatctggctgatgaagctgtcattggaatcaatccatggtgcatctctgttgattctgctcaaagatatgagaactcattttcaaagaggcaccagactttgtttcagctttcttctgatttggtggatgaagtatggaaggatcgcccgctagttgaacctaggcctgtaattgtacacccagtagaatttgcagggcgcagtgtaccagaaaagatgaaggagctaagagaaaagcttgtgcatgaaaaagccactgccattataataactgctcttgatgaggttgcttggttgtacaacattcgaggaagtgatgtggattatagcccagtggttcactcttatgctattgtaacattgcacagtgctttcttttatgttgataagagaaaagtaactgtcgaggttcagaaatacatgtctggaaatggtatcgaaataagagagtatgaaactgttcaatcagatgcaagtttgcttgcatctggcaagctacaaagttctgtacatgtggaaaagtatatggatgaggtggagagttcaaaaatttggattgattctggctcatgttgccttgcactctactcaaaattgagtccacatcaagttttgacgcttcaatcaccaattgcccttccaaaggctgttaagaaccccacagaactggatggattgaggaaggcgcatattcgagatggtgccgctgttgtacagtaccttgcttggctggataatcagatgcaggagaactatggagcttctggttatttcagtgagataaaagggtcgcataaaaatgaacatttagcaaccaaacttactgaggtgtctgtgagtgacaaacttgaaggcttccgtgcaacaaaagagaactttaaaggtttgagttttcctacaatttcatctgtgggaccaaatgcagcagttattcactataaacctgaagcaagcacatgttcggaaatggatgctgataaaatatatctttgtgactctggggcacagtacctggatggtacaacagacattacaagaactgtacattttggtaaaccctcagcacatgagaagtcatgctacacagcagttttgaaaggccacattgcactagacattgctgtgtttcctaatgggacgacaggacatgctcttgatattctttcacgagcaccactctggagagagggtcttgactatcggcatggtacaggccatggaattggatcttatttgaatgtccatgaaggtcctcatctaattagcttcagaccttctgctcgaaatgtaccgctgcaagcatcaatgactgtgacagatgagcctggttattatgaagatggggcctttggtataagattggagaatgtacttatttgcaaagacgccaatgctaagtttaattttggagataaaggttatttggcatttgaacatataacatgggctccataccagaccaagctgatagacaccgggcttctgacccctgttgagatcgactgggtgaacacgtaccactcagactgccggaagatcttggagcctcatctgaacgagcaggagaagcaatggctgatgaaagctactgagcccgtagctgcaagaggctgagccttttcgtcaacgttgcatgccaccgagcgccaggctcatcttctgcgtggcatacatataagattggctgcccccgctggttaaataataatagcggcgaaggaacaggatagcttgttctcaacgctgatcttcgccgctaaagtggagtgtttggcaggatgctattttctttcccattagggtacgttcgggttttacggaacggtaggtttttatacggaacggtgggtacaacaattcctagagccggattgtttctctaattatttatataaggtttgatcaattgaaataattttggatccataattgaaaaaaaaaaaaagaacaaaggcccctagggccgtgatctgatttgtacagttattctggg

SEQ ID NO: 87897 - DNA, 420 bp, Zea mays
  Clone ID: MRT4577_180161C.1
tggaaataggttttgaaaggccacattgcactatactttgctgtgtttcctaatgggacgacagggacctccctcaagctgtactggtgtactgctggaggttggcgggggactgggcgagagggacgccgggacgccgtgttcacggcgtgggaaaacaggctagctcaagttccggcttgcacagggaagacggctaggacatgctcttgatattctttcacgagcaccactctggagagagggtcttgactatcggcatggtacaggccatggaattggatcttatttgaatgtccatgaaggtcctcatctaattagcttcagaccttctgctcgaaatgtaccgctgcaagcatcaatgactgtgacagatgagcctggttattatgaagatggggccctgtgtataagattgga

SEQ ID NO: 87898 - DNA, 408 bp, Zea mays
  Clone ID: MRT4577_180162C.1
agcagtggtaacccagaataactgtacaaatcagattacttgttcttgttcgtttgtccaaatatggatccaaaattattccagctgatcaaaccttatataaataattagagaagcaatccggctctaattgttgtagcccaccgttccgtataaaaacccaccgttccgtaaaacccgaacgtaccctaatggaagaaaaaaatagcatcctgccaaacactccactttagcggcgaaaatcagcgttgagaacaagctatcctgttcctccgcgtactctattattttaccagtgctggcagccaatcttatatgtatgccacgcagaagatgagcctggcgctcggtggcatgcaacgttgacgaaaaggctcagcctcttgcagctacgggctcagtagcttt

SEQ ID NO: 87899 - DNA, 1878 bp, Zea mays
  Clone ID: MRT4577_180163C.1
atgtcgggtgttgtcctcgcacctgagacaacgacgggtgtcgcttccccgcaacgcgccaaccccaagcggaccgatgacaccagcaccctcgcaaaggacttgctgggcattagcctcgtacctgagataacggtgcagtccgtccccgacgcgacttcgccaccgtccatcgaccaagaggtaccgtccgttttccaccctgtcccttttagattcagcctcgatccaccaagcgaccccgcttcgggggatcacggcgaggacaaccacctcggtatgccgcaagatgacaacgcccctgtgcctgcgtctcgcgttgacatcccgcgggagatagctgtggtcccagttcctgcggggggtcaggacacacagctcgagcaattccgcgagatgcaggccaagctcgacgaagaagcggggcggcttgcgcagctccgacaaaacatcgagcaggagtgggcaggccaggcacttgccggaggagcgcctcatcgggcccaagacgtccagcgccgaatcgttgacgatgccagggcaaggctgcccccggccttcagcggggtcggccagaatctagctgcagcagcaatgctactccgagcgatgccggagccatccaccaccgaggggctgcgtatccagggcgaactcaagggtctcctggaaaacgcagcggtccgacgggccgagagctctgcctcccgaaggcaagggtgcccctcggagcatcgctcaacatcctcccaacttatgcgggaggcctcggtccgcacctggcacgcgcgggatgggacgcctgcagccccggatcgcctcggcgacgagcaccaccacagcgaccgtcgagcccgcctcaacgagaaggcatggctggagcatctgcctcctgcgcagatctctgactgggacgacctggtcaaagccttcgtgggaaacttccaaggaggcgatcgaagccatctttcggaaggacaagcagcctcaaggaatacagaaggaagacgcccccgaggcgtccggccagcgtggctcgaaaagaaggccaagaagaaggcgcaagcaaagcgcgacgccattgacgcggatctcgtcgctgctgctgagcgcaggaatcctcggaagcctcccggagaagtcaacacgtttgacaagatgctcaaggagtcgtgcccctatcacaggggtcccgtcaagcacacccttgaggagtgtgacatgctccggcgttacttcgtcaaggcgggaccctcggcagaaggtggcaagtaccaaggcaacaacaagaaggggggtgacaaggacgaggagttcccagaggtttgcgactgcttcatgatctacggcgggcaggtagcgacgccggtctacctagactggtctgacaagcccatcaccttcgaccaaggcgaccaccccgactatgtgccgagcccaggaaggtacccgctcgtcgtcgaccccgtcatcggcaacgctaggctcaccaaggtcctcatggacggaggcagcagcctcaacatcatctacgccgagaccctagggctcttggggatagatctatccacaatccaggccggtgcagcaccctttcacgggatcgtccccggaacctatcatgcggtgctgggaagaccatgctacgccaagttcatggccatccccaactacacatacctcaagctcaagatgtcaggccccaagggaatcatcaccgtcggatccatgtaccgccacgcttatgagtgcgacatggaatgcgtggagtacgctgaggccatcgccgagtccgaggccctcatcgccgacctggaatgcctctctaaggaggcgcctgacgcgaagcaccacgccgacaacttcgaaccagtttag

SEQ ID NO: 87900 - DNA, 185 bp, Zea mays
  Clone ID: MRT4577_180164C.1
aaaaaaaggaaaacaatgatacctcaagacggacgaaagtatatatagtgggagcgagaatacgcgaactcccgtgacgtgacctcccaatatcaggagatggaaaagagacgcctcaaatcccccgactgaaagagaatgcgaaacgaacggaataatcctcctgaaagcttccgaatctcctc

SEQ ID NO: 87901 - DNA, 2583 bp, Zea mays
  Clone ID: MRT4577_180165C.1
atggcggccatcagcctgcccgccggcggcggaatcgacgacgtcttccgcacgtggcggaagagcaacatccgggtctatcccgtcaccttccccgctgacggaggaggaggcggggcaggcatggccaagcaggaggcggcacctcgtcggctgtcgaggtatcatatgcggtcaccctgggaccgactgacggcggtctcgacctacggtcctctgggttccgaggaagatgacgagcccgactctggttgggatttctccaggctcgataaccccagtgccatgcgggacttcatgaccgcatgtgactactgcctctctgattgctccgatagcagccacagcttcggcgatgaggactgtggcccaagtcgcgaatgctttcacgtcgatctagggggtctcgacgaaggcaaccatcttggtacgccggaggacggtgatccccctaggcctgcgcctcgtgttgacatccttcgggagctagatgtggtcccagtccctgcggggggtcaggacacacagctcgagcaaatccgcgtgatgcaggccaggctcgacgaggaagcaggacaacttatgcagcttcggcaaaatatcgggcaggagtgggcaggccgagcaccaaccggagaagcgcgtcacctggcccaggacatccagcaccgcatcgccgacgatgccagggcaaggctgcccccggcttccagtggggtcggccagaacctggccgcagcggcaatactactccgagcgatgccggaaccatccaccaccgaggggcggcgtatccagggagagctcaagaatctcctggaagatgtcgcggtccgacgggccgagagctctgcctcccgaaggcaggggtaccccccggagcatcgcgccgcgacttctcgattcatgcgggaagcctcggtccacaccgggcgcacacggaacacaacgcctgcggccccgggacgcctcggcaacgagcaccgccgtgaccgtcgagcccacctcgacgagaaggtgcgccgaggctaccaccccaggcgtgggggacgctacgacagtggggaggatcggagcccctcgcccgaaccacccggtccgcgagctttcaaccgggccatacgacgggcgccgttcccgacccggttccgaaccccgactaacatcaccaagtactcgggggaatcaaagccggagctgtggctcgcggactaccggctggcctgccagctgggtgggacggacgatgacaacctcatcatccgcaaccttcccctgttcctctacgacgccgcccgagcctggctggagcatttgcctcctgcacagatctccaactgggacgacctggtcaaagccttcgccgacaacttccagggcacatacgtgagccctgggaactcctgggatctccgaagctgccgccagcagtcggaagagtccctgcgggactacatccggcgattttcgaagcagcgcaccgagctgcccaacatcactgactcggatgtcatcagcgctttcctcgctagcaccacttgccgcgacctagtgagcaagctgggtcgcaagactcccaccagggcgagcgagctgatggacatcgccaccaagttcgcctctgccgccgagcacaggaaccctcggaagcctcccggaggcgccaacctgttcgacaagatgctcaaggagtcgtgcccctatcatcagggtcccgtcaagcacacccttgaggaatgcgtcatgctttggcgctacttccacagtgccgggccaccggcggaaggtggccgagcccacaacaacgacaacaaggagggtcacaaggcagaggagttccccgaggtccacgactgcttcatgatctacggtgggcatgtggcgaacgccttggctcggcaccgcaagcaagagcgtcgggaggtctgctcggtaaaggtggcggcgccagtctacctagactggtccgacaagcccatcaccttcgaccagggcgaccaccccgaccgcgtgtcgagcccagggaggtacccgctcattgtcgatcccgtcatcggcaacatcaggcttaccaagctcctcatggacggaggcagcagcctcaacatcatctacgccgagaccctcaggctcctgcagatcgatctgtcctcgatccaggccggcgcggcgccttttcacgggatcatccccgggaaacgcgaaaccctcacgttcgaggtggtcgggttccgaggaacctaccacgcaatactggggagaccatgctacaccaagttcatggtcgtccccaactacacctacctcaagctcaagatgtcgggccccaacggggtcatcaccgtcggctccacgtaccgacacgcgtacgaatgcgacgtggagtgcgtggagtacgccaaggccctcgccgaatccgatgctctcatcaccgacctggagagcctctccaaggaggtgccagatgcgaagcgccacgccggcaacttcgagccagctgagacggttaagtccgtccctctcgacccctgcaacgacgcctccaagcagatccggatcggctccaagctcgaccccaaatag

SEQ ID NO: 87902 - DNA, 437 bp, Zea mays
  Clone ID: MRT4577_180166C.1
cgggctctctaaaccctagtcccctgctccattctcagccgtcgccaatcccttcccgtggtgcggagccggtgagtgagaagaagagatggccggcaagggcgatggcccggctctcggcatcgctctcggcacgacgtactcttgcgtcggcgtgtggcagcacgaccgcgtccagatcattgtcaacgaccatgggtatccgtaccacgccctcgtggggggcgttcaccgactccgagcgcctcatccgagatgcggccaacaaccaggtcgccatgaaccccatcaccaccgcctttggtgccacgcgtgctcatctgcaggaggttcagtgctgcgtctgtccagagtgatatctcgctgccgcccttcaaggtcatttctggtcctggcgagaagccattgtttggtgtccagcacaggggtgaggagaa

SEQ ID NO: 87903 - DNA, 1536 bp, Zea mays
  Clone ID: MRT4577_180167C.1
atggcggccgatagcccgcccgccggcggcagaatcgacgacgtcttccccgcgtggtggaagaacaacattcgagctcaccccgtcctctcccccgccgacggaggaggaggcggggcaaccaaggccaagcaggaggcagcgtctcgtcggctgtcgagcgagtcgacggcgccagcgccccaacggggggcgcgtcgggcatcgacctcgcgtttgagacgaagacgagcgccgtctccccgcaacacgccgattccgagcaaacggacgacgccagcacgctcgcgaaaggcttgctggatgtcaccctcgtacttgagacgacggagcagtcagtccccgacgcgacttcatcaccgcccgtcgaccaagagcctcgacccgccaagcggcttcgctttggcggacgctctcgtagaggcgagtccaaaccctctggggtttcgtgtgcggtcaccctgggaccgactgacggacgtctcgacctacgggccctcgcggtccgaggaagatgacgagcccgactcctgttgggatttctctggagttggcgaccccagtgccatgcgggacttcatgaccgcatgcgattactgcctttccgactgttccgacggaagccgcagcctcggcgacgaggactgcggcccaagccgcgaatgtttccacgtcgatctagggggtccctccgaaggcaaccatctcgagccatcaaccaccgaggggcggcgaatccagggaaagctcaagaatctcctggaaggcgccgcggtccgacgggccgagagctccgcctttcgaaggcaggggtacccctcggaacatcgcgccgcgacttcccgattcatgcgggaagcctcggtccacaccgggcgcacgcgcacgcgcaacgagcaccatcaccgcgactgtcgggcccacctcgacgagagggtgcaccgaggctaccaccccaggcgtggaggacgctacgacagcggggaggatcggagtccctcgcccgaaccacccggtccgcaggccttcagccgggccatacgacgggcgccgttcccgacccggttccgacccccggctactatcacaaagtactcgggggagacgagaccggagctgtggctcgcggactaccggctggcctgccaactgggtggaacggacgatgacaacctcatcatctgcaacctccccttgttcctctccgacaccgctcgcgcctggttggagcacctgcctccggggcagatctccaactgggacgacctggtccaagccttcgtcggcaatttccagggcacgtacgtgcgccctgggaattcctgggaccttcgaagctgccgacagcagccgggagagtctctccgggactacatccggcgattctcgaagcagcgcaccgagttgcccaacatcaccgattcagatgtcatcggcgcgttcctcgccggcaccacctgccgcgacctggtgagcaagctgggtcaccgattttttttgcattttgaccctttctcagaaaaaaatcacgtttag

SEQ ID NO: 87904 - DNA, 120 bp, Zea mays
  Clone ID: MRT4577_180168C.1
caatggaatgttgcggaccaagagggtgacaggggaactacgtgttcctttcgaacaggtcgggcctgttcgggatgtttacctgccaagagattatcacactggggggcccaaaggatt

SEQ ID NO: 87905 - DNA, 2715 bp, Zea mays
  Clone ID: MRT4577_180169C.1
atgggcagtctccagcaacctctccggcccgggacggtgcttcgtttcgggactcttgagttcatgtccttcgacggcagctacgacatgatacttcttccaccgccgcgcgactacgacaatggcgaccgacaacccgcccgccggcggcggaatcgacgacgtcttccccgcgtggtggaagagcaacattcgggctcgctccgttctctcccccgccaacggaggaggaggcggggccgtcaaggccaggcgggaggccgcgcttcgtcggccgtcgagcgaatcgacgccccgacggaaggcacgccggacgtcgacctcgcgttcaagacggaggcaagcgccgtccccccgcggcacgctgaccccgagcaagaagacgacgccggcgcgctcgcggaaagcctgcaggacgtcgccctcgaaccagagatgacggtgcaaccagtccccgaagtgactacgtcgctcctcgtcgaccaaaaggtaccgactaactcccatcttgcgtcatttcgactcggcctcaacccgccaaacgacctcgttttggcgggcgctctcattgaggcgagtgcaaccccactgaggttccgtatgcggtcgccttgggaccgactgacggacgtctcgacctacgggccctctgggtccgaggaagatgacgatcccagcatcggttgggatttctccggacttggtaaccccagtgccgtgcgggacttcatgaccgcatgtgactactgcctatccgactgttccgatggaagccgcagccttggcgacgagagctgcggcccaagccgcgaatgtttccacatcgagctaggggatccctccgaaggcaaccatcttggcatgccggaggacgcctcggtctacaccgggcgcacgcgcaacaccgcgcctgcggccccgggccacctcggcaacgagcaccatcgacgcgaccgtcgggctcacctcgacgaaacggtgcgccgaggctaccaccccaggcgtgggacgcgctacgacagcggggaggatcagagtccctcgcccgaaccacccggtccgcaggccttcagtcgggccatccgacgggcgccattcccgacccggttccgacccccgactactatcacgaagtactcgggggaaacgagaccggaactgtggctcgcggactaccgccttgcctgccaactgggtggaacggacgacgacaacctcatcatccgtaacctccccctgttcctctccgacactgctcgcgcctggttggagcacctgcctccggggcagatctccaattgggacgacttggtccaagccttcgctggcaatttccagggcacatacgtgcgccccgggaattcctgggaccttcgaagctgccggcaacagccgggggagtcgctccgggactacatccggcgattctcgaagcagcgcaccgagctgcccaacatcaccgactcggatgtcatcggcgcgttcctcgccggcaccacttgctgcgacctggtgagcaagctgggtcgcaaaacccccaccggggcgagcgagctgatggacatcgccaccaagttcgcctctggccaggaggcggtcgaggctatcttccgaaaggacaagcagccccagggccgcccatcggaagaagctcccgaggcgtctgctccgcgcggcgccaagaagaaaggcaagaagaagtcgcaatcgaaacgcgacgccgctgacgcggaccttgtcgccgccgccgagtataagaaccctcggaagccccctggaggtgcaaacctcttcgacaagatgctcaaggagccgtgcccctaccatcagggcccggccgggccacccgccgagggtggcagggcccgcgacgacgacaagaacgaagatcacccagcaggagagttccccgaggtccgcgactgcttcatgatctatggaggacatgcggcgaatacctcggctcggcaccgcaagcaagagcgccgggaggtctgctcggtgaaggtggcggcgccagtctacctagactggtccgacaagcccatcactttcgaccaggccgaccaccccgaccatgtgccgagcccggggaaatacccgctcgtcgtcgaccccgttgtcggcgatgtcaggctcaccaaggtcctgatggatgggggcagctgcctcaacatcatttacgtcgagaccctcaagctcctgcgcgtcgatctgtcctccgtccgagcaggcgctgcgcccttccacgggatcatccctgggaagcgcgtccagcccctcgggcgactcgacctccccgtctgcttcgggacaccctccaacttccgaagggagaccctgacgttcgaagtggtcgggttccgaggaacctaccacgccgtgctagggaggccatgctacgcgaagttcatggccgtccccaactacacctacctgaagctcaagatgccgggccccaacggggtcatcaccgtcggccccacgtacaaacacgcgttcgaatgcgacgtggagtgcgtggagtacgccgaggccctcgccgagtccgaggccctcatcgccgacctggagaacctctccaaggaggtgccagacgtgaagcgccatgccggcaacttcgagccagcggagacggtcaaggccgtccccctcgaccccagtggcgacaccaccaagcagatccggatcggatccgggctcgaccccaaatag

SEQ ID NO: 87906 - DNA, 324 bp, Zea mays
  unsure (1)..(324): unsure at all n locations
  Clone ID: MRT4577_18016C.1
cccaagccagtaccggggctgcnattctgtagaacgccagcgctctcataccaaacgggcgaaatggctcgcacgcaatctgccgtagcggtcgccgtggtggccgcggtgctgctgctggcaacgggggacactacctaggaggccgccatcagctgctggcaagcgagctccgccatcgcgcactgagtctgaaccacccgcggtacggggttcgcccgagcatttttctgctgaagcggcgttaggaaccaaaagggcgacgtcagcaccgccgtccacaggggccccgactggaactgcctcaagaacgccatcaggggc

SEQ ID NO: 87907 - DNA, 5310 bp, Zea mays
  Clone ID: MRT4577_180170C.1
atggcacccaagagagctaacccgaaggctgacgaggctgcgaaggcagcactgctcgccgcaagaaagggcaaggccctcgccctcacccaatccacccaccaagagcccactgaagacaatgttccccgcacctgtgaagacgacaccttccgcacctgcgggcccgaaggacaatcgcagccgcccccaggcttcgccccactggaaggcgcggaactcaccgaggacggtgaagtcctcggcgtctcagcggaagaacagctacagctgcgcgccctgcgcctcaagaaccgcaatctccagaggcagaaagagatactggaggccaagcgccagcgtgtgtccgcactagccaaagtgcggcaaatgatacgcgacgaggagcagaaggcccaagacctcgagcgcgagatcacgctgatgcagcgcgaaggccaccttggcctgcagcaagagccacccctccaccagcgcgcacaaccggaagacacgcgcgaaggccaccttggcctgcagcatgggccacccatgcaacaccgagcacagccggagaacccgcgtttcccccagcgtgactacaccttccagcacggcgcgccattccaaggggtcaactacctcgacgagcgaagtcccctggcgccacacctgcaagtgacgccttggccagctaacttccgagcagggacctatcccaagtacaacggcagcaccgacccggcgcaatacataatgagttatcaggtcgccgttgcatccgccggaggggacgacgccacaatggcgaagtctttcatcatcgccctagagggcccagcactcacctggttcaccagattgcctccgctgtccattgattcatggagaagtctcagggacaagttcctgctcaacttccaagggtaccgcccaaacaccgacgccttggccgagctctcgctttgcaagcagctggaaaaggagactctgcgggagtattaccgcaaattcttaacactcaagtcacagctgccctccgtcgatgatcaaatcgctatccactacgccatcagtggcctttgtgccggcgtcctctacagccactgtatcagagatccacccaagaacctccaggagctatatcagctctttgaaaaatatgccaaatccgaagagctccaccagcgcaaggttgagtcacagcggaaacccaaagatgccccgcagtccagccgcacgtggacgaggactccgcagccagactccggtcgagacggccgcagtcagcagcaagtgcacaacatcgccaaccagcagcctgctgctgacccccctcgtcgccaggaatatcccccccagggccgcggaaatggaactcgtggcaggggccgagggcgcgcacagccgccgcgccgattctactgccttttccacggcgaagactgcgcccaccaaaccaaagactgccccgaaacgaaggccaccagagacagaatggcgcgggcacagccagccgacaatcccagaattatcgcgcatagttaccagccaccccctccaccatacatccacgctcctgccccgcatccaccgcaccacgcttaccaacaccatcaggaagtacaaatcgtacctcctccacccccaccaccacaccagcaacatcaaaacatcccccatgccccaaagcaggaagacttcgccgatcaaccatatcgcggagtcattcacatgataacgggggggtccagcactgacttcgacaccaagaggcagaagcgggaccactaccgcatcatcaaccatgtcgccgtcactggcccagttgtgcagacaaagtggtcccacataccgctaaccttcgacgcacgagacgtcgacctccgcagcgccccccacatcgacgctatggtcatcaattgcagcgtggcaggctgggacttacacaaagtcctagtcgacaacggcagtcaggcggacatcatcttcctccacgccttcgaccgcatgggtataagccacagcctgctcaagccttcggacaacccgttgtatggcttcggcggcaagggcacttttcccgttggcaaaatagagttgcccctctccttcggtgtagcacccaatgcccgaagtgagcaagtaaccttcgatatcgtcgacatggtatatccatacaacgccatcatgggtcggggctccatcaataagttcgaagctgccatccacggactgtacctatgtatgaagataccaggtccgctaggcgctattacggtctacggcaaccagcagacggcgcgcaacatagagcgggacttcgtgcccggtcagaggaacgtgcactgtctcacgacccagtgcgaggtcccagcgcccgccagcccaaccgataaacagcacgacaaggcacagctacagagccaagacgggaccaagactgtccccctcgatcaggccacgcccaagcagacagtcactatcagcgaagaccttacctcacatgaagaagagaagcttctctgctgcctgtccaagaacaaagatgtcttcgcctggtccgccctcgacctggtcggagtcagccgatccataattgagcacagcttaggaattgacccttcggtgcgaccaaaaaagcaaaggcttcgcaaaatgttcgacgaaaagacagaggccgccaaggcggaggtgcaccgcctcctagaggctaaattcatcgagccagtggcttaccccacatggctctccaatgttgtaatgatatacatgaaggaggaagacaaggctagcaccagctttataacacccttcggcacatattgcttcatcagaatgccggagggactcaagaatgccgggtccaccttctccagactcaccaaaacagtactcgaagggcaggttggcagaaatatatttacatatgtggacgacatcgtcgtcgccagcaagaataaggaggaccatctcgccgacctcgccgagacattcgcgaacatgcgagatgcacgactccgcctaaacccggaaaagtgcgtcttcggtgttcgccagggcaagatattgggctacctggtgtcacaccgcggcatcgaggccaacccaaccaagatccaggccatcgtagacatgtcgcctccgcagtccgccagggacgtccagcgtctgacaggcagattggccgctctcaacagattcatttccaggtccgccgagcgaagtctccccttcctcaaaacactccgcagagcgaaagacttcgcctggggaccggagcaggcagcggccttcgcctcactaaaacagtacctgtcggagctggccatcctcacaagccccgactcctcgctccccctattgctctatgtcgcggcttcgccgcacgcggtcagcgcggcactagtgcaggagcagacagttgagggcgcggtcagacagtgccctgtttactatgtctccgaggtactgtcaccgtccaagtgcaacatgacagagccggagaagatcgcctacgcagtcgttatgtcttcgcgcaaactgcgccattactttgaagcattcaaggtccgagtcacctcagacaggggactcggcgaactattcagaaacccggaggcatcggtgaggattgccatgtgggcagccgaactatccggctatcacatcagcttcgagcccaggacagccatcaagtcacaagtcctggcagacttcgtcgtcgactggactgggccaataacacagccagacccatccacagagaaggtttggactatccattgcgacggcgcatggtgccatgcgggggcaggcgccgccgcagtcgtcacctcaccagccggagtcaagcacagatatgcagcacgcctcagcttcgctctggaatccgacaaatgcacaaacaatatagcagaatatgaagcagttatcctcggcctccgcaagctaagggcccttggagtcaccacatgtatcatcaaaacagactccaagatagttgtcggccaggtcgagaaggactacgcagcaaaagaccccgcgctcatgcaatacctagcggccatccgaagtctcgagagacagttcaagggattcaccttgcagcatgtggatagggccaagaacgaggaggccgacgcattggccaaggccgccgccagggtcgagtccttgccctccgacgtgttctttcacatcatcggcacgccagccgtccggagccccgaagggctccaaataactaatgatagcgagggccaccgcatagtcaacctaatcatgaccgaggactggcgggcaccaataaccctgttcctacaggggtactatcatccaaccgacatcagcgaggccaagcgcctcagacatcgaagtcgggacttcgcactgattgagggccaactctacaagaaaggggtcagtcagccaatgcttaagtgcgtcaccgaaaccgaaggcatgcagatcctacgtgaagtccacagtggcacgtgcggctcgcacgcagggccaagggccctagctgccaaggggaaccttaagtttgccttcgtagccgtcgaatacttcaccaaatggatcgaggcgagggctgtttctacaataacatcaaagactgcccaaaaattcttctggcaaaacattgtttgccgcttcggagtaccgtccgagctaacagttgacaacgacaagcagtttgacagccaagatttcaaggatttttgtttctccatcggcaccaagcttgcattcgcttcagtctatcatccacagtccaacggggtcgtggagcgcgccattgggaaaatcttcacagctgtcaagaaaatgctcctcgatgaaaaaaaaggcagatggaccgatttgttacctgaggcagtctgggcgctaaacacaactgagtgcagggcgactgggttcactcctttccgccttctatacggatcggaggccatgaccccgcaagaaataaagcatgggtccccgcgaacagttctgtcagccgtccccgacgtggacgagccaacttcaaaggatctcattgacggagactgggtcttcgccctacaggccctaaacaaataccaagcccagaccaaagcatggcgcgaccatgcagtcatcccgagggagttcagcgaaggggacctcgtactcgtccgaacagctcggacggagtccaggggcaagctggagcccaagtgggagggcccctttatagtcaagacaaaagcttcccccagcgcttacaggctcacaacgccaaacggcgaggacctggagcactcctggaacatcgacaacctccgcaaattttttgtttga

SEQ ID NO: 87908 - DNA, 4983 bp, Zea mays
  Clone ID: MRT4577_180171C.1
atgatggtcgaggtcttgaagatgtttgaaatataccttcatcagattacccccgaagctcttattagagtgggagtttttatttgggccatgagaagccagggagtggagccagatgcaagatgcttctgcaatattcatgagttttcttatcagacaaagtcaactggaaaggaacaatatcacaacaattttggttgctacaacttcgtgcctcagtctaaggcgaattaccctgtgcccacgtttcggaagaagtggccatgttcttggatgaaggaatggttctatgtgaagaatgacctaaatcagagggaagatgtgaaaggtgttattcaacatcctatattgtcacgcttcggcattagaaggccatccatcgcaattggaaacgaagtgcaagtgtgccaagctgctttcaacatagtgtgcacctatattggcacgggagacttagttcaggagcatattgcttacaaaggtggcctggtttatctgaagtatacttttcggttcagaaaccagtttgatgagccaaattatgattggttggatgctatagaggcaataagtgatgaggtacttggagcgtattcgaaggcaaaagatgaagctatgatggttgccttaggcgctcgcggcaagaagaggttgaatagagtgtttgatgtgattgggtttgtttacccagactattgctatcccgttcagaaacaagggagaagaaggaaagttgttgcttcggtgtctgctagcacgccgaaaacaaagaaaattaaagttttgacacgcaggcctaggcgcattgagacggtcgatgtgtcaaagttcattgaaagggtagaaacaaccacctaccattgtagacccggccaaagagccagagccagaaaaggtggcagaaaagtactagagcaacctaagatgaaggtgacagcaccgccgaagctgccagctaccacaggaactccaaggaagaggaggatggctagtgccttggaagatgttctagaatctgtgaaaacgccgcctccctcttcttctgtcgaagcttctgacagaaaaactaaagatgttacagagatgatcgttgccagtacttctgttcatgttgaggcaggaccttcggaaactgcatcagaagatcttgtgaaagaaagccttctagagaaaccctcaacatctgctcccgaagcaacctctagtagttatttgaattttattgtgcgacatgcttcgggaaaacaactatcagcagagcaaattgtcgaaaccaagcattatgctaaagagctgaagtacccccaaggatccttggtatatggaggagataacgatgatgatttcctctactgtctacctgatagtaaggagatcaatgtttgccgtgaaatgatggatcacatggggtacccgaagctcgaacttgccctatctgtgatgaccaaagatcagcttgcagatagtcttgcctacaacagtctgaaggaggaggtctccgcctcgcccgaccccagggctcggcccccgcctcggcctcggaaggtggtctccgcctcgcccgaccccagggcccagcctcaacctcgacctcggaaggtggtctccgcctcgcctgaccccacgacccggcctcaacctcgacctcggaaggtggtctccgtctcgcccgaccccagggctcggcctcaacctcgacctcggaaggtggtctccgcctcgcccgaccccagggctcggtctcaacctcgacctcgggaggaatcgcgtcctcgcccgaccccggcctcggcctcaggaggagtctccgcctcgcccgaccttgggctcggaccgatcacgccacaggggatgggtagtctccagcaacctcttcagcccgggacgctgcttcgcttcgggagcctcgagttcatgtccctcgacggtagctacgacatggtactcctccccccgcagcgcgacagcgacaacaacggccgtcagctcgcccggcggcgggaactcgacgacgtcttccccccgtggcggaagagcagcatccgggacacacagctcgagcaaatccgcgagatgcaggccaagctcgacgaggaagcaggacaacttgtgcagctccggcaaaatatcgagcaggagtgggcaggccgagcactagccggggaagcgcgtcatcaggcccaggacgtccagcaccgtatcactgacgatgccagggtaaggctgcccccggcctccagcggggtcggccagaacctggctgcagcggtgatactactccgagcgatgccggagccatccaccaccgaggggcggcgtatccagggagaactcaagaatctcctggaggatgccgcggtccagcgggccgagagctctgcctcccgaaggcaagggagccccccggagcatcgcgcagcgacttcccaattcatgcgggaggccttggtccacaccgggcgcacgcgggacgcgacgcctgcagccccgggtcgcctcggcaacgagcaccaccgtcgtgaccgtcgagcccgcctcgacgagaaggtgcaccgaggctaccaccccaggcgtgggggacgctacgatagtggggaggatcggagcccctcgcccgaaccaccaggtccgcaagccttcagccgggccatacgacgggcgccgttcccgacccggttccgatccccgactaccatcaccaagtactcgggggaaacaaggccggaactgtggcttgcggactaccggctggcctgccagctaggtggaacggacaatgacaacctcatcatctgcaacctccccctgttcctctccgacgccgcccgagcctggcaggagcatctgcctcctgcgcagatctccaactgggatgatctggtcaaagccttcgctggaaacttccagggcacgaggcggtcgaggccatcttccgaaaggacaagcagcctcagggacgccagcaggaagacgtccctgaggcgtccgcccagcgtggcacgaagaagaaggcaaaaaaggtcacaagcgaaacgcgacgccgccgacgcagatcttatcgctgccgccgagcacaggaaccttcggaagcctccaggaggggccaacctattcgacaagatgctcaaggagtcatgcccctaccaccagggtcccgtcaagcacacccttgaggaatgcgtcatgcttcggtgctacttccataaggctgggcccccggtggaaggtggcaaaggccaggacaacgacaagaaggagggcgacaaggcagaggagttccccaaggtccacggctgtttcatgatctacggtgggcgagtggcgaacgcctcggctcggcaccgcaagcaggagcgccaggaggtctgctcggtaaaggtggcggcgccagtctacctagactggtcgacaagccccatcaccttcgaccaaggcgaccacccccgactgtgtgccaagccttggaaagtacccgctcgtcgtcgaccccgtcatcggcaacgtcagggctcaccaaggtcctcatggacgggggcagcagcctcaacatcatctacgccgagaccctcgggctcttggaaatcgatttgtccacgatccgggccggcgcggcaccctttcaagggatcatccccgggaagcacgtcctgctccttggacaactcgatctgcccatctgcttcggaactccctccaacttccgcagagaaaccctcacgtttgagaccgtgctacgccaagttcatggtcgtccccaactacacctacctcaggctcaagatgtcgggccccaacggggtcatcaccgtcggatccacgtaccgacacgtgtacgaatgcgacgtggagtgcgtggagtacgctgaggccctcgccgaatccgaggccctcatcgccgacctggcgtgcctctccaaggaggtgcctgatgcgaagcgccacactggcaactttgagccaacaagaggcgtgctcgtcgactttctccgcgcgaacgccgaagtgtttgtgtggagtccctcagacatgcccggcataccgagggatgtcgccgagcactcactggatatccgagccggtgcccgacccgtgaagcagcctctgcgtcgtttcgacgaagaaaagcgcagagccataggcgaggagatccacaagctgatggctgcatggttcatcaaagaggtattccatcctgaatggttagccaaccctgtgcttgtgaaaaagaaaggtgggaagtggaggatgtgtgtagactacactggtctaaaaaaagcatgtccaaaggttccctaccctctgcctcgcatcgatcaaatcgtggattccactgctgggtgcgaaaccctgtcattcctcgacgcctactcagggtatcaccaaatcaagatgaaagagtccgaccagctcgcgacttctttcatcacaccttttagcatgtactgctatactactatgccatttggtttgaggaatgcaggtgcaacataccaaatgtgcatgaaccacgtgttcagagagcacatcggccgaacggtcgaggcttacgtcgatgacatcgtagtcaagacgaggaaagcctccgacctcctctctgaccttgaaacgacattcaagtgtctgagagtgaagggtgtgaaactcaatcccgagaagtgtgtcttcggagtcccccgaggcatgctcctggggttcatcgtctccgagcggggcatcgaggccaacccggagaaaatcgcgatcgtcaccaacatgggacctatcaaagacttgaaaggagtacaaagggtcatgggatgccttgcggctctgagccgcttcatctcgcgcctcggcgaaagaggcctacccttgtatcgcctcttaaggaagaccaagcgcttctcttggacccccgaggccgaggaagccctcggaaacttaaaggcactccttacaagtgcgcccatcttggtgcccccactgcaggagaagccctcttga

SEQ ID NO: 87909 - DNA, 5016 bp, Zea mays
  Clone ID: MRT4577_180172C.1
atggcacccaagagagctaacccgaaggctgacgaggctgcgaaggcagcactgctggccgcaagaaagggcaaggccctcgccctcacccaatccacccaccaagagcccactgaagacaatgttccccacaccggcgaagacgacaccttccgcacctgcggagccgaaggacaatcgcagccgcccccaggcttcgccccactgggaggcgcggacctcaccgaggacggtgaggtcctcggtgtctcaacagaagaacagctacagctgcgcgccctgcgcctcaagaaccgcaatctccagaggcagaaagagatactggaggccaagcgccagcgtgtgtccgcactagccaaggtgcggcaaatgatacgcgacgaggagcaaaaggcccaagacctcgagcgcgagatcacgctgatgcagcgcgaaggccaccttggcctgcagcaagagccacccctccagcagcgcgcgcaaccggaagacacgcgcgaaggccaccttggcctgcagcatggcccacccctgcatcaccgggcgcggccggagagcccgcgtttcccccagcgcgactacaccttccagcacggcgcgccattccaaggagtcaactacctcgacgagcgaagtcccctggcgccacacctgcaggtgacgccttggccagctaacttccgagcggggacctatcccaagtacaacggcagcaccgacccggcgcaatacataatgagttatcaggtcgccgttgcatccgccggaggggacgacgccacaatggcgaagtctttcatcatcgccctagagggcccagcactcagctggttcaccagattgcctccgctgtccattgattcgtggagaagtctcagggacaagttcctgctcaacttccaagggtaccgcccagacaccgacgccttggccgagctctcgctttgcaaacagctggaaaaggagactctgcgggagtattaccgcaaattcttaacactcaagtcgcaactgccctctgtcgatgatcagatcgctatccactacgccatcagtggccttcgggccggcgtcctctacagccactgtatcagagatccacccaagagcttgcaggagctatataagctcttcgaaaaatacgccaaatccgaagagctccaccagcgcaaggttgagtcacagcggaaacccaaagatgccccgcagtccagccgcacgtggacgaggactccgcaaccagactccggtcgagatggccgcagtcagcagcaagtgcacaacatcgccaaccaacagcctgctgctgacccccctcgtcgccaggaatatcccccccagggccgcggaaatggaactcgcggcaggggccgagggcgcgcgcagccaccgtgccggttctactgccttttccacggcgaagactgcgcccaccaaaccaaagactgccccaaaacgaaggcaaccagagacagaatggcgcgggcgcagccagccgacaatcccagaattgtcgcgcataattaccagccaccacctccaccatatatccacgctcccgctccgcacccaccgcaccacgcttaccaacaccatcaggaagtacaaatcgtacctcctccacccccaccaccacaccagcaacatcaaaacatcccccatgccccaaagcaggaagacttcgacgaccaaccatatcgcggagtcattcacatgataacaggggggtccagcactgacttcgacaccaagcggcagaagcgggaccactaccgcagcatcaaccatgtcgccgtcactggcccagtcgtgcagacgaagtggtcccacataccgttaaccttcgacgcacgagacgtcgacctgcacagcgccccccacatcgacgctatggtcatcaattgcagcgtggcaggctgggacttacacaaagtcctagtagacaacggcagtcaggcggacatcatcttcctccacgccttcgatcgcatgggtataagccacagcttgctgaagccttcggacaacccgttgtatggtttcggcggcaagggcacctttcccgttggcaaaatagagttgcccctctctttcggtgtagcacccaatgcccgaagtgagcaagtaaccttcgacattgtcgacatggtatatccatacaacgccatcatgggccggggctccatcaataagtttgaagctgccatccacgggctgtacctatgtatgaagatactaggtccgctaggcgccattacaatctacggcaaccagcagacgacgcgcaacatagagcgggacttcgtgcctggtcagaggaacgcacactgtctcacgacccagcgcgaggtccccgcgcccgccagcccaaccgataagcagcacgacaaggcacagttgcagagccaagacgggaccaagactgtccccctcgatcaggccacgcccaagcagacagtcactatcagcgaagacctcacctcacttgaagaagagaaacttctctgctgcctgagcaagaataaggatgtcttcgcctggtccgccctcgacctggtcggagtcagccgatccataattgagcacagcttgggaattgacccttcggtgcgacccaaaaagcagaggcttcgcaaaatgtccgacgaaaagacagaggccgccaaggcggaggtgcaccgcctcctggaggctaaattcattgagccagtggcttaccccacgtggctctccaatgtcgtaatgatatacatgaaggaggaagacaaggctagcaccagctttataacacccttcggcacttattgcttcgtcagaatgccggagggtctcaagaatgccaggtccaccttctccagactcaccaaaacagtactcgaagggcaggtcggcagaaatatatttacatatgtggacgacatcgtcgtcgccagcaagaataaggaggaccatctcgccgacctggccgagacatttgcgaacatgcgagatgcacgactccgcctaaacccggaaaagtgcgtcttcggtgttcgccagggcaagatattgggttacctggtgtcacaccgcggcatcgaggccaacccaaccaagatccaggccatcatcggcatgtcgcccccgcagtccgccagggacgtccagcgtctgacaggcagattggccgctcccaacagattcatctccaggtccgccgagcgaagtctccccttcctcaaaacactccgcggtgcgaaagacttcgcctggggaccggagcaagcagcggccttcgcctcactaaaacagtacctgtcggagctggccatcctcacaagccccgactcctcgctccccctattgctctatgtcgcggcttcgccgcacgcggtcagtgcggcactagtgcaggagcagacagtcgagggcgcagtcagacagtgccctgtttactatgtctccgaggtcctgacaccgtccaaatgcaacatgacagagctagagaagatcgcctacgcagttgttatgtcctcgcgcaaactacgccattactttgaagcattcaaggtccgagtcacctcagacagggggctcggcgaactattcagaaacccggaggcatcggtgaggatcgccaagtgggcagccgaactctccggctaccacatcagcttcgagcccaggacagccatcaagtcgcaagtcctggcagacttcgtcgtcgactggactgggccagtaacacagccggacccgtccacagagaaggtctggaccatccattgtgacggcgcatggtgccacgcgggggcaggcgtcgctgcagtcgtcacctcaccagccggagtcaaacacagatatgcagcacgcctcaacttcactctggaatccgacaaatgtacaaacaatatagcagagtatgaagcagttatcctcggcctccgcaagctaagggccctcggagtcaccacatgtatcatcaagacagactccaagatagttgctggccaggtcgagaaagactatgcagcaaaagaccccgcactcatgcaatacctcgcggctatccgaagtctcgagagacagttcaagggattcaccctgcagcatgtggatagggccaagaacgaggaggccgatgcattagccaaggccgccgccaggggcgagcccctgccctccgacgtgttctttcacaccatcggcacaccagccgtccggagccccgaagggctccaaataactaatgatagcgagggccaccgtatagtcaacctaatcatgaccgaagactggcgggcaccaataaccctgtttctacaggggtactatcatccaaccgacgtcagtgaggcaaagcgcctcagacatcgaagccgggacttcacactgattgagggccaattatacaagaaagggatcctacgcgaagtccacagcggcacgtgcggctcgcacgcagggccaagggccctggctgccaaggtgatccgacaagggttttactggcctgcaatgatctgcgccgcaaatcgagtcacaaggtcctgcgaagcctgccagaagttctctcctcggtcaggcaacccctcgcaatatacaaagctgattgcccatacatggcctctccagcgctggggcctggacattgtcgggcccctgcccaccgctcaggggaaccttaagttcgccttcgtagccgtcgaatacttcaccaaatggattgaagcgagggctgtttccacaatcacatcaaagactgcccaaaaattcttctggcagaacattgtttgccgcttcggagtaccgtctgagctaacagttgacaacggcaagcagttcgacagccaagatttcaaggatttttgtttctccatcggcaccaagcttgccttcgcttcagtctatcatccgcagtccaacggggtcgtggagcgtgccaatgggaaaatcttcacagctgtcaaaaagatgctcctcgatgaaaaaaaggcagatggaccgatttattgccggaggcagtctgggcgctaa

SEQ ID NO: 87910 - DNA, 1851 bp, Zea mays
  Clone ID: MRT4577_180173C.1
atgttgggtgttgtccccgcacctgagacaacgacaggtgtcgcttcccagcaacgtgccaaccccaagcggactgatgacgccagcaccctcgcgaaggacttgttgggcgttagcctcgtacctgagataacggtgcattccgtccatgatgcaacttcaccaccgtccatcaaccaagaggtaccatccgttttccacccggttccctttagatttagctttgatccgccaagcgaccccgcttcggtgagcgctttcacaagggcatatcctaaccttccagggtaccatatgtggtcgacctgggaccaactgacggtcgtctcaacctacggacccgcgggttctgaggaagaagacgaccccgacttcagttgggatttctccggactcagtgatcccagtgccatgcgagacttcatgtccgcatgtgactactgcctctccggttgctctgatgatggccacagcctcggcgacgagggttacgacccaagtcgcgagtgtttccacatcgatcaaggggatcacgacgaagacaaccacctcggcatgccagaagatgacgacgcccctgtgcctgcgtctcgtgttgagatcccgcgggagctagctgtggtccgagtccctgcggggggtcaggacacacagcttgagcaactccgcgagatgcatgccaagctcgacgaagaagcggggcgacttgtgcaggtccgacaaaacatcgagcaggagtggttgggagggacggacgacgacaacctcatcatccgcaaccttccccttttcctctccaacactgcccgggcctggctggagcatctgcctcctgcgcagatctccgactgggacgacctagtcaaggccttcgcgggaaatttccaagccaccaagttggcctatggtcaggaggcggtcgaagccaccttccggaaggacaagcagcctcagggaagacagaaggaagacgcccccgaggcgtccgccccgcgtggcacgaagaagaagaccaggaagaaggcgcaagcaaaaagcgacgccgttgacatggatctcgtcgctgctgccgagcacaggaatcctcggaagcctcccggaggggccaacatgttcgacaagatgatcaaggagtcgtgcccctatcacaggggtcccgtcaagcacactcttgaagaatgtgacatgctccgacgttacttcaacaaggccggaccctcggcagaaggtggcaaggaccaaggcaacaacaagaaggggggcgacaaggaagaggagttcccggaggtagcggcaccggtctacctagactggtccgacaagcccatcaccttcgaccaaggcgaccaccccgactgcgtaccgagcccagaaaggtacccgcttgtcgtcgaccccgtcatcggcaacgctaggctcaccaaggtcctcatggacggagacagcagcctcaacatcatctacgccgagaccctagggctcttgggggtcgatctgtccatgatccgggccggtgtagcaccctttcacgggatcgtcctcggtaggcgcgtcctgccccttgggcaacttgatttgctcgtctgcttcagaactccctccaacttccgaaaggaaaccctcactttcgaggtggtcgggtttcgagggacctatcacgcggtgctgggaagaccgtgctacgccaagttcatggccgtccccaactacacgtacctcaagctcaagatgtcaggccccaacgaaaccatcaccatcggatccacgtaccgccatgcttacgagtgcgcgtggaatgcgtggagtatgctgaggccctcgccaactccgaggccctcatcgctggcctag

SEQ ID NO: 87911 - DNA, 4974 bp, Zea mays
  Clone ID: MRT4577_180174C.1
atggcacccaagagagctaacccgaaggctgacgaggctgcgaaggcagcactgctcgccgcaagaaagggcaaggccctcgccctcacccaatccacccaccaagaggccactgaagacaatgttccccgcacctgcgaagacgacactttccgcacctgcggccctgaaggacaatcgcagccacccccaaacttcgccccactggaaggcgcggacctcaccgaggatggcgaagtcctcggcgtctcagcggaagaacagctacagctgcgcgccctgcgcctcaagaaccgcaatctccagaggcagaaagagatactggaggccaagcgccagcgtgtgtccgcactagccaaagtgcggcaaatgatacgcgacgaagagcagaaggcccaagacctcgagcgcgagatcgcgctgatgcagcgcgaaggccaccttggcctgcagcaagggccacccctccagcagcgcgcacaactggaagacacccgagagggccacctcggcctccagcatgggccacccctgcaacaccgagcacaaccggaagacccgcgtttcccccagcgcgactacaccttccagcacgccgcgccattccaaggggtcaactacctcgacgagcgaagtcccctggcgccacacctgcaagtgacgccttggccagctaacttccgagcagggacctatcccaagtacaacggcagcaccgacccggcgcaatacataatgagttatcagatcgctatccactacgccatcagtggccttcgtgccggcgtcctctacagccactgtatcagagatccgcccaagaacctccaggagctatatcagctctttgaaaaatattccaagtccgaagagctccaccagcgcaaggttgagtcacagcggaaacccaaagatgccccacagtccagccacacatggacgaggactccgcagccagactccggtcgagatggccgcagtcagcagcaagtgcacaacatcgccaaccagcatcccgctgctgacccccctcgtcgccaggaatatcccccccagggccgcggaaatggaacttgcggtaggggccgagggcgtgcgcagccgccgcgccgattctactgccttttccatggcgaagactgcgcccaccaaaccaaagactgccccgaaacgaaggccaccagagacagaatggcacgggcgcagccagccgacaaccccagaattgtcacgcacaattaccagcaacctcctccaccccctccaccatatatccacgctcccaccccgcatccaccgcaccacgcttaccaacaccatcaggaagtacaaatcgtacctcctccacccccaccaccacaccagcaacatcaaaacatcccccacgccccaaagcaggaagacttcgccgatccaccatatcgcggagtcattcacatgataaccgaggggtccagcactgacttcgacaccaagcggcagaagcgggaccactaccgcagcatcaaccatgtcgtcgtcactggcccagtcgtgcagacaaagtggtcccacataccgctaaccttcgacgcacgagacgttgacctgcgcagcgccccccacatcgacgctatggttatcaattgcagcgtggcaggctgggacctacacaaagtcctagtcgacaacggcagtcaggcggacatcatcttcctccacgccttcgaccgcatgggtataagccacagcctgctcaagccttcggacaacccgttgtatggcttcggcggcaagggcacctttcccgtcggcaaaatagagttgcccctctccttcggtgtagcacccaatgcccgaagtgagcaagtaactttcgatatcgtggatatggtatatccatacaacgccatcatgggccggggctccatcaataagttcgaagccgccatccacggactgtacctatgtatgaagataccaggtccgctaggcgccattacggtctacggcaaccagcagatggcgcgcaacatagagcgggacttcgtgcctggtcagaggaacgtgcactgcctcacgacccagcgcgaggtccctgcgcccgccagcccaaccgataaacagcatgacaaggcacagctgcagagccaagacgggaccaagactgtccccctcgatcaggccacgcccaagcagacagtcactatcagcgaagacctcacctcgcatgaagaagagaaactcctttgctgcctgtccaagaataaagatgtcttcgcctggtccgccctcgacctggtcggagtcagccgatccataattgagcacagcttgggaattgacccttcggtgcgaccaaaaaagcagaggcttcgcaaaatgttcgacgaaaagacagaggctgccaaggcggaggtgcatggcctcctagaggctaaattcatcgagccagtggcttaccccacctggctctccaatgttgtaatggtgcagaaaaaaagcgggaaatggcgaatgtgcatagacttcaccagtctcaacaaggcctgcccaaaggacaatttcccgttgccgcggatcgacaaaatagtcgatagcgcggccggatgcgaggtcatgtcactcctcgactgcttctccggttaccaccagatatacatgaaggaggaagacaaggctagcaccagctttataacacccttcggcacatattgcttcatcagaatgccggagggactcaagaacgccgggtccaccttctccagactcactaaaacagtactcgaagggcaggttggcagaaatatatttacatatgtggacgacatcgtcgtcgccagcaagaacaaggaggaccatctcactgacctcgccgagacattcgcgaacatgcgagacgcacgactccgcctaaacccggaaaagtgcgtcttcggcgttcgccagggcaaaatattgggctacctggtccgccgagcgaagtctccccttcctcaaaacactccgcggtgcaaaggacttcgcctggggaccggagcaagcagcggccttcgcctcactaaaatagtacctgtcggagctgtcagcgcggcactagtgcaggagcagacagttgacggcgtggtcaggcagtgcccattttactatgtctccgaggtactgacaccgtccaagtgcaacatgacagagctggagaagattgcttatggagtcgttatgtcttcgcgcaaactgcgccactactttgaggcattcaagcccaggacagccatcaagtcacaagtcctggcggacttcgtcgtcgactggactgggccaataacgcaaccagacccgtccacagagaaggtttggactatccattgcgacggcgcatggtgccacgcgggggcaggcgtcgctgcagtcgtcacctcaccagccggggtcaagcacatatacgcagcacgcctcagcttcgctctggaatccgacagatgcacaaacaatatagcagaatatgaagcagtcatcctcggcctctgcaagctaagggccctcggagtcaccacctgtatcatcaaaacagactccaagatagttgccggccaggtcgagaaagactacgcaacaaaggaccccgcacttatgcaatacctcgcggccaccagaagtctcgagagacaattcaagggattcaccttgcagcatgtggacagggccaagaacgaggaggccgacgcgttggccaaggccgccgccaggggcgagtccttgccctccgacgtgttctttcatatcatcggcacgccagccatccggagccccgaagggctccaaataactaatgacagcgagggccaccgcatagtcaacctaatcatgaccgaggactggcgggcaccaataaccctgttcttgcaggggtactaccatccaaccgacgtcagcgaggccaagtgcctcagacatcgaagccgggacttcgcactgattgaaggccaactctacaagaaaggggtcagtcagccaatgcttaagtgcgtcaccaaaaccgaaggcatgcagatactacgtgaagtccacagtggcacgtgcggttcacacgcagggccaagggccctagctgccaaggtgatccgccagggtttttactggcccgcaatgatctgcgccgcgaatagggtctcaaggtcctgcaaagcctgccagaaaatttctcctcggttaggcagcccctcacagtatacaaagctgatcgcccatacatggcctctccagcgctggggcctggacattgtcgggcccctgcccactgctcaggggaaccttaaattcgccttcgtcgccgtcgaatacttcaccaaatggatcgaagcgagggctgtttctacaataacgtcaaagactgcccaaaaattcttcttgcaaaacattgtttgccacttcggagtaccgtccgaactaacagttgacaacagcaagcagtttgacaaccaagacttcaaggatttttgtttctccatcggcaccaagcttgccttcgcttcagtttatcatccgcagtccaacggggtcgtggaacgtgccaacgggaaaatcttcacagttatcaagaagatgctccttgatgaaaaaaagggcagatggaccgatttattacctgaggcagtctgggcactaaacacgactgagtgcagagcgactgggtttactcccttccgccttctatacggatcggaggccatgaccccgcaagaaataaagcatgggtccccgcgaacagttctgtcagtcgtccccgacgtggacgagccaacttcaaaagatctcattgacggagaccgagtcttcgccctacaggccctaaacaaataccaagcccagaccaaagcatggcgcgaccacacagtcatcccgagggagttcagcgaaggggacctcgtactcgtccgaacagctcgcacggagccaagggcaagctggagcccaagtgggagggcccctttatag

SEQ ID NO: 87912 - DNA, 2658 bp, Zea mays
  Clone ID: MRT4577_180175C.1
atgccgttcggtttgaggaatgcgggcgcgacataccagcggtgcatgaaccatgtgttcggcgaacacatcggtcgcacagtcgaggcctacgtcgatgacatcgtagtcaagacaaggaaggcttccgacctcctctccgaccttgaagtggcattccaatgtctcaaagcgaaaggcgtcaagctcaatcccgagaagtgtgtcttcggggtgccccggggcatgctcttggggttcatcgtctccgagcggggcattgaagccaacccggagaagatcgcagctatcaccagcatggggcccatcaaggacttaaaaggcgtacagagggtcatgggatgtctcgcggccctgagacgtttcatctcacgcctcggcgaaagaggtctgcctctgtaccgcctcttaaggaagaccgagtgcttcgcttggacccctgaggctgaggaagctctcgggaacctgaaggcgctcctcaccaagacgcctaacttggtgcctccagctgacggagaagccctcttggtctacgtcgccgcgaccactcaggtggctagcgccgcgattgtggtcgagaggcaagaagaggggcatgcattgcccgttcagaggctagtctacttcgtcagcgaggtactctccgagaccaagattcgctacccacaagtccagaagctgctgtatgcggtgatcctgacgaggcagaagttgcgacactacttcgagtctcatccggtaactgtggtgtcatccttccccctaggggagatcatccagtgccgagaggcctcgggcaggattgcaaagtgggcggtggagatcatgggcgagacaatctcgttcgcccctcggaaggccatcaagtcccaggtattggcagacttcgtggctgaatgggtcgacacccagctaccgacggctccgatccaaccggagctctggaccatgtttttcgatgggtcgctgatgaagacgggagccggcgcgggcctactcttcatctcgcccctcgggaaacacctacgctatgtgctacgcctccatttcccggcgtccaacaatgtggctgagtacgaagctctggtcaacgggttgcggatcgccatcgagctaggggtcagacgcctcgacgcccgaggtgactcgcagctcgtcatcgaccaagtcatgaagaactcccacttccgcgacccgaagatggaggcctactgcgatgaggttcggcgcctggaagacaagttctacgggctcgagcttaaccacatcgctcggcgctactacgagactgcggacgagctggcaaaaatagcctcggggcaaacgacggttcccccggacgtcttctcccaggatctgcatcgaccctccgtcaagatcgacgacacgcccgagcccgaggcaccctcggtccggcccgaggtaccctcggctcagcccgaggcactctcagctcggcccgaggcgccctcggttcagcccgaggtaccctcggcccccgagggcgaggcactgcacgtcgaggaagagcagagcggggccacgcctgatcgaaattggcagaccccgtacctgcaatatctccgccaaggagagctacccctgaccaagccgaggctcggcggcatcaggtccgagcaggcggtggcgttcttcaccaacatcatccatcgcttcggggtcccaaactccatcatcactgacaacggcacccagttcaccggcagaaaattcttggacttctgcgaggatcaccacatccgggtggactgggccgccgtggctcatcccatgtcgaatgggcaagtagagcgtgccaacggcatgattctacaagggctcaagcctcggatttacaacgacctcaacaagttcggtaagcgatggatgaaggaactcccctcggtggtctggagcctgaggacaacgccgagccgagccacgggtttcacgccgttgttcctggtctatggggccgaggccatcttgcccactgacctggaatacggctccccgaggacgagggcctacagcgatcaaagcaaccaagttagccgagaagactcgctggaccagctggaagaggcttgggacaaggccttactacactcggcgtgctcttctgccgaagcgatccttcgagccttctcgactgagtcggtgacagggcctcatggacgggcaaaagtacgcgtaagcggcaaggccgaccgagccgagggactcccacgcctccgggatacggatacctcactcatcaccttccgcgagaagcaactctcgctcgcacaaacacccctgttaccgacaaaaagtccagatactcgaaacaagaggaaaagagacgcagctttacaacgcagcgagggtgtgtgttctggcctcggcggccgcagaaggcacacgctacaaggcaatctgatcctgcaggctcgggtcttcacgctggaagggggctgtagcaccctcggcatcgacgacaccttcagcgaggcccgacccagcctcggacggcgacgcggtccagggacttctccgggaatccggcccgagcaggcggctcggccggttacccctggggcctcggccaaccatcttccaagggcgccagcccgatccgaggcctcggctggacaactccagcgtcggtcccactaa

SEQ ID NO: 87913 - DNA, 541 bp, Zea mays
  Clone ID: MRT4577_180176C.1
aaaaccctagccgtccagcccacatctctctccctctctctcccacacacgctagcccatccccagattcctccccagcacaccacctcgccgcagcggagccgagcccgatgccgcccaaggcgtcgaagaaggacgccgagccggcggagcgccccatcctcggccgcttctcctcccacctcaagatcggaatcgttgggttacccaatgttggcaaatcaactttcttcaacatagtaacaaagttgtccatcccggctgagaacttcccattctgtaccattgaaccaaatgaggcacgggtacatgttccggacgaacgatttgactatctttgccaacttttcaagccaaagagtgaggtggctgcatatctggaaatcaacgacatagccgggcttgttagaggagcaagtgcaggggagggtctgggcaatgccttcttatcccatatacgtgctgttgatggaatctttcatgtcttgagagcattcgaagacacggaaatcactcatattgatgatacagttgatcctgt

SEQ ID NO: 87914 - DNA, 3909 bp, Zea mays
  Clone ID: MRT4577_180177C.1
atggcacccaagagagctaaccccaaggctgacgaggctgcgaaggcagcactgctggccgcaagaaagggcaaggccctcgtcctcacccaatccacccaccaagagcccattgaagacaatgttccccacaccggcgaagacgacaccttccgcacctgcggaaccgaaggacagtcacagccgcccccaggcttcgccccactggaaggcgcggacctcaccgaggacggtgaggtcctcggcgtctcaacagaagaacagctgcagctgcgcgccctgcgcctcaggaaccgcaatctccagaggcagaaagagatactggaggccaagcgccagcgtgtgtccgcattagccaaagtgcggcaaatgatacgcgacgaggagcagaaagcccaagacctcgagcgcgagatcgcgctgatgcagcgcgaaggccacctcggtctacagcaagagccacccctccaacagcgcacacaaccggaggacacgcgcgaaggccacctcggccggcagcatggcccacccctgcagcaccgggcgcagccggagaacccgcgtttcccccagcatgactacatctcccagcacggcgcgccattccaaggggtcaactaccttgacgagcgaagtcccctggcgccacacctacaagtgatgccttggccagctaactttcgagcgggggcataccccaagtacaacggcagcaccgacccggcgcagtacatcatgagttatcaagtcgccgttgcatcagccggaggagacgacgccacaatggcgaagtcttttatcatcgcactagagggcccagcactcacctggttcaccagattgcctccgctgtccattgattcgtggagaagtctcagggacaagttcctcctcaacttccaagggtaccgtccagacaccgacgctttggctgagctctcgctttgcaaacagctggaaaaggagactctgcgggagtattaccgcaagttcttaacactcaagtcacagctgccctctgtcgacgatcagatcgctatccactacgccatcaatggccttcgggccggcgtcctctacagccattgtatcagagatccacccaagagcttgcaggagctatatcagctcttcgaaaaatatgccaaatccgaagagctccaccagcgcaaggttgagtcacagcggaagcccaaagatgccccgcagtccagccgcacgtggacgaggactccgcaaccagacttcggtcgagatggccgcagtcaacagcaagtgcacaacatcgtcaaccaacagcccgctgttgatccccctcgccgccaggaatatcccccccagggccgcggaaatggaactcgcggcaggggtcgagggcgggcgcagcagccgccgcgccgatctattgccttctccacggcgaggactgcgcccaccaaaccaaagactgccccgagacgaaggccaccagagacagaatggcgcgggcgcagccagccgacaatcccagaattgtcgcgcataattaccagccaccccctccaccatatatccacgctcccgctccgcatccaccgcaccacgcttaccaacaccatcaggaacaagcggcagaagcgggaccactaccgcagcatcaaccatgtcgccgtcactggcccagtcgtgcagacgaagtggtcccacataccgctaaccttcgacgcacgagacgtcgacctgcgcagcgccccccacatcgacgctatggtcatcaattgcagcgtggcaggctgggacttacacaaagtcctagtcgacaacggcagtcaggcggacatcatcttcctccacgccttcgaccgcatgggtataagccacagcttgctgaagccttcggacaacccgttgtatggtttcggcggcaagggcacctttccagttggcaagatagagttgcccctctccttcggtgtagcgcccaatgcccgaagtgagcaagtaaccttcgacattgtcgacatggtatatccatacaacgccatcatgggccggggctccatcaacaagttcgaagctgccatccacgggttgtacctatgcatgaagataccaggcccgctaggcgccatcacagtctacggcaaccagcagacggcgcgcaacattgagcgggacttcgtgcccgacgaaaagacagaggccgccaaggcggaggtgcatcgcctcctggaggctaaattcatcgagccagtggcttaccccacgtggctctccaatgttgtgatggtgcagaaaaaaagcggaaaatggcgcatgtgcatagacttcaccagtctcaataaggcctgcccaaaggacaatttcccgttgccgcggatcgacaaaatagtcgatagcgcggccggatgcgaggtcatgtccctcctcgactgcttctccggctatcaccagatatacatgaaggaggaagacaaggctagcaccagctttataacacccttcggcacttattgctttgtcagaatgccggagggtctcaagaacgccggatccaccttctccagactcaccaaaacagtgctcgaggggcaggtcggcagaaatatattcacatatgtggacgacatcgtcgtcgccagcaagaataaggaggaccatctcgccgacctggcagagacattcgcgaacatgcgagatgcacgactccgcctaaacccggaaaagtgcgttttcggtgttcgccagggcaagatattgggctacctggtgtcccgccgcggcatcgaggccaacccaaccaagatccaggccatcgtcgatatgtcgcctccgcagtccgccagggacgtccagcgcctgacaggcaggatggccgctctcaacagatttatctccaggtccgccgagcgaagtctccccttcctcaaaacactccgcggcgcgaaggacttcgcttggggaccggagcaagcagcggccttcgcctcactaaaacagtacctgtcggagctggccatcctcacgagccccgacccctcgctccccttattgctctatgtcgcggcttcgccgcacgcagtcagcgcggcactggtacaggagcagacagtcgagggcgcagtcagacagtgccctgtctactatgtctccgaagtcctgacaccgtccaaatgcaacatgacagagctggagaagattgcctacgcagttgttatgtcctcgcgcaagctgcgccattattttgaagcattcaaggtccgagtcacctcagacagggggctcggcgaactattcaggaacccggaggcatcagtgaggattgccaagtgggcagccgaactctccggctaccacatcagcttcgagcccagaacagctatcaagtcgcaagtcctggcagacttcgtcgtcgactggactgggccagtaacacagccggacccatccacagaaaaggtctggactatccattgcgacggtgcatggtgtcatgcgggggcaggcgtcgctgcagtcgtcacctcgccagccggagtcaaacacagatatgcagcacgcctcagcttcgctctggaatccgacaaatgtacaaacaacatagcagagtatgaagcagtcatcctcggcctccgcaagctaagggccctcggagtcaccacatgtatcatcaaaacagactccaagatagttgccggtcaggtcgagaaagactatgcagcaaaagaccccgccctcatgcaatacctcgcggctatccgaagtctcgagagacaattcaagggattcaccctgcagcatgtggatagggccaagaacgaggaggctgatgccttagccaaggccgccgccaggggcgagcccctgccctccgacgtgtttttccacaccatcggcactccagctgtccggagccccgaagggctctag

SEQ ID NO: 87915 - DNA, 3576 bp, Zea mays
  Clone ID: MRT4577_180178C.1
atggcggaagagcaacatctgagtttgtcccgtcgccttcctcgccacaggaggaggaggcggggcaaccgtggccaagcaggaggtggcacctcgttggctgtcgagcgagtcgacgatgccggcgccccagcgggggacacgtcgggcgttgacctcgcgcctaagacgacgacgagcgtcgtttccctgcaacacgccaaccccaagcggacagatgacgccagcaccctcgcggaggacttgctggcgttagcctcccttgacgacgagggttgtggcccaagtcgcgaatgtttccacatcgatctagggggtctcgacgaaggcaaccaccttggtatgccggaggacgacgatccccctaggcctgcgcctcgcgttgacatcctgtgggagctagctgtggtcccagtccctgcggggggtcaggacacacagctcgagcaaatccgcgagatgcaggccaagctcgatgaggaagcaggacaacttgtgcagctctggcaaaacatcgggcaggagtgggcaagccgagcactagtcggagaagcgcgtcatcaggcccaggacgtccagtgccgtatcactgacgatgccagagcaaggctgcccccggcttccagtgggccaggggaatccctgcgagactacatccggcgattttcgaagcagcgcaccgagctgcccaacatcactgactcagatgtcatcggcgcgttcctcgccggcaccacttgtcgtgacctggtgagcaagttgggtcgcaagactcccaccagggcaggcgagttgatggatatcgccaccaagttcgcctctggtcaggaggcggtcaaggccatcttctggaagggcaagcagcctcagggacgccagcaggaagacgtccccgaggcatccacccagcgcggcacgaagaagaaggccaagaagaagtcgcaagcgaaacgcgacgccgccgacacagatcttatcgctgccgccgagcacaggaaccttcggaagcctcccggaggggccaacctgttcgacaagatgctcaaggaatcgtgcctctatcatcagggccgggcccccggcggtggcagaggccatgacaacgacaagaagaagggcaacaaggcagaggagttccctgaggtccacgactgtttcatgatctacagtgggcaagtggcgaacgcctcggctcagcaccgcaagcaggagcgccgggaggtctgctcggtgaaggtggcggcgccagtttacctagactggtccgacaaggccatcaccttcgaccaaggcgaccatcccgatcgcgtgccaagcccaggaaagtacccgctcgttgtcgaccccgtcatcggccacgtcaggctcaccaaggtcctcatagacggaggcagcagcctcaacatcatctacgccgagaccctcgggctcttacagatcgatctatccacgatccgggccggtgcgtgtgtggaatacgttgaggccctcgccgagtttgaggccctcatcgccgtcctggagtgcctctccagggaggtgccagatgcgaagcgccacgccggcaacttcgagccaacaaaggcggttaagtctgttcctctcgaccccagcagcgacgcctccaagcaagaagcagtgctcgtcgactttctccgcacgaacgccgaggtttttgcgtggagtccctcggacatgcctggcataccgagggatgtcgccgagcactcgctggatatccgagctggagcccgacccgtgaagcagcctctgcgccgtttcgacgaagaaaagtgcagagccataggcgaggagatccacaagctgatggctgcggggttcatcaaagaggtattccatcccgaatggttagccaaccctgtgcttgtgaaaaagaaaggtgggaaatggaggatgtgtgtagactgcactggtctaaacaaagcatgtccgaaggttccctaccctctgcctcgcatcgatcaaatcgtggattccactgctgggtgtgaaaccctgtcattcctcgatgcctactcagggtatcaccaaatcaagatgaaagagtccgaccagctcgcgacttctttcatcacaccttttggcatgtactgctatattactatgccatttggtttgaggaatgcaggcgcgacataccaaaggtgcatgaaccacgtgttcggagagcacatcggccgaacggtcgaggcctacgtcgatgacatcgtggtcaagacgagaaaagcctccgacctcctctctgaccttgaaacaacattcaagtgtctgagggcgaagggcgtgaaacttaaccccgagaaatgtgtcttcggagtccctcgaggcatgctcctggggttcatcgtctccgagcggggcatcgaggccaacccagagaaaatcgcggccatcaccaacatggggcctatcaaagacttgaaaggagtacaaagggtcatgggatgccttgcagctctaagccgcttcatcttgcgcctcggcgaaagaggcctacccttgtatcgcctcttaaggaagaccgagcgcttctcttggacccccgaggccgaggaagccctcggaaacttaaaggcactccttacaagtgcgcccatcttgaaggccatcaagtaccaagtcttggcagacttcgtggctgaatgggtcgacacccagctaccaacagcttcgatccaaccggaactctggaccatgtacttcgatgggtcgctgatgaaaacaggagcaggtgcaggcctgctcttcatctcacccctcgggaagcacctccgctacgtgctgcgcctccatttcctggcgtcaaacaacgtggccgagtacgaggctctggttaacaggttgcgcatcgccatcgagctaggggtttggcgcctcgacgctcgtggcgactcgcagcttgtcatcgaccaagtcatgaagaactccaactgccgcgaccggaagatggaggcctactgcgacgaggttcggtgcctggaagacaagttctacggactcgagctcaaccacgttgcccgacggtacaacaagactgcagacgagctggctaagatagcctctgggcggacaacggttcccccagatgtcttctccagagacatacatcaaccctccgtcaagaccaacgacacgcccgagcccggggaagcctcggcccagcccgaggaggccttggcccagcccgaggcaccctcagccgctgagggtgaggcactgcgtgtcgagggagagcaggatggggtcacgcctaatcgaaactggcagaccccgtacctgcaatatctccaccgaggagagctccccctcgacaaagccgaagctcggcgactggcgtggcgcgccaagtcgttcgtcttactgggtgatgaaagggagctctaccacctcaacccctcaggcattctccaacgatgcatatccatcgctgaaggacatgagctattgcaagagatacactcgggggcttgtggtcaccacgcagcacctcgagccctcgttgggaacgccttccgacaaggtttctactggccgaccgcggtggccgacgcctag

SEQ ID NO: 87916 - DNA, 421 bp, Zea mays
  Clone ID: MRT4577_180179C.1
aagttcagatatcaaactccataaggattcaagccatactgctgcagaagagttttgggtacaacacagaggacacaacaggtccattaatccaacgacgccacaaccaccattcatgacacacaacccacagatgtttattacacgacaacatacatattgaggttcaccagagggcaccaaacgacgcagatacccagcttcagcatcagtttaaatgaaccatggcttactgaccaccggggaggcggagcaccaggaggagagtgctctccttctgcatgttgtagactgataaggggcagtcatgctgcatctgctagccggctaatatcatacgctgctggtctggggggatgccctttttgtcctggatctttgccttcacgatgctgatggtgtcggatctctgaacctccaa

SEQ ID NO: 87917 - DNA, 263 bp, Zea mays
  Clone ID: MRT4577_18017C.1
aattccggtcgacccactcgttcgatcgtacagtcaatacttacactgcagttcagaataggaaatacctcgaatccatctggataagtgacacattcgatattttactgtagcatctatatcatcaccaaccgtgtctatacaatacatacagatctcatccctgatgttcaagatagctactgaatcgcattctcaaatattatgaacagattaataatatcgctacttagatatgcagtcacatgtccatgttctcatac

SEQ ID NO: 87918 - DNA, 560 bp, Zea mays
  Clone ID: MRT4577_180180C.1
cggacgcgttgtgttagattacaccatgcgtctatttcgctagagtcgcctctaattctacatctccagaatctagcttcttcaaggcactgtcttcggattctctgaactgaaggaagcgtttggttgaagacgacgttgttccggtgttcccaaatggcccagcagcaaagatggacgagagcgctctggtgtcgtggggcagcagctgcaggtccagggggggatttggaccccgactctgtgccagaaggaagctgcatagtggaaccagaggaagatgtggtagcaggcttcgtctgcttgaaggcagaggtcacagatggggttggcaatcacacctttctcgaccaagcttactttgtggttgattttgctttgattgaggagccacataaagagctccaaccgttccacacatagtcaggctcctctaggttgggggctgacagagattggatcattgtgttaagggctaccgagtgcaacttgccaccgatgtcaatgaggggactccggagctgatctggcagatcagtgatatcgacgttgttcagagc

SEQ ID NO: 87919 - DNA, 2322 bp, Zea mays
  Clone ID: MRT4577_180181C.1
atggcacccaagagagctaacccgaaggctgacgaggctgcgaaggcagcactgctggccgcaagaaagggcaaggccctcgtcctcacccaatccacccaccaagagcccactgaagacaatgttccccacacctgcgaagacgacaccttccgcacctgcgggcccgaaggacaatcgcagccgcccccaggcttcgccccactggaaggcgcggacctcaccgaggacggcgaggtcctcgacgtctcaacagaagaacagttacagctgcgcgccctgcgcctcaagaaccgcaatctccagaggcagaaagagatactggaggccaagcgccagcgtgtgtccgcactagccaaagtgcggcaaataatacgcgacgaggaacagaaggcccaagacctcgagcgcgagatcgcgctgatgcagcgcgaaggccaccttggcctgcagcaagagccacccagccagcagcgcgcacaaccggaagacacgcgcgaaggccacctcggcctgcagcatggaccacccctgcaacaccgagcacagtcggagaacccgcgtttcccccagcgtgactacaccttccagcacggcgcgccgttccaaggggtcaactacctcgacgagcgaagtcccctggcgccacacctgcaagtgacgccttggccagccaacttccgagcaggggcatatcccaagtacaacggcagcaccgacccagcgcaatacataatgagttatcaggtcgccgttgcatccgccggaggggacgacgccacaatggcgaagtctttcatcatcgccctagagggcccagcactcacctggttcaccagattgcctccgctgtccattgattcgtggagaagtctcagggacaagttccttctcaacttccaagggtaccgtccagacaccgacgctttggccgagctctcgctttgcaaacagctggaaaaggagactctgcgggagtattaccgcaaattcttaacactcaagtcacagctgccctccgtcgatgatcagatcgctatccactacgccatcagtggccttcgggccggcgtcctctacagccactgtatcagagatccacccaagaatctccaggagctatatcagctctttgaaaaatatgccaaatccgaagagctccaccagcgcaaggttgagtcacagcggaagcccaaagatgccccgcagtccagccgcacgtggacgaggactccgcagccagactccggtcgagatggccgcagtcagcagcaagtgcacaacatcgccaaccagcagcctgctgctgaccccctcgtcgccaggaatatccccccagggccgcggaaacggaactcgtggcaggggccgagggcgcgcgcagccgccgcgccgacgtctacctgcgcagcgcccccccacatcgacgctatggtcatcaattgcagcgtggcaggctgggacttacacaaagtcctagtcgacaacggcagtcaggcggacatcatcttcctccacgccttcgaccgcatgggtataagccacagcctgctcaagccttcggacaacctgttgtatggcttcggcggcaaaggcacctttcccgttggcaaaatagagttgcccctctccttcggtgtagcacccaatgcccgaagtgagcaagtaaccttcgatattgtcgacatggtatatccatacaacgccatcatgggccggggctccatcaataagttcgaagctgccatccacagactgtacctatgtatgaagataccaggtccgctaggcgctatcacgatctacggcaaccagcagacggcgcgcaacatagagcgggacttcgtgcctggtcagaggaacgtacactgtctcacgacccagcgcgaggtccctgcgcccgctagcccaaccgataagcagcacgacaaggcacagttgcagagccaagacgggaccaagactgtcccccttgatcaggccacgcccaagcagacagtcactatcagcgaagaccttacatcacatgaagaagagaagcttctctgctgcctggccaagaataaagatgtcttcgcctggtccgccctagacctggtcggagtcagccgatccataattgagcacagcttgggaattgacccttcggtgcgaccaaaaaagcaaaggctccgcaaaatgtccgacgaaaagacagaggccgccaaggcggaggtgcaccgcctcctagaggctaaattcatcgagccagtggcttaccccacgtggctctccaatgtcgtaatggtgcagaaaaaagcgggaaatggcggatgtgcatag

SEQ ID NO: 87920 - DNA, 987 bp, Zea mays
  Clone ID: MRT4577_180182C.1
atgggatgccttgcggctctgagccgcttcatctcgcgccttggcgaaagaggcctgcccatgtaccgcctcttaaggaagaccgagcgcttcacttggacccctgaggccgaggaagccctcgggaacttaaaggcgctccttacaagcgcgcccatcctggtgccccccgctgccggagaaggagcgggcgcgggcctgctcttcatctcacccctcgggaagcacctccgctacgtgctgcgcctccatttcccagcgtccaacaatgtggccgagtacgagtccctggttaacgagttacgcatcgccatcgagctaggggttcggtgcctcgacgctcgtggcgactcgcagcttgtcattgaccaagtaataaagaactcacactgccgcgactcgaagatggaagcctactacgacgaggttcggtgcctggaagacaagttctacgggctcgagctcaaccacgtcgcccgacggtacaacgagactgcgaatgagctggctaaaatagtctcggggcagacaacggtccccccggacgtcttctcccgagacctacatcaaccctccgtcaagaccgacgacacgcccgagcccgagaaggcctcagccctgcccgaggcaccctcggccgtcgagggtgaggcactacgcgtcgaggaagagcggaatgagaaggcacccgggggcttcacgcacctgctggtcgctatcgacaaattctccaagtggattgagcgctttggagtcccaaactccatcatcatcgacaacggcacccagttcaccggcaggaagttcctggacttctgcgaggaccaccacatcggggtggactgggctgccgtagctcaccccatgacgaatgggcaggtagagtgtgccaacggcatgattctacagggactcaagccgaggatctacaacgacctcaacaagttcgacaggcgatggatgaaggaactcccctcggtgttctag

SEQ ID NO: 87921 - DNA, 344 bp, Zea mays
  Clone ID: MRT4577_180183C.1
ggccgcttttttttttttttttttcgttcttgggggaaaaagaaactgctaccggaagcgatatcacagtagtccacgcattgattcgcggattaattaaaccaaaacagggggatgggtgggcgtgaagatgcgcaccagccgctccgtggactgctcggggaagaagaccttgaagaactgcgggcagacgttggcctccgctttctccttctgcgtgtcgttctgcttgccctctcccctcacctccttctccttcgccggctccttcccctctccacccgtctccttcccggccttgcgcctcatctgcctctccttcgccgccggctccctgccggtct

SEQ ID NO: 87922 - DNA, 5091 bp, Zea mays
  Clone ID: MRT4577_180184C.1
atggcacccaagagagctaaccggaaggctgacgaggctgcgaaggcagcactgcttgccgcaagaaagggcaaggccctcgccctcacccaatccacccaccaagagcccactgaagacaatattccccacacctgcgaagacgacaccttccgcacctgcgggcccgaaggacaatcgcagccgcccccaggcttcgccccactggagggcgcggatctcaccgaggacggcgagaaccgcaatctccagaggcagaaagagatactggaggccaagcgccagcgtgtgtccgcactagccaaggtgcggcaaatgatacgcgacgaggagcagaaggcccaagacctcgagcgcgagatcgcgctgatgcagcgcgaaggccacctcggtctacagcaagagccacccctccagcagcgcgcacaaccagaagacacgcgcgaaggccacctcggcctgcagcatggcccacccctacaacaccaggcgcagccggagaacccgcgtttccctcagcatgactatgccttccagcacggcgcgccattccaaggggtcaactacctcgacgagcgaagtcccctggcgccacacctgcaagtgacgccttggccagctaacttccgagcaggggcatatcccaagtacaacggcagcaccgacccggcgcaatacataatgagttatcaagtcgccgttgcatccgccggaggggacgacgccacaatggcgaagtctttcatcatcgccctagagggctcagcactcacctggttcaccagattgcctccgctgtccatcgattcgtggagaagtctcagggacaagttccttctcaacttccaagggtaccgtccagacaccgacgctttggccgagctctcgctttgcaaacagctggaaaaggagactctgcgggagtattaccgcaaattcttaacactcaagtcacagctgccctccgtcgacgatcagatcactatccactacgccatcagtggccttcgggccggcgtcctctacagccactgtatcagagatccacccaagaacctccaggagctatatcagctctttgaaaaatatgccaaatccgaagagctccaccagcgcaaggaatatcccccccagggccgcggaaacggaactcgtggcaggggccgagggcgcgcgcagccgccgcgccggttctactgccttttccacggcgaagactgcgcccaccaaaccaaagactgccccgagacgaaggccaccagagacagaatggcgcaggcgcagccagccgacaatcccagaattgtcgcgcataattaccagccaccccctccaccatatatccacgctcccgctccgcatccgccgcaccacgcttaccaacaccatcaggaagtacaaatcgtacctcctccacccccaccaccacaccagcaacaccaaaacatcccccatgccccaaagcaggaagacttcgccgatcaaccatatcgcggagtcattcacatgataacaggggggtccagcactgacttcgacaccaagcggcagaagcgggaccactaccgcagcatcaaccatgtcgcggtcactggcccagtcgtgcagacgaagtggtcccacataccgctaaccttcgatgcacgagacatcgacctgcgcagcgccccccacatcgacgctatggtcatcaattgcagcgtggcaggctgggacttacacaaagtcctagtcgacaacggcagtcaggcggatatcatcttcctccacgctttcgaccgcatgggtataagccacagcctgctcaagccttcggacaatccgttgtatggcttcggcggcaaaggcacctttcccgttggcaaaatagagctgcccctctccttcggtgtagcacccaatgcccgaagtgagcaagtaaccttcgacattgtcgacatggtatatccgtacaacgccatcatgggccggggctccatcaataagttcgaagctgccatccacggactgtacctatgtatgaagataccaggtccgctaggcgctatcacaatctacggcaaccagcagacggcgcgcaacatagagcgggacttcgtgtctggtcagaggaacgcacactgtctcacgacccagcgcgaggtccccgcgcccgccagcccaaccgataagcaacacgacaaggcacagttgcagagccaagacgggaccaagactgtcccccttgatcaggccacacccaagcagacagtcactatcagcgaagaccttacatcacatgaagaagagaagcttctctgctgcctggccaagaacaaagatgtcttcgcctggtccgctctagacctggtcggagtcagccgatccataattgagcacagcttgggaattgacccttcggtgcgcccaaaaaagcaaaggctccgcaaaatgtccgacgaaaagacggaggccgccaaggcggaagtgcaccgcctcctagaagctaaattcatcgagccagtggcttaccccacgtggctctctaatgtcgtaatggtgcagaaaaaaagcgggaaatggcgaatgtgcatagacttcaccagtctcaataaggcctgcccgaaggacaatttcccgttgccgcggatcgacaaaatagtcgatagcgcggccggatgtgaggtcatgtcactccttgactgcttctccggctatcaccagatatacatgaaggaggaagacaaggctagcaccagctttataacacccttcggcacttattgcttcatcaggatgccggagggactcaagaatgcagggtccaccttctccagactcaccaaaacagtactcgaagggcaggttggcagaaacatatttacatatgtggacgacatcgtcgtcgccagcaagaataaggaggaccatctcgccgacctcgccgagacattcgcgaacatgcgagatgcacgactccgcctgaacccggaaaagtgcgtcttcggtgttcgccagggcaagatattgggttacctggtgtcacaccgcggcatcgaggccaacccaaccaagatccaggccatcgtcgacatgtcgcctccacagtccgccagggacgtccagcgtctgacaggcagattggccgctctcaacagattcatctccaggtccgccgagcgaagtctccccttcctcaaaacactccgcggtgcgaaagacttcgcctgggggccggagcaagcagcggccttcgcctcactaaaacagtacctgtcggagctggccatcctcacaagccccgagtcctcgctccccctactgctctatgtcgcggcttcgccgcacgcggtcagcgcggcactagtgcaggagcagacagttgagggcgcagtcagacagtgccctgtttactatgtctccgaagtcctgacaccgtccaaatgcaacatgacagagctggagaagatcgcctacgcagttgttatgtcctcgcgcaaactgcgccattactttgaagcattcaaggtccgagtcaactcagacagggggctcggcgaactattcagaaacccggaggcatcggtgaggattgccaagtgggcagccgaactctccggctaccacatcagcttcgagcccaggacggccatcaagtcacaagtcctggcagacttcatcgtcgactggactgggccaataacacagccggacccgtccacagagaaggtttggaccatccattgcgacggcgcatggtgccatgcgggggcaggcgtcgctgcagtcgtcacctcaccagccggagtcaaacacagatatgcagcacgcctcagcttcgctctggaatccgacaaatgcacaaacaatatagaagagtatgaagcggttatcctcggcctccgcaagctaagggccctcggagtcaccacatgtatcatcaagactgactccaagatagttgccggccagatcgagaaagactatgcagcaaaagaccccgcgctcatgcaatacctcgcggctatccgaagtctcgagagacagttcaagggattcaccttgcagcatgtggatagggccaagaacgaggaggccgattcattggccaaggctgccgccaggggcgagcccttgccctccgacgtgttctttcacaccatcggcacgcctgccgggtactatcatccaaccgacgtcagcgaggccaagcgcctcaaacatcgaagccgggacttcgcactgatcgagggccagctctacaagaaaggggtcagtcagccaatgctcaagtgcgtcaccgaaaccgaaggcatgcagatcctacgtgaagtacacagtggcatgtgcggctcgcacgcagggccaagggccctagctgccaaggtgatccgccaagggttttactggcccgcaatgatctgcgccgcaaatcgggtctcaagagtaccatccgagctaacagtcgacaacggcaagcagtttgacagccaagatttcaaggatttttgtttttccatcggcaccaagcttgccttcgcttcagtctatcatccgcagtccaacggggtcgtggagcgcgccaatgggaaaatcttcacagctgtcaagaaaatgctcctcgatgaaaaaaaaggcagatggaccgatttattacctgaggcagtctgggcgctaaacacaactgagtgcagggcgactgggtttactcctttccgccttctatacggatcggaggccatgaccccgcaagaaataaagcatgggtccccgcgtacagttccgtcagccgtccccgacgtggacgagccaacttcaaaagatctcattgacggagaccgggtcttcgccctacaggccctaaacaaataccaagcccagaccaaagcatggcgcgaccacgcagtcatcccgagggagttcagcgaaggggacctcatactcgtccgaacagctcggacggagtccaggggaaagctggagcccaagtgggagggccccttcatagtcaagacaaaagcatcccccagcgcctacaggctcacaacgccaaacggcgaggacctggagcactcctggaacatcgacaacctccgaaaattttttgtctga

SEQ ID NO: 87923 - DNA, 430 bp, Zea mays
  unsure (1)..(430): unsure at all n locations
  Clone ID: MRT4577_180185C.1
cctcaacacgctgggcatctcgctggcgctcatcgactacgcgcccctgggcgtgaaccggccccacatccacccgcaataacaacgacaaaaacgacatggactttaagttaattttcaaagatttcgtaaaaaagttaattttcaaaggtataatgatagtgttataattactttctaccttcgtggattgtatgctgcatgttatattttgtctcaggattgtgcgtattacgttttgacttgatgctgtagatgctacaacagcaacctccacgtctaaaaatatatacattgttatgcgctatcctttgaaactttataatcacattatctttacaactaattaagtactcattgtaggcgtncacacgccgcgagctcggggcgggacagcctncacggtggcggggtcacgctgaacagggag

SEQ ID NO: 87924 - DNA, 5403 bp, Zea mays
  Clone ID: MRT4577_180186C.1
atggcacccaagagagctaaccggaaggctgacgaggctgcgaaggcagcactgcttgccgcaagaaagggcaaggccctcgccctcacccaatccacccaccaagagcccactgaagacaatattccccacacctgcgaagacgacaccttccgcacctgcgggcccgaaggacaatcgcagccgcccccaggcttcgccccactggagggcgcggatctcaccgaggacggcgagaaccgcaatctccagaggcagaaagagatactggaggccaagcgccagcgtgtgtccgcactagccaaggtgcggcaaatgatacgcgacgaggagcagaaggcccaagacctcgagcgcgagatcgcgctgatgcagcgcgaaggccacctcggtctacagcaagagccacccctccagcagcgcgcacaaccagaagacacgcgcgaaggccacctcggcctgcagcatggcccacccctacaacaccaggcgcagccggagaacccgcgtttccctcagcatgactatgccttccagcacggcgcgccattccaaggggtcaactacctcgacgagcgaagtcccctggcgccacacctgcaagtgacgccttggccagctaacttccgagcaggggcatatcccaagtacaacggcagcaccgacccggcgcaatacataatgagttatcaagtcgccgttgcatccgccggaggggacgacgccacaatggcgaagtctttcatcatcgccctagagggctcagcactcacctggttcaccagattgcctccgctgtccatcgattcgtggagaagtctcagggacaagttccttctcaacttccaagggtaccgtccagacaccgacgctttggccgagctctcgctttgcaaacagctggaaaaggagactctgcgggagtattaccgcaaattcttaacactcaagtcacagctgccctccgtcgacgatcagatcactatccactacgccatcagtggccttcgggccggcgtcctctacagccactgtatcagagatccacccaagaacctccaggagctatatcagctctttgaaaaatatgccaaatccgaagagctccaccagcgcaaggaatatcccccccagggccgcggaaacggaactcgtggcaggggccgagggcgcgcgcagccgccgcgccggttctactgccttttccacggcgaagactgcgcccaccaaaccaaagactgccccgagacgaaggccaccagagacagaatggcgcaggcgcagccagccgacaatcccagaattgtcgcgcataattaccagccaccccctccaccatatatccacgctcccgctccgcatccgccgcaccacgcttaccaacaccatcaggaagtacaaatcgtacctcctccacccccaccaccacaccagcaacaccaaaacatcccccatgccccaaagcaggaagacttcgccgatcaaccatatcgcggagtcattcacatgataacaggggggtccagcactgacttcgacaccaagcggcagaagcgggaccactaccgcagcatcaaccatgtcgcggtcactggcccagtcgtgcagacgaagtggtcccacataccgctaaccttcgatgcacgagacatcgacctgcgcagcgccccccacatcgacgctatggtcatcaattgcagcgtggcaggctgggacttacacaaagtcctagtcgacaacggcagtcaggcggatatcatcttcctccacgctttcgaccgcatgggtataagccacagcctgctcaagccttcggacaatccgttgtatggcttcggcggcaaaggcacctttcccgttggcaaaatagagctgcccctctccttcggtgtagcacccaatgcccgaagtgagcaagtaaccttcgacattgtcgacatggtatatccgtacaacgccatcatgggccggggctccatcaataagttcgaagctgccatccacggactgtacctatgtatgaagataccaggtccgctaggcgctatcacaatctacggcaaccagcagacggcgcgcaacatagagcgggacttcgtgtctggtcagaggaacgcacactgtctcacgacccagcgcgaggtccccgcgcccgccagcccaaccgataagcaacacgacaaggcacagttgcagagccaagacgggaccaagactgtcccccttgatcaggccacacccaagcagacagtcactatcagcgaagaccttacatcacatgaagaagagaagcttctctgctgcctggccaagaacaaagatgtcttcgcctggtccgctctagacctggtcggagtcagccgatccataattgagcacagcttgggaattgacccttcggtgcgcccaaaaaagcaaaggctccgcaaaatgtccgacgaaaagacggaggccgccaaggcggaagtgcaccgcctcctagaagctaaattcatcgagccagtggcttaccccacgtggctctctaatgtcgtaatggtgcagaaaaaaagcgggaaatggcgaatgtgcatagacttcaccagtctcaataaggcctgcccgaaggacaatttcccgttgccgcggatcgacaaaatagtcgatagcgcggccggatgtgaggtcatgtcactccttgactgcttctccggctatcaccagatatacatgaaggaggaagacaaggctagcaccagctttataacacccttcggcacttattgcttcatcaggatgccggagggactcaagaatgcagggtccaccttctccagactcaccaaaacagtactcgaagggcaggttggcagaaacatatttacatatgtggacgacatcgtcgtcgccagcaagaataaggaggaccatctcgccgacctcgccgagacattcgcgaacatgcgagatgcacgactccgcctgaacccggaaaagtgcgtcttcggtgttcgccagggcaagatattgggttacctggtgtcacaccgcggcatcgaggccaacccaaccaagatccaggccatcgtcgacatgtcgcctccacagtccgccagggacgtccagcgtctgacaggcagattggccgctctcaacagattcatctccaggtccgccgagcgaagtctccccttcctcaaaacactccgcggtgcgaaagacttcgcctgggggccggagcaagcagcggccttcgcctcactaaaacagtacctgtcggagctggccatcctcacaagccccgagtcctcgctccccctactgctctatgtcgcggcttcgccgcacgcggtcagcgcggcactagtgcaggagcagacagttgagggcgcagtcagacagtgccctgtttactatgtctccgaagtcctgacaccgtccaaatgcaacatgacagagctggagaagatcgcctacgcagttgttatgtcctcgcgcaaactgcgccattactttgaagcattcaaggtccgagtcaactcagacagggggctcggcgaactattcagaaacccggaggcatcggtgaggattgccaagtgggcagccgaactctccggctaccacatcagcttcgagcccaggacggccatcaagtcacaagtcctggcagacttcatcgtcgactggactgggccaataacacagccggacccgtccacagagaaggtttggaccatccattgcgacggcgcatggtgccatgcgggggcaggcgtcgctgcagtcgtcacctcaccagccggagtcaaacacagatatgcagcacgcctcagcttcgctctggaatccgacaaatgcacaaacaatatagaagagtatgaagcggttatcctcggcctccgcaagctaagggccctcggagtcaccacatgtatcatcaagactgactccaagatagttgccggccagatcgagaaagactatgcagcaaaagaccccgcgctcatgcaatacctcgcggctatccgaagtctcgagagacagttcaagggattcaccttgcagcatgtggatagggccaagaacgaggaggccgattcattggccaaggctgccgccaggggcgagcccttgccctccgacgtgttctttcacaccatcggcacgcctgccgtcagcagccccgaagggctccaaataactaatgatagcgagggccaccgcatagggtactatcatccaaccgacgtcagcgaggccaagcgcctcaaacatcgaagccgggacttcgcactgatcgagggccagctctacaagaaaggggtcagtcagccaatgctcaagtgcgtcaccgaaaccgaaggcatgcagatcctacgtgaagtacacagtggcatgtgcggctcgcacgcagggccaagggccctagctgccaaggtgatccgccaagggttttactggcccgcaatgatctgcgccgcaaatcgggtctcaaggtcctgcgaagcctgccagaagttctctcctcggtcaggcaacccctcgcagtatacaaagctgattgcccatacatggcctctccagcgctggggcctagacattgtcgggcccctgcccaccgcccaggggaaccttaagttcgccttcgtagccgtcgaatacttcaccaaatggatcgaagcgagggctgtttctacaataacatcaaagactgcccagaaattcttctggcaaaacattgtttgccgctttagagtaccatccgagctaacagtcgacaacggcaagcagtttgacagccaagatttcaaggatttttgtttttccatcggcaccaagcttgccttcgcttcagtctatcatccgcagtccaacggggtcgtggagcgcgccaatgggaaaatcttcacagctgtcaagaaaatgctcctcgatgaaaaaaaaggcagatggaccgatttattacctgaggcagtctgggcgctaaacacaactgagtgcagggcgactgggtttactcctttccgccttctatacggatcggaggccatgaccccgcaagaaataaagcatgggtccccgcgtacagttccgtcagccgtccccgacgtggacgagccaacttcaaaagatctcattgacggagaccgggtcttcgccctacaggccctaaacaaataccaagcccagaccaaagcatggcgcgaccacgcagtcatcccgagggagttcagcgaaggggacctcatactcgtccgaacagctcggacggagtccaggggaaagctggagcccaagtgggagggccccttcatagtcaagacaaaagcatcccccagcgcctacaggctcacaacgccaaacggcgaggacctggagcactcctggaacatcgacaacctccgaaaattttttgtctga

SEQ ID NO: 87925 - DNA, 4821 bp, Zea mays
  Clone ID: MRT4577_180187C.1
atggcacccaagagagctaacccgaaggctgacgaggctgcgaaggcagcactgctggccgcgagaaagggcaaggccctcgccctcacccaatccacccaccaagagcccactgaagacaacattccccgcacctacgaagacgacaccttccgcacctgcgggcccgaaggacaatcgcagccgcccccaggcttcgccccactggagggcgcggatctcaccgaggacggcgaagtcctcggcgtctcaacagaagaacagttacagctgcgcgccctgcgcctcaagaaccgcaatctccagaggcagaaagagatactcgaagccaagcgccagcgtgtgtccgcactagccaaggtgcggcaaatgatacgcgacgaggagaagaaggcccaagacctcgagcgcgagatcgcgctgatgcagcgcgaaggccacctcggtccacagcaagagccacccctccagcagcgcgcgcaaccggaagacatgcgcgaaggccaccgcggcctgcagcatggcccacccctgcaacaccgggcgcagccggagaacccgtgtttcccccagcatgactacgccttccagcacggcgcgccattccaaggggtcaactacctcgacgagcgaagtcccctggcgccacacctccaagtgacgccttggccagctaacttccgagcaggggcatatcccaagtacaacggcagcaccgatccggcgcaatacataatgagttatcaagtcgccgttgcatccgtcggaggggacgacgccacaatggcgaagtctttcatcatcgccctagagggcccagcactcacctggttcaccagattgcctccgctgtccattgattcgtggagaagtctcagggacaagttccttctcaacttccaagggtaccgcccagacaccgacgctttggccgagctctcgctttgcaaacagctggaaaaggagactctgcgggagtattaccgtaaattcttaacactcaagtcacagctgccctccgtcgatgatcagatcgctatccactacgccatcagtggccttcgggccggcgtcctctacagccactgtatcagagatccacccaagaacctccaggagctatatcagctctttgaaaaatacgccaaatccgaagagctccaccagcgcaaggttgagtcacagcggaagcccaaagatgccccgcagtccagccgcacgtggacgaggactccgcaaccagactccggggggtccagcactgacttcgacaccaagcggcagaagcgggaccactaccgcagcatcaaccatgtcgcggtcaccggcccagtcgtgcagacgaagtggtcccacataccgctcaccttcgatgcacgagacgtcgacctgcgcagcgccccccacatcgacgctatggtcatcaattgcagcgtggcaggctgggacctacacaaggtcctagtcgacaatggcagtcaggcggacatcattttcctccacgccttcgaccgcatgggtataagccacagcctgctcaagccttcggacaatccgttgtatggcttcggcggcaaaggcacctttcccgtcggcaaaatagagcttcccctcttcttcggtgtagcacccaatgcccgaagtgagcaagtaaccttcgacattgtcgacatggtatatccgtacaacgccatcatgggccggggctccatcaacaagttcgaagctgccatccacggactgtacctatgtatgaagataccaggtccgctaggcgctatcacgatctacggcaaccagcagacggcgcgcaacatagagcgggacttcgtgcctggtcagaggaacgtacactgcctcacgacccagcacgaagcccctgcgcccgccagcccaaccgacaagcagctcgagaaggcacagttgcagagccaagacggaaccaagactgttccccttgatcaagccacgcccaagcagacagtcactatcagcgaagaccttacgtcacatgaagaagagaagcttctctgctgcctggccaagaataaagatgtcttcgcctggtccgccctagacctggtcggagtcagccgatccataattgagcacagcttgggaattgacccttcggtgcgaccaaaaaagcaaaggctccgcaaaatgtccgacgaaaagacagaggccgccaaggcggaagtgcaccgcctcctagaagctaaattcatcgagccagtggcttaccccacgtggctctccaatgtcgtaatggtgcagaaaaaaagcgggaaatggcgaatgtgcatagacttcaccagtctcaataaggcctgcccgaaggacaatttcccgttgccgcggatcgacaaaatagtcgatagcgcggccggatgcgaggtcatgtcactcctcgactgcttctctggctatcaccagatatacatgaaggaggaagacaaggctagcaccagctttataacacccttcggcacttattgcttcatcaggatgccggagggactcaagaatgcggggtccaccttctccagactcaccaaaacagtactcgaaggacaggtcggtagaaacatatttacatatatggacgacatcgtcgtcgccagcaagaataaggaggaccacctcgccgacctcgccgagacattcgcgaacatgcgagatgcacgactccgcctgaacccggaaaagtgcgtcttcggtgttcgccagggcaagatattgggttacctggtgtcacaccgcggcatcgaggccaacccaaccaagatccaggccatcgtcgacatgtcgcctccgcagtccgtcagggacgtccagcgtctgacaggcagattggccgctctcaacagattcatctccaggtccgccgagcgaagtctccccttcctcaaaacacttcgcggtgcgaaagacttcgcctgggggccggagcaagcagcggccttcgcctcattaaaacagtacttatcggagctggccatcctcttaagccccgactcctcgctccccctattgctctatgtcgcggcttcgccgcacgcggtcagcgcggcactagtgcaggagcagactgttgaaggcacagtcagacagtgccctatttactatgtctccgaagtcctgacaccgtccaaatgcaacatgacagagctggagaagatcgcctacgcagttgttatgtcctcgcgcaaactgcgccattactttgaagcattcaaggtccgagtcacctctgacagggggctcggcgaactattcagaaacccggaggcatcggtgaggattgccaagtgggcagccgaactctccggctaccacatcagcttcgagcccaggacagccatcaagtcgcaagtcctggcagacttcgtcgtcgactggactgggccagtagcacagccggacccgtccacagaaagggtctggaccatccattgcgacggcgcatggtgccacgcgggggcaggcgtcgctgcagtcgtcacctcaccaaccggagtcaaacacagatatgcaacccgcctcaacttcgcgctggaatccgacaaatgcacaaacaatatagcagagtatgaagcggttatcctcggcctccgcaagctaagggccctcggagtcaccacatgtatcatcaagacagactccaagatagttgccggccaggtcgagaaagactatgcagcaaaagaccccgcgctcatgcaatacctcgtggctatccgaagtctcgagagacaattcaagggattcaccctgcagcatgtggatagggccaagaacgaggaggccgatgcattagccaaggccgccgctaggggcgagcccctgccctccgacgtgttctttcacaccatcggcacgccagccgtccggagccccgaagggctccaaataactaatgatagcgagggccaccgtatagtcaacctaatcatgaccgaagactggcgggcaccaataaccctgttcctacaggggtactatcatccaactgacgtcagtgaggcaaagcgcctcagacatcgaagccgggacttcgcactgattgagggccaattatacaagaaaggggtcagtcagtcaatgcttaaatgcgtcaccgaaaccgaaggcatgcagatcctacgcgaagtccacagtggcacgtgcggctcgcacgcagggccaagggccctggctgccaaggtgatccgacaagggttttactggcctgcaatgatctgcgccgcaaatcgggtcacaaggtcctgcgaagcctgccagaagttctctcctcggtcaggcaacccctcgcaatatacaaagctgattgcccatacatggcctctccagcgctggggcctggacattgtcgggcccctgcccaccgctcaggggaaccttaagttcgccatcgtagccgtcgaatacttcaccaaatggattgaagcgagggctgtttccacaatcacatcaaagactgcccaaaaattcttctggcagaacatcgtttgccgcttcggagtaccgtccgagctaacagttgacaacggcaagcagttcgacaaccaagattttaaggatttttgtttctccatcggcaccaagcttgccttcgcttcagtctatcatccgcagtccaacggagtcatggagcgtgccaatgggaaaatcttcacagctgtcaaaaagatgctcctcgatgaaaaaaaggcagatggaccgatttattgccggaggcagtctgggcgctcaacacaaccgagtgcagggcgaccgggttcactcctttccgccttctatacggatcggaggcaatga

SEQ ID NO: 87926 - DNA, 4896 bp, Zea mays
  Clone ID: MRT4577_180188C.1
atggcacccaagaaagctaactcgaaggctgacgaggctgcgaaggcagcactgcttgccgcaaaaaagggcaaggcccttgccctcacccactccacccaccaagaggctactaaagacgacgttctccacacctgcgaagacgacgctctccgcacctgcggccttgaaggacaatcgcagcctcccccaggctttgccccaccggagggcgcgaacctcactgaggacagtgaagtcctcggcgtctcagcggaagaacagctacagctgtgcgccctgcgcctcaaaaaccgcaatctccagaggcaaaaagagatattggaggccaagcgccagcgcgtgtccgcactagccaaggtgcggcaaatgatacgcgatgaagagcagaaggcccaggacctcgagtgggagatcacgctgatgcagcgcgcaggccacctcggcctgcagcacgggccacccctgcaacagcgcgcacaactggaaggcatacgcgaaggccacctcggcccgcagcatgggccacccctgcaacagcgcgcgcaaatggaagacccacacttcccccagcgcgaccacgccttcccacacgccgtgccattccaaggggtcaactacctcgacgagcgaagtcccctggcaccacacctgcaagtgacaccctggcctgccaacttccgggcagggacctatcccaagtacaacgacagcatggacccagcacagtacatcatgagctatcaggtcgccgttgcatcttccggaggggacgacgccacgatggccaagtctttcatcatcgccctcgaaggcctagctctcacctggttcaccaggttgcccctattgtccattgactcctggagaagcctccgggacaaattcctgctcaacttccaagggtaccgcccagacaccgacgccttggccgaactctcactctgcaagcagctggaaaaagagactctgcgggagtattaccgcaagtttctaacactcaagtcacagctgccctcagttgatgaccagatcgccatcaactacgccatgagtggccttcgcgccggcgtcctttacagccactacatcagggacccacccaagaacctccaggaattatatcaactttttgaaaaatatgccaaatccgaagaactccaccagcgcaaggttgagtcccagaggaaacccaaagatgctccacagtccagtcacacgtggacgaggactccgcagccagactccggtcgagacggccgcaatcagcagcaagtgcacaacatcgccaaccagcaccccgctgctgacgccctcgccgccaggagtatccccccagggccgcggaaacagaactcgcgagactatccagaaacgaaggccaccaaagacaggatggcacgggcacagccagccgacaaccctagagttgtcgcgcacacttatcagcaaccccctccaccatacatccacgctcccgccccgcatccaccacaccacgcataccaacaccaccaggaagtacaaatcgtacctcccccacccccacctccacaccagcaacatcagaacatcccccacccccacgccccaaaacaagaagacttcgccgatcagccgtatcgcggagtcattcatatgatcactggggggtccagcaccgacttcgacacaaagcggcagaagcgggaccactaccgcagcatcaaccacgtcaccatcaccggcccagtcgtgcagatgaagtggtcccacgtaccgctaaccttcgacgcacgagacgtcgacctgcgcagcgccccccacatcgacgccatggttatcaactgcagcgtcgcaggctgggacctgcacaaagtcctagtcgacaatggtagtcaagcagacatcattttcctccatgccttcgaccgcatgggcataagccacaacttgctcaagccttcggacaacccattgtatggtttcggcggcaagggcacttttcctgtcggcaaaatagagctgcctctctccttcggtgtagcacccaatgcccgaagtgagcaaataacctttgacatcgtcgatatggtgtatccgtacaacgccatcatgggccgaggttctatcaacaagtttgaggcagccattcacggactgtacctgtgcatgaagataccaggtccgttaggcgccattgcggtctacggcaatcaacagactgcgcgcaacatagagcgggacttcgtccccagacaaagaaacgtgcactgcctcacggcccagcgcgaggtcccagcgtccgtcaacccaaccgacaaagagcacgacaaggcacagctgcagagcaacgacgggaccaagactgttcccctcgatcaggccacgcccaagcagacagtcactatcagcgaagacctcacttcgcatgaagaggagaaactcctctgctgcctgtccaagaacaaagatgtcttcgcctggtcagccctcgacctggtcggggtcagccgatccataattgagcacagcttgggaatcgacccttcggtgagaccgaaaaaacagcggcttcgcaaaatgtccgacgagaagacagaggccaccaaggcagaggtacaccgcctcctggaagccaaattcatcgagtcggtggcttaccccacgtggctctccaacgttgtgatggtgcagaaaaagagcggcaagtggcgaatgtgcatcgacttcaccagtctcaacaaggcctgcccaaaggacaacttcccgttgccgcggatcgacaaaatagtcgatagcgcggccggatgcgaagtcatgtcactcctcgactgcttctccggttaccaccagatatacatgaaggaggaagacaaggctagcaccagctttataacacccttcggcacatattgcttcatcagaatgccggagggactcaagaacgccgggtccaccttctcccggcttaccaaaacagtgctcgaagggaaagttggcagaaatatattcacatatgtggacgacatcgtcgtcgccagcaagagcaaggaggaccatctcgctgacctcgccgagacattcgcgaacatgcgagacgcacgacttcgcctgaacccggagaagtgtgtcttcggcgttcgccaaggcaaaatattgggctacctggtatcacaccgcggcatcgaggccaacccaaccaaaattctggccatcatcaacatgacgcctccgcagtccaccagagacgtccagcgcctgacgggcaggttggccgcccttaacagattcatatccaaatccgctgagcgaagtctccctttcctcaaaactctccgtggcgcaaaagacttcgcttggggaccagagcaggtagcggccttcgcctcattaaaacagtacctgtcggagttggcagtccttacaagccccgactcttcgctacccctgttgctctatgttgcggcttcgccacaagcggtcagcgcggcactagtgcaggagcagacagttgagggcgtgatcaggcagtgcccagtttattacgtctccgaagtgctgacacggtccaaatgtaacatgacagaactggagaagattgcctacggagttgttatgtcttcgcgcaaattgcgccattattttgaagcattcaaggtccgagtcacctcagacaggggactcggtgaattgttcagaaacccggaggcatcggtgaggattgccaagtgggcggccgaactctccggctaccacatcaatttcgagcccaggacagccatcaagtcacaagtcctggcagacttcgtcgtcgactggactaggccaataacacagccggacccgtccgcagagaaggtttggacgatccactgcgacggcgtgtggtgccatgcgggggcaggcgccgctgcagtcatcacctcacctgccgaggtcaagcacagatacgcagcacgcctcagcttcgctctagaatctgacagatgcacaaataacatagcagaatacgaagtagtcatcctcggtctccgcaagctaagggcccttggggtcaccacctgcatcatcagaacagactccaaggtagttgccggccaagtcgagaaagactatgcagcaaaggaccccgcacttatgcaatacctcgcggccatccgaagtctcgagagacaattcaagggattcaccttgcagcatgtggaccgggccaagaatgaagaggccgatgcactggccaaggctgccgctagaggcgagtccctgccctccgacgtgttctaccatgtcatcggcacgccagccgtccggagccccgaagggctccaaataaccaatgacagcgagggccaccgcatagtcaaccttattatgaccgaagactggcgggcaccaataaccctgttcctacaggggtactaccacccaaccgacatcaacgaggccaagcgcctcaaacatcgaagccgggacttcgcactgattgagggccaactctacaagaaaggggtcagtcagccaatgctcaaatgtgtcactgagaccgaaggcatccaaatcctgcgcgaagtccacagtggtacttgcggctctcacgcagggccaagggccctagccgcaaaggtgatccgccaaggtttctactggcccgcaatgatctgcgccgcaaatcgggttgcaagagtaccgtccgaactaacagtcgacaacggcaagcagtttgacagccaagacttcaaggatttttgcttctccatcggcaccaagcttgccttcacctcagtatatcacccgcagtccaacggcgttgaggaacgcgccaatggaaaaattttcacagctgtcaaaaagatgctcctcgacgaaaaaagggcaagtgggccgatttgctatctgaggcggtctgggcgctaa

SEQ ID NO: 87927 - DNA, 434 bp, Zea mays
  Clone ID: MRT4577_180189C.1
tccgcaatttccgggcgcgcggcggggggaaggcgaaggcgaggagacgcatgggcgagaggcgggtgcggttcgcggccgacgtcgtcgacaatgagggcgcgacgcgcccggtcaggttcttcccgcccgcgccgtcgtcgtcggcggccacgtgtggggacgcggcgcggtcggaagaccccatgatgcctgccaaccgggaggcgctctaccgcggcatgctccgcgaccgctccacgcaccgggtcacctgctcctactgaccctgacgctcaccgccggagagctcgtttgttcgttgcctctcttcgtttcgtttgttcgttcgctcgccgttagcgttcggtcggtaggcaggctgttaacttcggaggttcatcctcttgctgacggaagattttgttaatggaatttttagtactgtttttttt

SEQ ID NO: 87928 - DNA, 347 bp, Zea mays
  Clone ID: MRT4577_18018C.1
cccctaaaatattattactggccctgggaaagtgtaaaactttacaagggggtcagattttaatccggttccagcgatagcttttagggttttttatttttataaatggcttttccaacactaatttgaatagctgcagcagttgaaactgtttacccagccgttgaacatttttttttttcgccgactggggtgtaaaggtaactttgggtcaaggcccgaaaaagtcaaaaggctagggaccccgagtagggggtggcctacggggagcctttttgcggggggctttaaaagccttttttgcccccgcctttgcctaacgggaatataatagcagcttttccggg

SEQ ID NO: 87929 - DNA, 4869 bp, Zea mays
  Clone ID: MRT4577_180190C.1
atggcacccaagaaagctagctcgaaggctgacgaggctgcgaaggcagcactgctggccgcaaggaagggcaaggccctcgcactcacccactccactcaccaagaggctgctgaagacaacgccctccgcacctgcggccctgaaggacaaccgcaacttcccccaggctttgccccaccggaaggcgcggacctcaccgaggacggtgagaggcaaaaagagatactagaggccaagcgccagcgcgtgtctgcactagccaaggtgcggcaaatgatacgcgacgaagagcagaaggcccaggacctcgagcgggagatcgcgctgatgcagcgcgaaggccacctcggcctgcagcatgggccacccctgcagcaccgcgcacaagtgaaagacacacgcgaaggccaccgcggcctgcagcatgggccacccctgcagcagcgcgcgcaggcggaagacccgcacttcccccagcgcgactacgcctttgcagccgtcgcgccatttcaaggggtcaactacctcgacgagcgaagtcccctggcgccacatctgcaagtgacaccttggcctgccaacttccgggcagggacctatcccaagtacaacggcagcacggaccctgcacagtacatcatgagctatcaggttgccccgctgtccattgactcctggagaagcctaagggacaaattcctgctcaacttccaagggtaccgcccagacaccgacgccttggctgaactctcactctgcaagcagctggaaaaagagactctgcgggaatattaccgcaagtttctaacactcaagtcacagctgccctcagttgatgaccagatcgccattcactacgccatcagtggccttcgcgccggcgtcctttacagtcattgcatcagggacccgcccaagaaccttcaggagttatatcaactatttgaaaaatacgccaaatccgaagagctccaccagcgcaagcaacaacaaaacatcccccacccccatgcccccaagcaagaagacttcgccgatcagccgtatcgcggagtcattcatatgatcactggtgggtccagtgtcgacttcgacaccaagcgacaaaagcgggaccactaccgcagcattaaccacgtcgccatcaccggtctagtcgtgcagacgaagtggtcccatgtaccgctaacttttgacgcccgagacgtcgacctgtgcagcgccccccacatcgacgccatggtcatcaactgtagcgtggcaggctgggacctgcacaaagtcctcgttgataatggcagccaggcagacatcatattcctccatgccttcgaccgcatgggcataagccacaacttgctcaagccttcggacaatccattatacggcttcggcggcaagggcacttttcctatcggcaaaatagagttgcccctctccttcggtgtagcgcccaatgcccgaagtgagcaaataaccttcgacatcgtcgacatggtgtatccatacaacgctatcatgggccggggctccatcaacaaatttgaggcagtcattcacggattgtacctgtgcatgaagataccaggtccattgggcgccatctcggtctacggcaatcagcagaccgcgcgcaacatagagcgggacttcgtccccgggcaaagaaatgtccactgcctcacggcccagcgcgaagtcccagcgcccgccagctcaactgaaaaacagcacaaggcgcagctgcaaagcaacgacgggaccaagattgtccccctcgacctagccacacccaagcaaacagtcacgatcagcgaagacctcacctcgcatgacgaggaaaagctcctgtgctgcttgtccaagaacaaggacgtcttcgcttggtcagccctcgacctggtcggggtcagccggtccataattgagcacagcctgggaatcgacccctcgaaaaagagcggcaagtggcgaatgtgcatagacttcaccagcctcaataaggcctgcccaaaggacaacttccctttgccccggatcgacaaaatagtcgatagcgcggccgggtgcgaggtcatgtcactcctcgactgcttctctggttatcatcaaatatacatgaaggaggaggacaaggccagcactagcttcataacacccttcggcacatattgctttatcagaatgccggagggactcaagaacgccgggtccaccttctcctggctcaccaaaacagtgctcgaagggcaagtcggcagaaacgtattcacatacgtggacgacatcgtcgtcgccagcaggaataaagaggaccatctcgcagacctcgccgagacattcgcgaacatgcgggacgcacggctttgcctcaaccccgataaatgcgtcttcggtgtccgccaggggaaaatattgggttatctggtatcgcaccgcggcatcgaggccaacccaaccaaaatccaggccatcatcaacatggcgcccccgcagtcagccagagaggtccagcgtctgacgggcaggttggccgccctcaacagattcatctccaagtctgctgagcgaagtcttcccttcctcaaaacactccgcggcgcaaaagacttcgcttggggaccagagcaggcggcggccttcgcctcgctaaaacagtacatgatggagttggccgtccttacgagccccgactcttcgctaccactgttgctctacgtcgcggcttcgccgcacgcggtcagtgcggcactggttcaggagcagacagtagagggcgtgatcaggcagtgcccagtatattatgtctccgaggtgctcacaccatcaaagtgtaacatgacgaagctcgaaaagattgcatatgcagtcatcatgtattcgcgcaaattgcgccactactttgaagcattcaaggtccgcgtcacctcagataggggactcggcgaattattcagaaacctggaggcatcggtacggattgccaaatgggcggccgaactcttcggctaccacatcactttcgagcctaggactgcgatcaagtcacaagttttagcagacttcgttgtcgactggaccgggccaataacacagctagagccgtccgcggagaaggtttggacaatacactgcgacggcgcttggtgccatgcgggggcaggcgctgctgcagtcattacctcacccgccggggtcaagcacagatacgcggcacgcttaagcttcgccctggagtctgacagatgcacaaacaacatcgcagaatacgaagctgtcatcctcggcctccgcaagttaagagccctcggcgtcaccacctgcatagtccgaacagactccagggtagtcgccggccaagtcaaaaaggactatgcagcaaaggaccccgcacttatgcaatacctcgcggccatccgaagcctcgagaaacaattcaagggattcactgtgcagcatgtggaccgggccaagaatgaagaagctgacgcattggccaaggcggccgccaggggtgaagccctcccctccgacgtgttctatcacgtcatcggcacaccagccgtccgcagccccgaagggctccaaataaccaacgacagcgagggccaacgcatgatcaaccttatcatgatcgaagactggcgggcgccaataaccctgtacctgcaagggttctatcacccagtcgacagcaacgaggccaagcgcctccaccacaaaagccgggacttcgcattgatcgagggccaactgtacaaaaagggggtcagccagccgatgcttaagtgcgtcaccgagaccgagggcgttcaaatcctgcgcgaagtccacagggggacctgcggctcccacgcaggccccagggccctggcggcaaaggtgatacgacaaggcttctactggcccgccattatctgcgctgcgaatcgggttgtcagatcctgcgaagcctgtcagaaattttccccacgctcggcgcgcccctcgcagttcacgaagctgatcgcccacacgtggccccttcagcgctggggcctagacatcgtcgggcccctgcccacggctcaggggaaccttaagttcaccttcgtagccgttgaatacttcactaaatggattgaagcgagggcagtatccaccatcacatcgaagatggcccagaaattcttctggcaaaatattgtttgccgcttcggagtaccatccgaactcacggtcgacaacggcaagcagttcgacaatcaagatttcaaagacttctgcttctccatcggcaccaagcttgccttcgcttccgtgtaccacccccagtccaacggagtcgtggagcgcgccaacgacaaaattttcacagctgtcaagaaaatgctcctggacgacaaaaaaggcaagtggcccgacctgttacccgaagtggtctgggcactgaatacaaccgaatgcaaggcgactgggtttaccccctttctcctattatacgggtcggaggccatgaccccgcaagaaataaagcatgggtcgcctcggacagccgcgtcggccgtcccagacgtagatgagccaacttcgaaggatctcatcgacggagaccgcgtcttcgccctgcaggccctggacaaataccaagcccagacaaaagcatggcgcgaccaggcagtcatcccaagggaattcagcgaaggggacctcgtcctcatccggacagctcgaacggagtccagaggcaagctggagcccatgtgggagggcccttacattgtaaagtcgaaggcctccccctgcgcatacaggcttgcaacgccaaacggcgaagacttagagcattcctggaacattgataatctgcgcaaattttttgtttga

SEQ ID NO: 87930 - DNA, 417 bp, Zea mays
  Clone ID: MRT4577_180191C.1
cggcaaaaaaaggaaaaaaacccccggtttggggcaggccaaaaaaaaaataacaactttttttggccccccaaaaaacatggaaacttcgacaaacaacagcaaaaggcaagaggtccagagcttcccggtttccccttatttcttcaaaaccccaatggcttggaacgggatgggccaaaaccctatacatttatccataaaaaacagtcgattggtaacccggacaaaggccaaaaggcattattttaagcagggcctctcctttttggaagccaggacaacatcaaggctgggggaatgggctgattttttttcacgcccgaggctgaaaaaaccgatttctcccgcctttttttccgtcctcatagaggggttttaaaccatcaagaccttccaaatcaaccaaccttaaca

SEQ ID NO: 87931 - DNA, 377 bp, Zea mays
  Clone ID: MRT4577_180192C.1
atcgcaagcttcgagctgctactggtgaaaccgaccacgtcacagagcaggaactcgatcttcgacctctctctgagcgtctccgcatcttcctcattcgtcctttccagcttctcttcggcgagctcatcgtcttccttatctccgtgtacatgagtgtcctctacggtcttctgtacatgttcttcgttgccttccctatcatttaccagaagggcaagggttactctgctggaaagactggtctcatgttcattcctgtcgctgtcggtgttctcctctcagccgcttgctctccttgggtcaacaaccactacctctcgctcgtcaagaagcacaatggtcatccccccgctgaggttcgtcttattcccatg

SEQ ID NO: 87932 - DNA, 358 bp, Zea mays
  Clone ID: MRT4577_180193C.1
aagcctctagagtcagtcgtaatatcatctggacaacgacaccaccaccggtggcgccgatgacgtggcacgcctgtccgcgcaacggctcgcactgccggatgaaatccgggtgcaagaaccagctgcggtggtcattagagttggcagactgttgaaggccgaggctgaaagccgatgacagggaagatcaggacgacggtgaccaagcggtttctggagatcgcctggatcatatctatggaggacttctcgatcacggaacgggaagcctcgctggcgcacgtgccgtctcattggactgctaagctaaccgctgactatgacgctgcagcttcagtcatgactctcttctagg

SEQ ID NO: 87933 - DNA, 495 bp, Zea mays
  Clone ID: MRT4577_180194C.1
gtacaaaagctttttctttttactttatttttttttttttttttttttgtttttattttttatttttttttttttttaatttttaaattttaatacacagtacacgggcagtaccggccccgggggccgcgccaacaaccaaacaaggagaaacaaaaagccggcccgagggaaaaccaaaaccggccccaacgccaaacaacaaaccacccacaagcccaaagcataaaacctgcagcccccaaaaacgaaaaaaacaaaaaaaaaaaaggaagagcgaaccaaccacaagacagccaaaaaaacaaaaaacccaccagcaaaaaaaaacaacccaacccccaacgaaaagaaagaaacaaatggcgcaaagagcccctaaccaaataacaaaccaccggcgcaagggggtcaggcaatcggcagccgcgaccgctcaccccaaaccgaaaggacgggcttccccaaaagccggaaacaccgcatcaaagaaca

SEQ ID NO: 87934 - DNA, 242 bp, Zea mays
  unsure (1)..(242): unsure at all n locations
  Clone ID: MRT4577_180195C.1
gcgtctcgacgaggcagcantngcaccagtcccaccaggtccggcgctctgcccanataatctcctgcgtnncccccccccaccagtggcctggccttctttgtcggacgaacgggcgccgacgaaacctcccgcgcgcnncacctcccaccccttcgannctccgacgacttcggncgccgccgcagcccgacgaccgcttagtcgccggcgggtacccgcctccttcgcnncgacggtgg

SEQ ID NO: 87935 - DNA, 201 bp, Zea mays
  Clone ID: MRT4577_180196C.1
attttaaacaaacatacctccccacccaatgcatgcattactaaatcatttcaacaaatccaacccaatctagactacctatcataggtcaccttaaactattttcattcactaaagttacaatatttgtcttaaattctgctttaaccttacaattttcagcaattacatcaccttacacggacttatagcctccctcaa

SEQ ID NO: 87936 - DNA, 445 bp, Zea mays
  Clone ID: MRT4577_180197C.1
ggccgggaaatttaaagacgggttaaaaaaaatgccggaggggaggggggggagggaaaaataaaccctgcccacaaaggattgggggggggacacaaaagaaaagacaacggggggtcacgattcaaacataacacccagcagggggggggggaaaactttggggggggccccaacccgggcattatttgccacccaacagggggcccagggaaaagccccccccaggagcagcggggaccttggttgaaggacggccccaaaggaaattgccaaggttctaaccaacaaccctgggggagttattgggtgggggggaaaccccaaaagaaacctggttggccgaataaatttttggagaaaaggggttttaaacagggggagcacttgcagctggtgccactgctggttgggggggctcaccgcttccaaaaagataacccaa

SEQ ID NO: 87937 - DNA, 357 bp, Zea mays
  unsure (1)..(357): unsure at all n locations
  Clone ID: MRT4577_180198C.1
ccggccgggttttacatcaggggggcgcgcttccagccgtttttcccgcgtcngcctcgcccagcgcagcagccgccgcagcacatcgctatctcgatctcanccatggcgnaggtgcagcagcaacaggacacgncctaagctgctcaaccgctggaccttcgatgatgcccagctgaatcacctctcgctgcaagactacctcgctgtgaacgcgacgaagcacgcgatgcacctgccgcacatcgcgggtctgccactccaagaagcngttccgcaaggcgcagagcccgatcgcccagcgtctctccaactccatcatgatgcacggcagcnacaacgaccaacagcctcatg

SEQ ID NO: 87938 - DNA, 373 bp, Zea mays
  Clone ID: MRT4577_180199C.1
agggcttattgttggaaaggcgaaatgggctagggcttatacttaataggactctttcatagcataaagttttaaaaacagaataagtgcacgggatgatctagaacgtgttataatcataagtgcacaaagcattgcttattagattcaaaatatgcctatgacttacgacattcatactttggaataatgaccaacaagacgtatacaaagtgtgcctcaacgcctattccaacacctagtgcagtgggcttggctgtttattatcaactaatgcgatctaccagttgaggcacagggacatccacaggagcaggggccacactttgatcctaaccttcaccaggtggaaccggagctggggcatcatctt

SEQ ID NO: 87939 - DNA, 545 bp, Zea mays
  Clone ID: MRT4577_18019C.1
ccggccgggttattttgtcacttgctaaattaacttgttgttgcctcccagggtggttctggttctgttggggtttaatttctgtcattcaattacatgctatgttcagtttatatgttgcttcagtcagttgaacttcagcatattatttattgacctgtgtaatgtaatgtatcaacttatcttctagttcaataaattctggaatttctgaaaaaaaaaaaaaaaaaaaaaaaaaaaaaaaaaaaaaaaaaaaaaaaaaaaaaaaaaaaaaaaaaaaaaaaaaaaaaaccccaaaaaaaaaaaaaaaaaaaaaaaaaaaaaaaaaaaaaaaaaaaaaaaaaaaccccccccttggttggcctttttttttccccccccccttttggggggaaaagggggcccccccccccccactttttttttacccttttttcccccccccaaaaagaaaactttttttttgggggaaatttttttttttcccccccctcaattttccccggggggccccccggggtcccccccccaattttccggccccc

SEQ ID NO: 87940 - DNA, 350 bp, Zea mays
  Clone ID: MRT4577_1801C.1
ggggaaaaactatgcccggcctaacaattttttgaaaagctttattacatgttcatcgagtcgcaactcgtaacaccgggtttaaccagcaaggggggcccccatacaggggaaataacctttggcccccagaggaggttttaagagcctaaaaccaggaccttttttgggcctacaaacatccaaaggtccatgctcgaaatgtcatgagcagaaggggtgtttggttacatcgaaaaaacacccctctgggggcttaaagatggctccaaaagggttccagaagcccacctttttaggaggggcagagcagccttcggttgatccataggtcccatgggaccagcatc

SEQ ID NO: 87941 - DNA, 186 bp, Zea mays
  Clone ID: MRT4577_180200C.1
ccaacccatccctactcaatctgccaatttacatgctccacaattacatacagtgccctttttaaagtttcaactaatatcactccacttaacctcattatacaaccctataatcttcacacccatttaattcaataacctcgttactcctaactaaatcctctttaaacctattctcttaataac

SEQ ID NO: 87942 - DNA, 829 bp, Zea mays
  Clone ID: MRT4577_180201C.1
catcggccaggaaccagcagcggcaggaacaaggcaggcgatccgaagaaaccaaccttgctatcatcgccggcctaatatcaaccccctgttttacccctggccacggcagtcgtccagctggtttgcctcccacacaaagggtaaaacggccggaacgctaaaatctcacccctccgcttggaagttggaacccatcgccgcctccatcgctacacaccacgacgcagcgcccgattccgccggccagcaacgatgcagagctccctcgcccggccgccggtactggccggatgcggcgagagacggggcctggcagccgtggcacggtgccgcgctgaggcggcggcgcccgtgtggacggcgtccagggcgcctgtggggccgtacaccgggagggacccggaggtgaagaagcccgcgtggctgcggcagcgcgctgcgcagggggagaagtacgctcgcctgcgggagtccatcggcgagctcaagctcaacaccgtctgcgtcgaggcacaatgccccaacatcggcgagtgttggaacggaggtggaggggccggcggcgaaggggacggcatcgcgacggccaccatcatggtgcttggtgacacctgcacgcgcgggtgtcgattctgcgctgtgaagaccagcaacaaaccgccgccgcctgatcccctggagcctctgaacacggctttggctgttgcaagctggggagtagattatgttgtgctaaccagtgtcgatagagatgacttacctgatgggggaagtagccattttgctcagacagtgaaagctttaaaggagctccttatcggaatac

SEQ ID NO: 87943 - DNA, 3474 bp, Zea mays
  Clone ID: MRT4577_180202C.1
atggcacgggcgcaaccagccgacaaccccagagttgtcacacacacttaccagcaaccccctccaccatatatccacgcccccgccccgcatccaccgcaccacgcttaccaacactatcaggaagtacaaatcgtacctcccccacccccaccaccacaccaacaacatcaaaacatcccccatgctccaaagcaggaagacttcgccgatcagccatatcgcggagtcattcacatgataactggggggtccagcactgacttcgacacaaagcggcagaagcgggaccactaccgcagcatcaaccacgtcgctgtcactggcccagtcgtgcagacaaagtggtcccacataccactaaccttcgacgcacgagacgtcgacctgcgtagcgccccccactatgacgccatggttatcaattgcagcgtggcaggctgggacctgcacaaagtcctagttgacaacggcagtcaggcggacatcgtcttcctccacgccttcgatcgcatgggcataagccacagcttgctcaagccttcggacaacccgttgtatggcttcggcggcaagggcacctttcctgtcggcaaaatagagctgcctctctccttcggtgtagcacccaatgcccgaagtgagcaagtaacctttgatattgtggatatggtatatccatacaatgccatcatgggccggggctccatcaataagttcgaagcagccattcacggactgtacctatgtatgaagataccaggtctgttaggcgttattacggtctacggcaatcaacagactgcgcgcaacatagagcgggacttcgtgcccggtcagagaaacgtgcactgcctcacggcccagcgcgaggtccccgcgcctgccagcccaaccaataagcagcacgacaaggcacagctgcagagcaacgacgggaccaagactgtccccctcgaccaggccacgcccaagcagacagtcactatcagcgaagacctcacttcgcatgaagaggagaagctcctctgctgcctatccaagaacaaagatgtcttcacctggtcagccctcgatctggtcggggtcagccgttccataatggagcacagcttgggaatcgacccttcggtgaggccgaaaaaacagcggcttcgcaagatgtccgacgagaagacagaggccgccaaggcagaagtgcaccgcctcctagaagccaaattcatcgagccggtggcttaccccacgtggctctccaatgttgtgatggtgcagaaaaagagcgggaagtggcgaatgtgcatcgacttcaccagtctcaataaggcctgcccaaaggacaacttcccgttgccacagatcgacaaaatagtcgatagtgcggccggatgcgaagtcatgtcactcctcgactgcttctccggttaccaccagatatacatgaaggaggaagacaaggctagcaccagctttgtaacacccttcggcacatattgcttcatcagaatgccggagggactcaagaacgccgggtccaccttctccaggcttaccaagacagtgctcaacgggcaggttggcagaaatatattcacatatgtggacgacatcgtcgtcgccagcaagagcaaggcggaccatctcgctgacctcgtcgagacattcgcgaacatgcgagacgcacgactccgcctaaacccggaaaagtgcgtcttcggcgttcgccaaggcaaaatattgggctacctggtatcgcaccgcggcatcgaggccaacccaaccaaaattcaagccatcataaacatgaggcctccgcagtccgccagagacgtccagcgcctgacggggagattggccgccctcaacagattcatctccagatccgctgagcgaagtctccctttcctcaaaactctccgtggcgcaagagacttcgcttggggactagagcaggcagcggccttcgcctcgttgaaacagtacctgtcggagttggcagtccttacaagcctcgactctttactacctctgttgctctatgttgcggcttcgccgcatgcggtcagcacggcactggtacaggagcagacagttgagggcacgatcaggcagtgcccaatttattacgtctccgaagtgctgacgccgtccaaatgcaacatgacagagctggagaagattgcctacgcagtcgttatgtcttcgcgcaaattgcgccattattttgaagcattcaaggtccgggtcacctcagacaggggactcggcgaattgttccgaaacccggaagcatcggtgaggattgtcaagtgggcggccgaactctccggcttccacatcaatttcgagcccaggacagccatcaagtcacaagtcctggcagacttcgtcgtcgactggactgggccaattacacaaccggaaccgcccgcagaaaaggtttggacgatccactgcgacggcgcatggtgccatgcgggggcaggcgccgcggcagtcatcacctcgccaaccagagtcaagcacagatatgcggctcgcctcagcttcgctctggaatctgacagatgcacaaataacatagcagaatacgaagcagtcatcctcggtctccgcaagctgagggcccttggggtcaccacctgcatcatcagaacagactccaaggtagttgccggccaggtcgagaaagactatgcagcaaaggaccccgcactcatgcaatacctcgcggccatccgaagtctcgagagacaattcaagggattcactttgcagcatgtggaccgggccaaaaatgaagaggccgacgcattggccaaggctgccgccagaggcgagtccttgccctccgacgtgttctaccacgtcatcggcacaccagccgtccgaagccccgaagggctccaaataaccaatgacagcgagggccaccgaatagtcaaccttatcatgaccgaagactggcgggcaccaataactctgttcctacaggggtattatcacccaaccgacatcaacgaggccaagcgcctcaaacatcgaagccgggacttcgcaccgattgagggccaactctacaagaaggggatcagtcagccaatgctcaaatgcgtcaccgaaaccgaaggtgtccagatcctacgcgaagtccacagtggtacctgcggctctcacgcagggccaagggccctagccgctaaggtgatccgccagggtttctactggcccacaatgatctgcgccgcaaatcgggtcacaaggtcctgcgaagcctgccagaagttctcccctcgatcaggcagcccttcgcaatttacaaagctgatcgcccacacatggcctctccagcgctggggcctggacatcgtcgggcccctacccacggctcaggggaaccttaagttcgccttcgttgctgtcgaatacttcaccaaatggatcgaggcaagggctgtctccacaataacatga

SEQ ID NO: 87944 - DNA, 2234 bp, Zea mays
  Clone ID: MRT4577_180203C.1
agaattgcagtttgattaatggagaacggccaatttacacagagagaaagaagacggaggaaggaaaaaggaaaaaaaaaagactgctctccattgctttcttcctccagacctctccacaccaagcgaaggatttttcttcgacgaacatcctaacataacatatttccaccaaccaacaaaatccaatgtcaatgtccgacctagcatggtggccacggccgggccaaagcaggaaaaggagaaagaattagcacggatcaatgtcgcgagttcttggatcctcccctggtgtagccgtaataggacaggtaccacttgacaaacttcttgaggccgacgtccaggttggtggtgggtttgtacccgagctgctccctggctagggagatgttggcgtgcgtgaagggcacgtcgccgttgccgggcatctcgaccacgttcttcttggccttgacgcggaggtgcttctccaggatggacaccaggttgggcaccgtaacgggagaggtgttgccgaggttgaagatcctgtagggcgccggcccgcgcttcttgccgccggtgccggtgctcttgccggccgtttccagggaggcgaggcagcccttgacaatatcgtcgatgtaggtgaagtcgcgggccaggtccacgtggtccttgccgcggtaaaccgtgatgggcttcccctgaaggatgttgcgggtgaaggagaagtaggccatgtcggggcggccccagggcccgtacacggtgaagaagcggaggccggtgatggagagtccgtagatgtggttgtacgtgtgcgtgatctcctcgccggccttcttggtggccgcgtagagtgaggccggctggtcggtgcggtcgcgctccgagaaggggaccttgtcgttgaggccgtagacggaggaggaggaggcccagacgatggccggctgcgggtcggcgtccttgcaggcctcgaggagcgtgacgaggccggcgacgttggagtgcacgtacgacgccgggttctccatggcgtagcgcacgccggcctgcgcggcgaggtggagcacgtgggtgaagggcacgacatcgaagagcttggccaggaggcggccgtcgttgatgtcgccctcgacgacgaacaccccgtgggaggcgagcagcgccctgcgcgccttcttcagcgacgggtcgtagtaggcgttgaagttgtcgacgccgaccacgccgtcgccgcgcctgcggagggcgagggagcagtgggtgcccacgaagcccgcggcgcccgtgacgagcaccgacatcccggccccggcggcggacccggggggccgcctcggcacggcggacgcgcggatctgccgctcccagtgcaggccgccccaggaggcggcgaagtacttggaggaggtgtcgacgaaggactggaagctgaggtaggacgccgtcatggcgacgaggaacagcgcccacaggaacatggtgctggtggacgcgaagcagcggtggagctgccggttcatggcgcccgcccgctcgatcttcaccttgcccggggtggaggggaagaggtcctcctccagcacccgcatcttcaacgccgccgtcttgccgtgcgacagacgcagcgcaacccgatgaacgcctctccctccttctcctcgtcgcggattctgcttcctcgacgcaacgcaagaaccacaaaagacggcgccgcggggcagagccggagacgcaagggaccaccaacccgcgccgcgctggtcggactccggctctcctcctcccttcgactgattcgctggccgattgattgattattccttgctctccctggacggatggatgtatcgaccgccggaatggtggataggtttccttgggacttgggagggcggagagcgtgcgcgccgcgagggaggagaggatgaagaggaaagggggggcaggagcttgatgcgcgcctgccgacagcgacggggcggggatataaataggggagcggggccgacagcgacgggagcgcgtgaacgcggtggcggcgcagagggtgccgccgcaggtgacgaggaggccagggaggtggccgcggcggacgggcgcacggcggcccgggattgggaggcgatcgggtccgggcggcgggcggcgcctattttggtggtcggacgcgctgggatgagatggatgggcgctgggcgaacggccggacgcgctcccggccggcttcgaggtacccaatg

SEQ ID NO: 87945 - DNA, 3174 bp, Zea mays
  Clone ID: MRT4577_180204C.1
atggcacgggcgcagccagccgacaaccccagaattgtcgcgcacaactaccagcaaccccctccaccatatatccacgcccccgctccgcatccaccgcaccacgcttaccaacaccatcaggaagtacaaatcgtacctcctccacccccaccaccgcaccagcaacaccaaaacatcccccatgccccaaagcaggaagacttcgccgatcaaccatatcgcggagtcattcacatgataacaggggggtccagcactgacttcgacaccaagcggcagaagcgggaccactaccgcagcatcaaccatgtcgccgtcactggcccagtcgtgcagacaaagtggtcccacataccgctaaccttcgacgcacgagacgtcgacctgcgcagcgccccccacatcgacgctatggtcatcaattgcagcgtggcaggctgggacttacacaaagtcctagtcgacaacgacagtcaggcggacatcatcttcctccacgccttcgaccgcatgggtataagccacagcctgctaaagccttcggacaacccgttgtatggcttcggcggcaagggcacctttcccgtcggcaaaatagagttgcccctctccttcggtgtagcacccaatgcccgaagtgagcaagtaaccttcgatattgtcgacatggtatatccatacaacgccatcatgggccggggctccatcaataagttcgaagctgccatccacggactgtacctatgcatgaagataccagaaaaaagtggaaaatggcgaatgtgcatatacttcactagtctcaataaggcctgcccaaaggaccatttcccgctgccacggatcaacaaaatagtcgatagcgcggccggatgcgaggtcatgtcactcctcgactgcttctccggctatcaccagatatacatgaaggaggaagacaaggccagcaccagcttcataacacccttcggcacttattgcttcatcagaatgccggagggactcaagaatgccgggtccaccttctccagactcaccaaaacagtactcgaagggcaggttggcagaaatatatttacatatgtggacgacatcgtcgtcgccagcaagaataaggaggaccatctcgccgacctcgccgagacattcgcgagcatgcgagacgcacgactccgcctaaatccggaaaagtgcgtcttcggtgttcgccagggcaagatattgggctacctggtatcacatcgcggcattgaggccaacccaaccaagatccaggccatcataaacatgacgcctccgcagtccgccagagacgtccagcgtctgacaggcagattggccgctctcaacaggttcatctctaggtccgccgagcgaagtctcccctttctcaaaacactccgcggtgcaaaagacttcgcctggggaccggagcaggcagcggccttcgcctcgctgaaacagtacctgtcggagttggcaatcctcacgagccccgactcctcgctccccctattgctctatgtcgcggcttcgccgcacgcggtcagcgcggcactagtgcaagagcagacggttgagggtgcggtcagacagtgccctgtttactatgtctccgaagtactgacaccgtccaagtgcaacatgacagagctggagaagatcgtctacgcagtcgttatgtcttcgcgcaagctgcgccattactttgaagcattcaaggtccgagtcacctcagacaggggactcggcgaactattcagaaacccggaggcatcggtgaggattgccaagtgggcagccgaattatccggctaccacatcagcttcgagcccaggacagccatcaagtcacaggtcctggcagacttcgtcgtcgactggactgggccaataacgcagccagacccgtccacagagaagcatgtggatagggccaagaacgaggaggccgatgcattggccaaggctgccgccaggggcaagcccttgccctccgacgtgttctttcacaccatcgacacgccagccgtccgaagccccgaagggctccaaataactaatgatagcgagggccaccgcatagtcaacctaatcatgaccgaagactggcgggcaccaataaccctgttcctacaggggtactatcatccagccgacgtcagtgaggccaagcgcctcagacatcgaagccgggacttcgcactgattgagggccaactctacaagaaaggggtcagtcagccaatgcttaagtgcgtcaccgaagccgaaggcatgcaaatcctacgtgaagtccacagtggcacgtgcggctcgcacgcagggccaagggccctggctgccaaggtgatccgccaagggttttactggcccgcaataatctgcgccgcaaaccgggtcacaaggtcctgcgaagcctgccagaagttttctcctcggtcaggcaacccctcgcagtatacaaagctgattgcccatacatggcctctccagcgctggggcctggacattgtcgggcccctgcccaccgctcaggggaacctcaagttcgccttcgtagccgtcgaatacttcaccaaatggattgaagcgagggctgtttctacaataacatcaaagactgcccaaaaattcttctggcaaaacattgtttgccgcttcggagtaccgtccgagctaacagttgacaacggcagatggaccgatttgttaccggaggcagtctgggcactaaacacaactgagtgcagggcgactgggttcacccctttccgccttctatacgggtcggaggccatgaccccgcaagaaataaagcatgggtccccgcgtatagttccgtcagccgtccccgacgtggacgagccaacttcaaaagatctcattgacggagagcgggtcttcgccctacaggccctaaacaaataccaagcccagaccaaagcatggcgcgaccacgcagtcatcccgagggagttcagcgaaggggacctcgtactcgtccgaacagctcggacagagtccaggggcaagctggagcccaagtgggagggcccctttatagtcaagacaaaagcttcccccagcgcctacaggctcacaatgccaaacggcgaggacctgcagcactcctggaacatcgacaaccttcgcaatttttttgtttga

SEQ ID NO: 87946 - DNA, 345 bp, Zea mays
  unsure (1)..(345): unsure at all n locations
  Clone ID: MRT4577_180205C.1
cccncggagttcaaacttgaatagaccgcttaattgtttatttgtatccccattatacaccctaaaagtacatcatggcgccacttggaaatacattttaaaactaccgtttaacaactttttgtcttactgaaccactgtaaaaccaaaacaggttcactcgctcttgcttttggtcttactaaacctttgtgcttacacctgtcagaacccacatatccaatatacattcatcaaccatagcaccatgttcaaaagaaaattccaaaaaataatattcgacttaaatcagacttcatcaattctataccaagcaatatcctcttatgtatgtactaaaacaaa

SEQ ID NO: 87947 - DNA, 2310 bp, Zea mays
  Clone ID: MRT4577_180206C.1
ggcggggggggggtttttttttttttttttttttttttttttttttttttttttgatggggcggaaaaggttagacttgactacctcattttgattaggctcagcacatcggaatccggaaatcgattgatggagcggaaaaggattaagatcctgtagagcgccgaccaatttacagagagaagaaagacacaggaggagaaaagagaaaaagtaaaggttgctccccattgcttttcttcctccagccctcgattgcttttcttcctccagcactctcctcccatctcctcaccaagcaaagaatttgtccccggtatttctctacttaataaaggaacaccctaacataacatatttccaccaaaaaaatcctgataagaatgtcaatgtttgatccgagagtgggtggccgcggccgggccaaagcgagaaaggaagaaggaagaattagcatggatcattgtcgcgagttcttggatcccctggtgtagccgtagtaggactggtaccacttgacgaacttcttgaggccgacatcgaggttggtggtgggcttgtacccgagctgctgcctggcgagggtgatgttggcgtgggtgaagggcacgtcgccattgccgggcatctcgaccacgttcttcttggccttgacgcggaggtgcttctccaggatggacaccaggttaggcaccgtgacgggcgcggtgttgccgaggttgaagatcctgtagggcgccggcccgcgcttcttgccgccggtgccggtgctcttgccggccgtgtccagggagccgaggcagcccttgacaatgtcgtcgatgtaggtgaagtcgcgggccaggtcgacgcggtccttgccgcggtacaccgtgatgggtttcccctgcaggatgttgcgggtgaaggagaagtaggccatgtcggggcggccccagggcccgtacacggtgaagaagcggaggccggtgatggataggccgtagatatggttgtacgtgtgcgtgatctcctcgccggccttcttggtggccgcgtagagcgaggccggctggtcggtgcggtcgcgctcggagaaggggaccttgtcgttgaggccgtagacggaggaggaggaggcccagacgatggccggttgcgggtcggcgtccttgcaggcctcgaggagcgtgacgagccccgcgatgttggagtgcacgtacgacgccgggttctgcatggcgtagcgcacgccggcctgagcggcgaggtggagcacgtgggtgaatggcacgacgtcgaagagcttggccaggaggcggccgtcgttgatgtcgccctcgacgacgaacaccccgtgggaggccagcagcgccctgcgcgccttcttgagcgacgggtcgtagtaggcgttgaagttgtcgacgccgacgacgccgtcgccacgcttgcggagcgcgagggagcagtgggtgccgacgaagcccgcggcgcccgtgaccagcaccgacatcccggccccggcggcggacccggggggccgcctcggcgcggcggacgcgcggatctgccgctcccagtgcaggccgccccaggaggcggccaagtacttggaggaggtgtcgacgaaggactggaagctgaggtaggacgccgtcatggcgacgaggaacagcgcccacaggaacatggtgctggtggacgcgaagcagcggtggagctgccggttcatggcgcccgcccgctcgatcttcaccttgcctggggtggaggggaagaggtcctcctccaacacccgcatcttcaacgccgccgtcttgccgttgccgtgcgaaggacgcagcgcgcctgtccctcctcgacgcaacgcaagcaccgcaaaaaggtgtcgccggcgcggggcaggggcggagacgcaagggatcaacccgcgccgcgctggacggactccggctctcctcctcctcctaacgtttcactggccggttgattgattattccttgctctccctggacgggaagatggatcgaccgccggaatgcttagataagtttccttgggaggcgggggagcgcgctgcgcgctccgggtccaggaaattttattcgggaaccgggaggagaggaagcaaggcaggagctggatgcgcgcctgcctagggaaagcgtggagatgggatggggcggtatataaataggggagcggggccgacagcgacgggagcgcgtgaacgcggtggcggagcagatggtgccgccgctggtgacgaggaggggcgagtggtggccgcggcggacgggcggcccgggattgattgagagacgggggcg

SEQ ID NO: 87948 - DNA, 4533 bp, Zea mays
  Clone ID: MRT4577_180207C.1
atggcacccaagaaagctagctcgaaggctgacgaggctgcgaaggcagcactgctggccgcaaaaaagggcaaggccctcgccctcacccactccacccaccaagaggctactgaagacgacgttctccgcacctgcgaagacgacactcaccgcacctgcgaagacgacgctcaccgcacctgtggccctgaaggacagccgcaacctcccctaggcttcgctccaccagagggcacggacttcaccgaggacggcgaagtcatcagtgtctctgcagaagaacaactacagctgcgcgccctgcgcatcaagaaccgcaatctccagaagcaaaaagagatacttgaggccaagcgccaacgtgtgtcagcacaagccaaggtgcggcaaatgatacgagacaaagagcagaaggcccaggagctcgagcaagagatcgcgctaatgcagcgcgaagtccactttggcctgcaacaagggccacccctgcaacagcgcgcacaattcgaagacctgcacttcccccagcgcgaccatgccatcccacacgccgcgacattccaaggtgtcaactacctcgacgagcaaagtcccctggcgccacacctgcaagtgacaccctggcctgccaacttccgggcaaggacctatcccaagtacaactgcagcactaacccagcacagtacatcatgagttatcaggtcgccgttgcatcttccggaggggacgacgccacgatggccaagtcattcatcatcgccctcgagggcccagctctcacctggttcaccaggttgcccccgctgtccattgactcctggagaagcctccgggacaaattcctgctcaacttccaagggtaccgcccagacaccgacgccttggccgaactctcactctgcaggcagctggaaaaggagactctgcgggagtactaccacaagtttctgacactcaagtcacatctaccctcggtcgatgaccaaatcgctatccactacgccatcagtggccttgggccggcgtcctctacagccactgcatcagggatccgccaaaaacctccaggagttccgtatcgcggagtcattcatatgatcactggggggtccagcaccgacttcgacacgaagcgacagaagtgggaccactaccgcagcatcaaccacgtcgccatcactagtccggtcgtgcagacaaagtggtcccatgtaccgctgaccttcgacactcgagacgttgatctgcgcagtgcccctcacatcgacgccatggttatcaattgcagcgtggcaggctgggacctgcacaaagtcctagtcgacaatggcagtcaagcagacatcatcttcctccatgccttcgaccgcatgggcataagccacaacctgctaaagcctttggacaacctgttgtacggtttcggcggcaaaggcacatttcccgtcggcaaaatagaattgcctctctccttcggtgtagcacccaatgcccgaagtgagcaagtgaccttcgatatcgtggatatggtatatccgtacaatgccattatgggccggggctccatcaacaagtttgaggcagccatccacggactttacctgtgcatgaagataccaggtccgttaggcgccatcacggtctacggcaaccagcagactgcgcacaacatagagcgggacttcgtccccgggcaaagaaatgtgcactgcctcacggcccagcgcaaggtccctgcgtctgccagcccaaccgacaaagaacacgacaagacacagctgcagagcaacgacgggaccaagactgttcccctcgaccaggccacgcccaagcagacagtcaccatcagcgaagacctcacttcgcatgacgaggagaaactcctctgctgcttgtccaagaacaaagacgtcttcgcctggtccgccctcgacctggtcggggtcaaccgatccataattgagcacagcatgggaatcgacccttcggtgagaccaaaaaaacagcggctccgcaaaatgtccaacgaaaagacagaagccgccaaggccgaggtacatcgcctcctggaagccaaatttatcgagccagtggcttaccccacgtggctctccaacgttgtgatggtgcagaaaaagagcggcaagtggcgaatgtgcatcgacttcaccagtctcaacaaggcctgcccaaaggacaacttcccgctgcctcggatcgacaaaatagtcgatagcacggccgggtgcgaagtcatgtcactcctcgactacttctccggttaccctcaaatatatatgaaggaggaagacaatgccggcaccagcttcataacacccttcgacacatattgcttcatcagaatgccagagggactcaagaacgctgggtccaccttctcccggcttaccaaaacagtgctcgagggacaagtcggcagaaatatattcacatatgtggacgacatcgtcgtcgccagcaggagcaaggaggaccatcttgctgacctcaccgagacatttgcgaacatgcgggacgcacgacttcgcctaaaccccaaaaagtgcgtcttcggcgttcgccaggggaaaatattgggctacctggtatcacaccgaggcatcgaggccaacccaaccaaaattcaggccatcatcaacatgacgcccccgcagtcagctagagacgtccaacgcctgatgggcagattggccgccctcaacagattcatctccaaatccactgagcgaagtctccccttcctcaaaacactccgcggcgcaaaagacttcacttggggaccagagcaggcggtggccttcgcctcattgaaacagtacctgtcggaattggcggttcttacaagccccgactcttcgctacccctgttgctttatgttgcggactcgccgcacccagtcagcgcggcactggtgcaggagcagacaatagagattgcctatgcagtcgttatgtcctcgcgcaaattgcgccactattttgaagcattcaaggtccgagtcacctcagataggggactcggcgaactgttcagaaacccggaggcgtcggtacggatcaccaagtgggcggccaaactctccggttaccacatcactttcgagcccaggacagccattaagtcacaagttctagcagacttcatcgtcgactggactgggccaataacacagccggacccgtccgcagaaaaagtttggacaatccactacgacggcgcatggtgccatgcgggggcaggcgctgctgcagtcatcacctcacccgtcggggtcaagcacagatacgcgacacgcttaagcttcgctctggaatctgacagatgcacaaacaacatagcagagtacgaagtcgtcatccttggcctccgcaagctaagggcccttggtgtcaccacctacattgtcagaacagactccaaggtagtcgccggccaagtcgagaaagactatgcagcaaaggaccccgcacttatgcaatacctcgtggccatccgaagtctcgagagacaattcaagggattcaccttgcagcatgtggaccgggccaagaatgaagaagccgacgcattggccaaggctgccgccagaggcgagtccctgccctccgacgtgttctaccatgttatcggcacgccagccgtccggagccccgaagggctccaaataatcaatgatagcgagggccaccgcatagtcaaccttattatgaccgaagactggcgggcaccaataactctgttcctacaggggtactaccacccaaccgacatcaacgaggccaagcgcctcaaacatcgaagccgggacttcacactaattgagggccagctctacaagaagggggtcagtcagccaatgcttaaatgtgtcaccgagaccaaaggcgtccaaatcatgcgcgaagtccacagtggtacttgcggctctcacgcagggccaagggccctagccgcaaaggtgatccgccaaggtttctactggcccgcaatgatctgcaccgcaaatcgggtcacaaggtcctgcgaagcctgccacaagttttctcctcgatcaggcagcccttcgcaattcataaaactgatcgcttacacatggcctctccagcgctggggcctggacatcgtcgggcccctgcccacggctcaggggaacctcaagttcaccttcgtcgctgtcgagtattttaccaaatggatcgaggcgagggctgtttccacaataacatcaaggactgcacagaaattcttttggcaaaacattgtttgccgcttcggagtaccgtccgaactcacagttgacaacggcaagcagtttgacagccaagacttcaaggatttctgcttctccattggcaccaagcttgccttcgcctcagtatatcacccgcagtccaacggagttgtggaacgcgccaatggaaaaattttcacagctgtcaagaagatgctcctcgacgaaaaaagggcaggtgggccgatttgttacctaaagcggtctgggcgctaa

SEQ ID NO: 87949 - DNA, 3132 bp, Zea mays
  Clone ID: MRT4577_180208C.1
atggcacccaagaaagctagctcgaaggttgacgaggctgcgaaggcagcactgctggccgcaaaaaagggcaaggccctcgccctcgtccacaccacccaccaagaggccactgaagacgacgctctccgcacctgcggctctgaaggacagccgcaacctcccccaggcttcgctccaccggagggcacggacgtcaccgaggacggcgaagtcatcggtgtctcagcggaagaacagctacagctgcgcgccttgcgcatcaagaaccgcaatctccagaagcaaaaagagatacttgaggccaaacaccaacgtgtgtctgcacaagccaaggtgcggcaaatgatacgcgacgaagagcagaaggcccaggagctcgaacaggagatcgcgctaatgcagcgcgaaggtcacttcggcctgcaacacgggccacccctgcaacagcgcgcacaagtcgaagacctacacttcccccagcgcgaccacgccatcccacacgccgcggtattccaaggtgtcaactacctcgacgagcgaagtcccctggcgccacacctgcaagtgacaccttggcctgccaacttccgggcagggacctatctcaagtacaacggcagcactgacctagcacagtacatcatgagttatcaggtcgccgttgcatcttccggaggggttgacgccacgatgaccaagtccttcatcatcgccctagaaggcctaactctcacctggtacaccaggttacccccgttgtccatcgactcctggagaagcctccgggacaaattcctgctcaacttccaagtgtaccgcccagacaccgacgccttggctgaactttcactctgcaacgccgacttcaacacgaagcggcagaagcgggaccactaccgcagcatcaaccacgtcgccatcaccggtccggtcgtgcagacgaagtggtcccatgtgccgctaaccttcgatgcccgagacgtcgatctgcgcagcgccccccacatcgacgccatggttatcaactgcagcgtggcaggctgggacctgcacaaagtcctagttgacaatggcagccaagcagacattattttcctccatgccttcgaccgcatgggcataagccacagcctgctcaagccttcggacaacccactgtatggcttcggcggcaagggcacgtttcccgtcggcaaaatagagttgcctctctccttcggtgtagcacccaatgcccgaagtgagcaagtgaccttcgatatcgtcgatatgatgtatccgtacaacgcaattatgggccggggctccatcaacaagtttgaggcagccattcacggactttacctgtgcatgaagataccaggtccgctaggcgccatcacggtctacgacaaccaacagactgcgcgaaacatagagcgggacttcgtccctgggcaaagaaacgtgcactgcctcacgacccagcacgaggtccccacgtccgccagcccaactgacaaagagcacgacaaagcacaactacaaagcatcgacgggaccaagactgttcccctcgaccaggccacgcccaagcagacggtcaccatatgcgaagacctcacttcgcatgacaaggagaaactcctctgctgtttgtccaagaacaaagacgtcttcgcctggtctgccctcgacctggtcggggtcagtcgctccatcatcgagcacagcttgggaatcgacccttcgaaaacaaaagccgccaaggccgaggtacatcgcctcctggaggccaaatttatcgagccagtggcctaccccacatggctcgccaacgttgtgatggtgcagaaaaagagcggcaaatggcggatgtgcatcgatttcaccagtctcaacaaggcctgcccaaaggacaacttcccgttgcctcggatcgacaaaatagtcgatagcgtggccgggtgcgaagtcatgtcacttctcgactgcttctctggttaccatcaaatatacatgaaggaggaggacaaggccagcaccagcttcataacacccttcggcacgtattgcttcatcagaatgccggagggactcaagaacgccgggtccactttctcccggcttaccaaaacggtgctcgaggggcaagtcggcaaaaatatattcacgtatgtggacgacatcgtcgtcgccagcagaagcaaggaggatcaccttgctgacctcgccgaaacgtttgcgaacatgcgggacgcacgacttcgcctaaaccctgaaaagtgtgtcttcggcgttcgccaggggaaaatattgggctacctggtgtcacaccagcgaagtctccccttcctcaaaactctccgcggcgcaaaagacttcgcttggggaccagagcaggcgacggccttcgcctcattgaaacagtacctatcggaattggcagttcttacaagccccgactcctcgctacccctgttgctttatgttgcggcttcgccgcatgcggtcagcgcggcactggttcaggagcagacagtagagggcgtgatcaggcaatgtccagtttattacgtctccgaagtgctcacaccatcaaaatgtaacatgacagaactggaaaagataacctatgcacttgttatggcttcgcgcaaattgcgccactattttgaagcattcaaggtccgggtcacctcagataggggactcggcgaattgttcagaaacccggaggcatcggtcaggatttccaaatgggcggccgaactctccggctaccacatcacgttcgagcccaggacagccatcatgtcacaagttctggcagacttcgtcgttgactggactgggccaataacacagccggacccgtccgcagagaaggtttggacaatccattgcgacaacgcatggtgccacgcgggggcaggcgctgctgcagtcattacctcacccgccggggtcaagcacagatacgcggcatgcctcaactttgctctggaatctgacagatgcactaacaacatagcagaatatgaagctgtcatcctcggcctccgcaaactaagggcccttggtgtcaccacctgcattatcagaacagactccaaggtagtcaccggccaagtcgagaaagactattga

SEQ ID NO: 87950 - DNA, 364 bp, Zea mays
  unsure (1)..(364): unsure at all n locations
  Clone ID: MRT4577_180209C.1
aagcagtggtaacaacgcagagtactttnttttttttttttttttttttttttncctttttttttttttttttttttttttttttttttttttttttttttcgcacaataggagcagtacaggtctcgaaaaaatattaaaaattacaacgggttttggagggggtggaaaataaaatttataagggcggaaaaaataatcggggaaggggtcccaaccaggcaaggggggaaaggaaaagagggacaaaataccctctcaaccgggtaacataatttcaaaaaaaccgaggctgaacacagggaagggccataattggttacagcagctgaaaagggcctatagggagacccaaaggtccaac

SEQ ID NO: 87951 - DNA, 290 bp, Zea mays
  Clone ID: MRT4577_18020C.1
ccaaaagagaaaactatttttctctgcttgggtaacattgacccctacccacagaaaatggttccctttggtttcaagacctaggggggggggggggaagtctgtccagtggtaagaataatcgggatccttttggccggggagaatgctccatcccacggcgggcagccaaagacgtctgggatgaaaggggaacatttggggggttctcaacccgggccagagggtaccggtaattctgttatccggggaaaccctcctctgcaaagggccggttctaatgccttggg

SEQ ID NO: 87952 - DNA, 4881 bp, Zea mays
  Clone ID: MRT4577_180210C.1
atggcacccaagagagctaactcgaaggctgacgaggctgcgaaggcagcactgctggccgcaagaaagggcaaggccctcgtcctcacccaatccacccaccaagagcccactgaagacaatgttccccacaccggcgaagacgacaccttccgcacctgcggaaccgaaggacaatcgcagccgcctccaggcttcgccccactggaaggcgcggacctcaccgaggacggtgaggtcctcggcgtctcaacagaagaacagctacagctgcgcgccctgcgcctcaagaaccgcaatctccagaggcagaaagagatactagaggccaagcgccaacgtgtgtccgcactagccaaggtgcggcaaatgatacgcgacgaggagcagaaggcccaagacctcgagcgtgagatcgcgctgatgcagcgcgaaggccacctcggcctgcagcaagagccacccctccagcagcgtgcgcaaccggaaggcacgcgcgaaggccaccttggcctgcagcatggcccacccctgcatcaccgggcgcggccggagagcccgcgtttcccccagcgcgaccacaccttccagcacggcgcgccattccaaggagtcaactacctcaacgagcgaagtcccctggcgccacacctgcaggtgacgccttggccagctaacttccgagcggggacctatcccaagtacaacggcagcaccgacccggcgcaatacataatgagttatcaggtcgccgttgcatccgccggaggggacgacgccacaatggtgaagtctttcatcatcgccctagagggcccagcactcacctggttcaccagattgcctccgctgtccattgattcgtggagaagtctcagggacaaattcctgctcaacttccaagggtaccgcccagacaccgacgccttggccgagctctcgctttgcaaacagctggaaaaggagactctgagggagtactaccgcaaattcttaacactcaagtcacagctgccctccgtcgatgatcagatcgctatccactacgccatcaacggccttcgggtcggcgtcctctacagccactgtatcagagatccacccaagagcttgcaggagctatatcagctcttcgaaaaatatgccaaatccgaagagctccaccagcgcaaggttgagtcacagcggaaacccaaagatgccccgcagtccagccgcacgtggacgaggactccgcaaccagactccggtcgagatggccacagtcaacagcaagtgcacaacatcgccaaccagcagcctgctgcagacccccctcgtcgccaggaatatccccccagggccgcggaaatggaactcgtggcaggggccgaggacgcgcgcagccgccgcgccggttctactgtcttttccacggcgaagactgcgcccaccaaaccaaagactgccccaagacgaaggcaaccagagacagaatggcgcgggcacagccagccgacaatcccagaattgtcgcgcataattaccagccaccccctccaccatatatccacgctcccgctccgcatccaccgcaccacgcttaccaacaccatcaggaacaccgacttcgacaccaagcggcagaagcgggaccactaccgcagcatcaaccacgtcgccgtcactggcccagtcgtgcagacgaagcggtcccacataccgctaaccttcgacgcacgagacgtcgacctgctcagcgccccccacatcgacgctatggtcatcaattgcagcgtggcaggctgggacctacacaaagtcctagtcgacaacggcagtcaggcggacatcatcttcctccacgccttcgaccgcatgggtataagccacagcttgctgaagccttcggacaaccctttgtatggtttcggcggcaagggcacctttccagttggcaagatagagttgcccctctccttcggtgtagcacccaaagcccgaagcgagcaagtaaccttcgacattgtcgacatggtatatccatacaacgccatcatgggccggggctccatcaataagttcgaagctgccatccacgggctgtacctatgtatgaagataccaggtccgctaggcgccattacaatctacggcaaccagcagacggcgcgcaacatagagcgggacttcgtgcctggccagaggaacgtacactgtctaacgacccagcgcgaggtccccatgcctgccagcccaaccgataagcagcacgacaaggcacagttgcagagccaagacgggaccaagactgtccccctcgatcaggccacgcccaagcagacagtcactatcagcgaagacctcacctcacttgaagaagagagactcctctgctgcctggccaagaataaagatgtcttcgcctggtccgccctcgatctggtcggagtcagccgatccataatcgagcacagcttgggaattgacccttcggcgcgacccaaaaagcagaggcttcgcaaaatgtcagacgaaaagacagaggccgccaaggcggaggtgcaccgcctcctggaggctaaattcatcgagccagtggcttaccccacgtggctctccaatgttgtaatgatatacatgaaggaggaagacaaggctagcaccagctttataacacccttcggcacttattgcttcgtcagaatgccggagggtctcaagaatgccgggtccaccttctccagactcaccaaaacagtactcgaagggcaggtcagcagaaatatattcacatatgtggacgacatcgtcgtcgccagcaagaataaggaggaccatctcgccgacctggccgagacattcgcgaacatgcgagatgcacgactccgcctaaacccggaaaagtgcatcttcggtgttcgtcagggcaagatattgggctacttggtgtcacaccgcggcatcgaggccaacccaaccaagatccaggccatcgtcggcatgtcgcccccacagtccgccagggacgtccgccgagcgaagtttcccttcctcaaaacactccgcggtgcgaaagacttcgcctggggaccggagcaagcagcggccttcgcctcactaaaacagtacctgtcggagctggccatcctcacaagccccgactcctcgctccccctattgctctatgtcgcggcttcgccgcacgcggtcagcgcggcactagtgcaggagcagacagtcgagggcgcagtcagacagtgccctgtttactatgtctccgaagtcctgacaccgtccaaatgcaacatgacagagctggagaagatcgcctacgcagttgttatgtcctcgcgcaagctgcgccattactttgaagcattcaaggtccgagttacctcagacagggggctcggtgaactattcagaaacccggaggcatcagtgaggattgccaagtgggcagccgaactctccggctaccacatcagcttcgagcccaggacagccatcaagtcgcaagtcctggcagacttcgtcgtcgactggactgggccagtaacgcagccggacccgtccacagagaaggtctggaccatccattgcgacggcgcatggtgccatgcgggggcaggcgtcgctgcagtcgtcacctcaccagccggagtcaaacacagatatgcagcatgcctcaacttcgctctggaatccgacaaatgtacaaacaacatagcagagtatgaagcggttatcctcggcctccgcaagctaagggccctcggagtcaccacatgtatcatcaagacagactccaagatagttgtcggccaggtcgagaaagactatgcagcaaaagacctcgcgctcatgcaatacctcgcggctatccgaagtctcgagagacagttcaagggattcaccctgcagcatgtggatagggccaagaacgaggaggccgatgcattagccaaggccgccgccaggggcgagcccctgccctccgacgtgttctttcacaccatcggcacgccagccgtccggagccccgaagggctccagataactaatgatagcgagggccaccgtatagtcaacctaatcatgaccgaagactggcgggcaccaataaccctgttcctacaggggtactatcatccaaccgacgtcagtgaggcaaagcgcctcagacatcgaagccgggacttcgcactgattgagggccaattatacaagaaaggggtcagtcagccaatgcttaaatgcgtcaccgaaaccgaaggcatgcaaatcctacgcgaagtccacagtggcacgtgcggctcgcacgcagggccaagggccctggctgccaaggtgatccgacaagggttttactggcctgcaatgatctgcgccgcaaatcgagtcacaaggtcctgcgaagcccgccagaagttctctcctcggtcaggcaacccctcgcaatatacaaagctgattgcccatacatggcctctccagcgctggagcctggacattgtcgggcccctgcccaccgctcaggggaaccttaagttcgccttcgtagccgtcgaatacttcaccaaatggattgaagcgagggctgtttccacaatcacatcaaagactgcccaaaaattcttctggcagaacattgtttgccgcttcggagtaccatccgagctgatagttgacaacggcaagcagttcgacagccaagatttcaaggatttttgtttctccatcggcaccaagcttgccttcgcttcagtctatcatccgcattccaacggggtcgtggagcgtgccaatgggaaaatcttcacagctgtcaaaaagatgctcctcgacgaaaaaaaggcagatggaccgatttattgccggaggcagtctgggcgctaa

SEQ ID NO: 87953 - DNA, 1116 bp, Zea mays
  Clone ID: MRT4577_180211C.1
atggcacccaagaaagcaaacccgaaggctgacgaggctgcgaaggcagcactacttgctgcaagaaagggcaaggcccttgccctcacccaatccacccaccaagaggccactgaagacgacgttctccgcacctgcgaagacgaccccatccgcacctgcggccctaaaggacaatcgcagccagccccaggcttcgccccactggagggcgcggacctcactgaggacggtgaagtcctcggcgtctcagcggaagaacagctacagctgcgcgccctgcgcctcaagaaccgcaatctccagaggcagaaagagatactggaggccaagcgccagcgcgtgtccgcgctagccagacatgggccacccctgcaacagcacgcacaaccgcaagacccgcatttcccccagcgcgaccacactttcccgcacgccgcgccattccaaggggtcaactacctggacgagcgaagtcccctggcaccacacctgcaagtgatgccttggcccgctaacttccgggcagggacctatcccaagtacaacggcagcaccgacccagcacaatacataatgagttatcaggtcgccgttgcatcttccggaggggacgacgccacaatggccaagtctttcatcatcgccctcgaaggcccagctctcacctggttcaccaggttgcctccgctgtccattaattcctggagaagcctccgggacaagttcctgctcaacttccaagggtaccgcccagacaccgacgccttggccgaactctcgctctgcaagcagctggaaaaagagactctgcgggaatattaccgcaagtttctaacactcaagtcacagctgcccttagttgatgaccagatcgccattcactacgccatcagtggccttcgcgccagcgtcctttacagtcattgcatcagggacccacccaagaaccttcaggagttatatcaactatttgaaaaatacgccaaatccaaagagctccaccagcgcaaggttgagtcccagagaaagcccaaagatgctccacagtccagccgcacgtggacgaggactccgcagccagactctggccgagaaggccgcaaccagcagtag

SEQ ID NO: 87954 - DNA, 807 bp, Zea mays
  Clone ID: MRT4577_180212C.1
cctacaaaactagcatctcctagggtttttttccatggcgatggcatcgcgcgccgtcctcctctcccgtctatcgccgctccccgctgcggcctctcgcctcctcctccgccctctcgccgccgccgccagcctccttccggcggcgacctcgcccgtcccggcggcggcgcgcggggcggtgcggtgcttcgccacacagccggcgacgtcgtcgctgcgggactcctcgcccaactggagcaaccggccgcccaaggagactatcctcctcgatgggtgcgacttcgaacactggctggtagtcatggagccgcccgcgggcgacgctgctaatcctgatgtcacacgcgacgagatcatcgatagctacatcaagaccctcgcccaggtcgtcggaagtgagcaagaagctaggcagaagatatactcggtgtcaactcgtcattactttgcttttggtgcccttgtatctgaagaactctcatataaacttaaagagctgcccaaagtccgctgggttctccctgattcataccttgatgtcagaaataaggactatggaggggaaccttttataggtggggaagctgttccttatgatcctaaatatcacgaggaatgggtgaggaacaatgcccgtgccaatgaaagatctcggcgcagtgataggccccgcaactttgataggtcaaggaactttgagaggagaagggagaacatgcagaacttccaaacagagatgcacctcctgggcagcagggtttcaacggccctccaccctggcagaacccgggcagcatgcct

SEQ ID NO: 87955 - DNA, 5352 bp, Zea mays
  Clone ID: MRT4577_180213C.1
atggcacccaagagagctaacccgaaggctgacgaggctgcgaaggcagcactgctcgccgcaagtaagggcaaggccctcgccctcacccaatccacccaccaagagcccactgaagacaatgttccccgcacctgcgaagacgacaccttccgcacctgcggccccgaaggccaatcgcagccgcccccaggcttcgccccactggaaggcgcgggcctcaccgaggacggtgaagtcctcggcgtctcagcggaagaacagctacagctgcgcgccctgcgcctcaagaaccgcaatctccagaggcagaaagagatactggaggccaagcgccagcgcatgtccacactagcaaaggtgcggcaaatgatacgcgacgaggaacagaaggcccaagacctcgagcgcgagatcgcgctgatgcagcgcgaaggccaccttggcctgcagcaagggccacccctccagcagcgcccacaaccagaagacacgcgcgaaggccacctcggcctgcagcatgggccacccctgcaacaccgagcacagccggaagacccgcgtttcccccagcgtgactacaccttccagcacgccgcgccattccaaggggtcaactacctcgacgagcgaagtcccctggcgccacacctgcaagtgacgccttggccagctaacttccgagcagggacctaccccaagtacaacggcagcaccgacccggcgcaatacataatgagttatcaggtcgccgttgcatctgccagaggggacgacgccacaatggcgaagtccttcatcatcgccctggagggcccagctctcacctggttcaccagattgcctccgttgtccattgattcatggagaagtctcagggacaagttcctgctcaacttccaagggtaccgcccagacactgacgccttggccgagctctcgctttgcaagcagctggaaaaggagactctgcgggagtattaccgcaaattcttaacactcaagtcacagctgccctccgttgatgatcagatcgctatccactacgccatcagtggccttcgtgccggcgtcctctacagccactgtatcagagatccacccaagaacctccaggagctatatcagctctttgaaaaatatgccaaatctgaagagctccaccagcgcaaggttgagtcacagcggaaacccaaagatgccccacagtccagccgcacgtggacgaggactccgcagccagactccggtcgagacggccgcagtcagcagcaagtgcacaacatcgccaaccagcaccccgctgctgacccccctcgtcgccaggaatatccccccagggccgcgggaatggaactcgtggaagacttcgccgatcaaccatatcgcggagtcattcacatgataactggggggtctagcactgacttcgacaccaagcggcagaagcgggatcactaccgcatcatcaaccatgtcgccgtcactggcctagtcgtgcagacaaagtggtcccatgtaccactaaccttcgacgcacgagacgtcgacctgcgcagcgccccccacatcgacgctatggttatcaattgcagcgtggcaggctgggacctacacaaagtcctagtcgacaacggcagtcaggcggacatcatcttccttcacgccttcgaccgcatgggtataagccacaacctgctcaagccttcgaacaacccgttgtatggcttcggcggcaagggcacctttcccgtcggcaagatagagttgcccctctccttcggtgtagcacccaatgcccgaagtgagcaagtgactttcgatatcgtggatatggtatatccatacaatgccatcatgggccggggctccatcaataagttcgaagccgccatccacggactgtacctatgtatgaagatactaggaccgctaggcgccattacggtctacggcaaccagcagacgacgcgcaacatagagcgggacttcgtgcccggtcagaggaatgtgcactgcctcacggcccagcacgaggtctctgcgcccgccaggccaaccgataaacagcacgacaaggcacagctgcagagccaagacgggaccaagactgtccccctcgatcaggccacgcccaagcagacagtcactatcagcgaagacctcacctcgcatgaagaagagaaactcctctgctgcctgtccaaaaataaagatgtcttcgcctggtccgccctcgacctggtcggagtcagccgatccataattgagcacagcttgggactcgacccttcggtgcgaccaaaaaggcagaggcttcgtaaaatgtccgacgaaaagacagaggccgccaaggcggaggtgcaccacctcctagaggctaaattcatcgagtcagtggcttaccccacgtggctctccaatgttgtaatggtgcagaaaaaaagcgggaaatggcgaatgtgcatagacttcaccagtctcaacaaggcctgcccaaaggacaatttcccgttgccacggatcgacaaaatagtcgatagcgcggccggatgcgaggtcatgtcactcctcgactgcttctccggctaccaccagatatacatgaaggaggaagacaaggccaacaccagctttataacacccttcggcacatattgcttcatcagaatgccggagggactcaagaacgccgggtccaccttctccagactcaccaaaacagtactcgaagggcaggttggcagaaacatatttgcatacgtggacgacatcgtcgtcgccagcaagaacaaggaagatcacctcgccgacctcgccgagacattcacgaacatgcgagacgcacgactccgcctgaatccggaaaagtgcgtcttcggcgttcgccaaggcaaaatattggactacctggtatcacaccgcggcattgaggccaacccaaccaagatccaggccatcataaacatgacgcctccgcagtccgccagggacgtccagcgtctgacaggcagattggccgctctcaacaggtttatctccaggtccgccgagcgaagtctccctttcctcaaaacactccgcggtgcaaaagacttcgcctggggaccggagcaggcagcggccttcgcctcactgaaacagtacctgtcggagctggcaatcctcacaagccccgactcttcgctccccctattgctctatgtcgcggcttcgccgcatgcagtcagcgccgcacttgtgcaggagcagacagttgagggcgtggtcaggcaatcccctgtctactatgtctccgaagtactgacaccgtccaagtgcaacatgacagagctggagaagattgcctacgcagtcgttatgtcttcgcgcaagctgcgccattacttcgaagcattcaaggtccgagtcacctcagacaggggactcggcgaattatttagaaacccggaggcatcggtgaggatcgccaagtgggcagccgaactgtccggctaccacatcagcttcgagcccaggacagccatcaagtcacaagtcctggcagacttcgtcgtcgactggactgggccagtaacacaaccagacccgtccacagaaaaggtttggactatccattgcgacggcgcatggtgccatgcgggggcaggcgccgctgcagtcgtcacttcaccagccggggtcaagcacagatatgcagcgcgcctcagcttcgctctggaatccgacagatgcacaaacaatatagcagaatacgaagcagtcatcctcggcctccgcaagctaagggccctcggagtcaccacctgtatcatcaagacagactccaagatagttgtcggccaggtcgagaaagactacgcagcaaaggaccccacacttatgcaatacctcgcggccatccgaagcctcgagagacaattcaaggggttcaccttgcagcatgtggatagggctaagaacgaggaggccgacgcattggccaaggctgccgccaggggcgagcccttgccctccgacgtgttctttcataccatcggcacgccggctgtccggagccccgaagggctccaaataactaatgacagcgagggccaccgcatagtcaacctaatcatgaccgaggactggcggacaccaataaccttgttcctacaggggtactatcatccaaccgacgtcagcgaggccaagcgcctcagacatcgaagccgggacttcgcactgattgagggccaactctacaagaaaggggtcagtcagccaatgcttaagtgtgtcaccgaaaccgaaggcatgcagatcctacgcgaagtccacagtggcacgtgcggctcgcacgcagggccaagggccctagctgccaaggtgatccgccaaggattttactggcccgcaatgatctgcgccgcaaatcgggtcacaaggtcctgcgaagcctgccagaagttttctcctcggtcaggcagcccctcgcagtatacaaagctgattgcccatacatggcctctccagcgctggggcctggacattgtcgggcccctgcccaccgctcaggggaaccttaagttcgccttcgtagccgtcgaatacttcaccaaatggatcgaggcgagggctgtttctacaataacatcaaagactgcccaaaaattcttctggcaaaacattgtttgccgcttcggagtaccgtccgaactaacagttgacaatggcaagcagttggacagccaagattttaaggatttttgtttctccatcggcaccaagcttgcattcgcttcagtttatcatccgcagtccaacggggtcgtggagcgcgccaatgggaaaatcttcacagctgtcaagaagatgctcctcgatgaaaaaaaagacagatggaccgatttgttacctgaggcagtatgggcgctaaacacaactgagtgcagggcgactgggttcactcctttccgccttctatacggatcggaggccatgaccccgcaagaaataaagcatgggtccccgcgtacagttccgtcagccgtccccgacgtggacgagccaacttcaaaggatctcattgatggagaccgggtcttcgccctacaggccctaaacaaataccaagcccagaccaaagcatggcgcgaccacgcagtcatcccgagggagttcagcgaaggggacctcgtactcgtccgaacagctcggacggagtccaggggcaagctggagcccaagtgggagggcccctttatagtcaagacaaaagcttcccccatcgcttacaggctcacaacgccaaacggcgaggacctggagcactcctggaacatcgacaacctccgcaaattttttgtttga

SEQ ID NO: 87956 - DNA, 272 bp, Zea mays
  unsure (1)..(272): unsure at all n locations
  Clone ID: MRT4577_180214C.1
aattccctaaccgacccactcgtaactaaacactattactataacaacataaaataactttgattaaaaaaccaaacctaccctaaaaacgcgacggttaaaaaatactgcaggacaaacctcctccccctttaaaatatccaacctttcttcccccacaattcaacttacttactcttttttaatctcccctaaaaccaattcacttaccccatttttccaaccatccctcttcaaaaaccctacacttacccaatttaatcnactttcaa

SEQ ID NO: 87957 - DNA, 350 bp, Zea mays
  Clone ID: MRT4577_180215C.1
gtctcggaacacggtccaaggagtctgacatgacgtcgagtctacggatccagaaacctgaggtgcggaggtagctgactagcgggagccctcacggcaccacacctagccgaccctgatctctcgaaaggttcgacgtggaccaccctgtcagcacccgaagatattaactatgcctgaccgagcgaagccagagaaacttggtacagctcgaacgatactacctcaaatcgacgtctgcttgctataaggacaacgataatcgaccatctatagctgtttcctccaagtgtccctcacgatactggagcccaaccagttctatcggtgaagccaatgattagaggcat

SEQ ID NO: 87958 - DNA, 4692 bp, Zea mays
  Clone ID: MRT4577_180216C.1
atggcacccaagagagccaacccgaaggctgacgaggctgcgaaggcagcactgcttgccgcaagaaagggcaaggccctcgccctcacccaatccacccaccaagagcccactgaagacaatgttccccgcacctgcgaagacgacaccttccgcacctgcgggcccgaaggacaatcgcagccgcccccaggcttcgccccactggaaggcgcggacctcaccgaggacggcgaggtcctcggcgtctcaacagaagaacagctacagctgcgtgccctgcgcctcaagaaccgcaatctccagaggcagaaagagatactggaggccaagcgccagcgtgtgtccgcactagccaagcgtgactacaccttccagcacgccgcgccattccaaggggtcaactacctcgacgagcgaagtcccctggcgcctcacttgcaagtgacgccttggccagctaacttccgagcagggacctatcccaagtacaacggcagcaccgacccggcgcaatacataatgagttatcaggtcgccgttgcatccgccggaggggacgacgccacaatggcaaagtctttcatcatcgccctagagggcccagcactcacctggttcaccaggttgcctccgctgtccattgattcatggagaagtctcagggacaagttcctgctcaacttccaagggtaccgcccagacactgacgccttggccgagctctcgctttgcaagcagctggaaaaggagaccttgcgggagtattaccgcaaattcttaacactcaagtcacagctgccctctgtcgatgatcagatcgctatccactacgccatcagtggacttcgtgccggcgtcctctacagtcattactgcgcccaccaaaccaaagactgccccgaaacgaaggccaccagagacagaatggcacgggcgcagccagccgacaaccccagaattgtcgcgcacaactaccagcaaccccctccaccatatatccacgcccccgctccgcatccaccgcaccacgcttaccaacaccatcaggaagtacaaatcgtacctcctccacccccaccaccgcaccagcaacaccaaaacatcccccatgccccaaagcaggaagacttcgccgatcaaccatatcgcggagtcattcacatgataacaggggggtccagcactgacttcgacaccaagcggcagaagcgggaccactaccgcagcatcaaccatgtcgccgtcactggcccagtcgtgcagacaaagtggtcccacataccgctaaccttcgacgcacgagacgtcgacctgcgcagcgccccccacatcgacgctatggtcatcaattgcagcgtggcaggctgggacttacacaaagtcctagtcgacaacgacagtcaggcggacatcatcttcctccacgccttcgaccgcatgggtataagccacagcctgctaaagccttcggacaacccgttgtatggcttcggcggcaagggcacctttcccgtcggcaaaatagagttgcccctctccttcggtgtagcacccaatgcccgaagtgagcaagtaaccttcgatattgtcgacatggtatatccatacaacgccatcatgggccggggctccatcaataagttcgaagctgccatccacggactgtacctatgcatgaagataccaggtccgttaggcgtcatcacagtcttcggcaatcaacagactgcgcgcaacatagagcgggacttcgtgcccggtcaaagaaacgtgcattgtctcacgactcagcgcgaggtccctgcgcccgccagcccaaccgataagcagcacgacaaggcacagttgcagagccaagacgggacaaagactgtccccctcgatcaggccacgcccaagcagacagtcactatcagcgaagaccttacctcacaggaagaagagaagcttctctgctgcctcgccaagaataaagatgtcttcgcctggtccgccctcgacctggtcggagtcagccgatccataattgagcacggcttgggaattgacccttcggtgcgaccaaaaaagcaacggcttcgcaaaatgtccgacgaaaagactgaggccgccaaggcagaggtgcaccgcctcctagaggccaaattcatcgagccagtggcttaccccacgtggctctccaatgttgtaatgatatacatgaaggaggaagacaaggccagcaccagcttcataacacccttcggcacttattgcttcatcagaatgccggagggactcaagaatgccgggtccaccttctccagactcaccaaaacagtactcgaagggcaggttggcagaaatatatttacatatgtggacgacatcgtcgtcgccagcaagaataaggaggaccatctcgccgacctcgccgagacattcgcgagcatgcgagacgcacgactccgcctaaatccggaaaagtgcgtcttcggtgttcgccagggcaagatattgggctacctggtatcacatcgcggcattgaggccaacccaaccaagatccaggccatcataaacatgacgcctccgcagtccgccagagacgtccagcgtctgacaggcagattggccgctctcaacaggttcatctctaggtccgccgagcgaagtctcccctttctcaaaacactccgcggtgcaaaagacttcgcctggggaccggagcaggcagcggccttcgcctcgctgaaacagtacctgtcggagttggcaatcctcacgagccccgactcctcgctccccctattgctctatgtcgcggcttcgccgcacgcggtcagcgcggcactagtgcaagagcagacggttgagggtgcggtcagacagtgccctgtttactatgtctccgaagtactgacaccgtccaagtgcaacatgacagagctggagaagatcgtctacgcagtcgttatgtcttcgcgcaagctgcgccattactttgaagcattcaaggtccgagtcacctcagacaggggactcggcgaactattcagaaacccggaggcatcggtgaggattgccaagtgggcagccgaattatccggctaccacatcagcttcgagcccaggacagccatcaagtcacaggtcctggcagacttcgtcgtcgactggactgggccaataacgcagccagacccgtccacagagaaggtttggactatccactgcgacggcgcatggtgccatgcgggggcaggcgtcgctgcagtcgtcacctcaccagccggagtcaaacacagatatgcagcacgcctcagcttcgctctggaatccgacaaatgcacaaacaatatagcagagtatgaagcggtcatcctcggcctccgcaagctaagggccctcggagtcaccacatgtatcatcaaaacagactccaggatagttgccggccagcatgtggatagggccaagaacgaggaggccgatgcattggccaaggctgccgccaggggcaagcccttgccctccgacgtgttctttcacaccatcgacacgccagccgtccgaagccccgaagggctccaaataactaatgatagcgagggccaccgcatagtcaacctaatcatgaccgaagactggcgggcaccaataaccctgttcctacaggggtactatcatccagccgacgtcagtgaggccaagcgcctcagacatcgaagccgggacttcgcactgattgagggccaactctacaagaaaggggtcagtcagccaatgcttaagtgcgtcaccgaagccgaaggcatgcaaatcctacgtgaagtccacagtggcacgtgcggctcgcacgcagggccaagggccctggctgccaaggtgatccgccaagggttttactggcccgcaataatctgcgccgcaaaccgggtcacaaggtcctgcgaagcctgccagaagttttctcctcggtcaggcaacccctcgcagtatacaaagctgattgcccatacatggcctctccagcgctggggcctggacattgtcgggcccctgcccaccgctcaggggaacctcaagttcgccttcgtagccgtcgaatacttcaccaaatggattgaagcgagggctgtttctacaataacatcaaagactgcccaaaaattcttctggcaaaacattgtttgccgcttcggagtaccgtccgagctaacagttgacaacggcagatggaccgatttgttaccggaggcagtctgggcactaaacacaactgagtgcagggcgactgggttcacccctttccgccttctatacgggtcggaggccatgaccccgcaagaaataaagcatgggtccccgcgtatagttccgtcagccgtccccgacgtggacgagccaacttcaaaagatctcattgacggagagcgggtcttcgccctacaggccctaaacaaataccaagcccagaccaaagcatggcgcgaccacgcagtcatcccgagggagttcagcgaaggggacctcgtactcgtccgaacagctcggacagagtccaggggcaagctggagcccaagtgggagggcccctttatagtcaagacaaaagcttcccccagcgcctacaggctcacaatgccaaacggcgaggacctgcagcactcctggaacatcgacaaccttcgcaatttttttgtttga

SEQ ID NO: 87959 - DNA, 5484 bp, Zea mays
  Clone ID: MRT4577_180217C.1
atggcacccaagagagctaacccgaaggctgacgaggctgcgaaggcagcactgctggccgcaagaaagggcaaggccctcgccctcacccaatccacccaccaagagcccactgaagacaacattccccgcacctgcgaagacgacaccttccgcacctgcgggcccgaaggacaatcgcagccgcccccaggcttcgccccagtggagggcgcggatctcaccgaggacggcgaggtcctcggcgtctcaacagaagaacagttacagctgcgcgccctgcgcctcaagaaccgcaatctccagaggcagaaagagatactggaagccaagcgccaacgtgtgtccgcactagccaaggtgcggcagatgatacgcgacgaggagcagaaggcccaagacctcgagcgcgagatcgcgctgatgcagcgcgaaggccacctcggtctacagcaagagccacccctccagcagcgcgcgcaaccggaggacacgcgcgaaggccacctcggcctgcagcatggcccacccctgcaacaccggccgcagccggagaacccgcgtttcccccaacatgattacgccttccagcacggcgcaccattccaaggggtcaactacctcgatgagcgaagtcccctggcgccacacctgcaagtgacgccgtggccagctaacttccgagcaggggcatatcccaagtacaacggcagcaccgatccggcgcaatacataatgagttatcaagtcgccgttgcatccgccggaggggacgacgccacaatggcgaagtctttcatcatcgccctagagggcccagcactcacctggttcaccagattgcctccgctgtccattgattcgtggagaagtctcagggacaagttccttctcaacttccaagggtaccgcccagacaccgacgctttggccgagctctcgctttgcaaacagctggaaaaggagactctgcgggagtattaccgcaaattcttaacgctcaagtcacagctgccctccgtcgatgatcagatcgctatccactacgccatcagtggccttcgggccggcgtcctctacagccactgtataagagatccacccaagaaccttcaggagctatatcagctctttgaaaaatatgccaaatccgaagagctccaccagcgcaaagttgagtcacagcggaagcccaaggatgccccgcagtccagccgcacatggacgaggactccgcaaccagactccggtcgagatggccgcagtcagcagcaagtgcacaacatcgcaaaccagcagcctgctgctgacccccctcgtcgccaggaatatcccccccaaggccgcgggaacggaactcgtggcaggggccgagggcgcgcgcagccgccgcgccggttctactgccttttccacggcgaagactgcgcccaccaaacgaaagactgccccgaaacgaaggccaccagagacagaatggcgcgagcgcagccagccgacaatcccagaattgtcgcgcataattaccagccaccccctccaccatatatccacgctcccgctccgcatccaccgcaccacgcttaccaacaccatcaggaggtacaaatcgtacctcctccacccccaccaccacaccagcaacaccaaaacatcccccacgccccaaaacaggaagacttcgccgatcaaccatatcgcggagtcattcacatgataacaggggggtccagcactgacttcgacaccaagcggcagaagcgggaccactaccgcagcatcaaccatgtcgcggtcaccggcccagtcgtgcagacgaagtggtcccatataccgctaaccttcgatgcacgagacgtcgacctgcgtagcgccccccacatcgacgctatggtcatcaattgcagcgtggcaggctgggacttgcacaaagtcctagtcgacaacggcagtcaggcggacatcatcttcctccacgccttcgaccgcatgggtataagccacagcctgctcaagccttcggacaatccgttgtatggcttcggcggcaaaggcaccttccccgttggcaaaatagagcttcccctctccttcggtgtagcacccaatgcccgaagtgagcaagtaaccttcgacattgtcgacatggtatatccgtacaacgccatcatgggccggggctcaatcaataagttcgaagccgccatccatggactgtacctatgtatgaagataccaggtccgctaggcgctatcacgatctacggcaaccagcagacggcgcgcaacatagagcgggacttcgtgcctggtcagaggaacgtacactgtctcacggcccagcgcgaggtccccgcgcccgccagcccagccgacaagcagcacgagaaggcacagttgcagagccaagatggaaccaggactgttccccttgatcaggccacgcccaagcagacagtcactatcagcgaagaccttacgtcacatgaagaagaaaggcttctctgctgcctggccaaaaataaagatgtcttcgcatggtacgccctagacctggtcggagtcagccgatccataattgagcacagcttgggaattgacccttcggtgcgaccaaaaaagcaaaggctccgcaaaatgtccgacgaaaagacagaggccgccaaggcggaagtgcaccgcctcctagaagctaaattcatcgagccagtggcttaccccacgtggctctccaatgtcgtaatggtgcagaaaaagcgggaaatggcgaatatatacatgaaggaggaagacaaggctagcaccagctttataacacccttcggcacttattgcttcatcaggatgccggagggactcaagaatgcggggtccaccttctccagactcaccaaaacagtactcgagggccaggtcggcagaaatatatttacatatgtggacgacatcgtcgtcgccagcaagaataaggaggaccacctcgccgacctcgccgagacattcgcgaacatgcgagatgcacgactccgcctgaacccggaaaagtgcgtcttcggtgttcgccagggcaagatattgggttacctggtgtcacaccgcggcatcgaggccaacccaaccaagatccaggccatcgtcgacatgtcgcctccgcagtccgtcagggacgtccagcgtctgacaggcagactggccgctctcaacagattcatctccaggtccgccgagcgaagtctccccttcctcaaaacactccgcggcgcgaaagacttcgcctgggggccggagcaagcagcggccttcgcctcactcaaacagtacctgtcggagctggccatcctcaccagccccgactcctcgctccccctattgctctatgtcgcggcttcgccgcacgcggtcagcgcggcactagtgcaagagcagtcagtcgaaggcgcagtcagacagtgccctgtttactatgtctccgaagtcctgacaccgtccaaatgcaacatgacagagctggagaagatcgcctacgcagttgtcatgtcctcgcgcaaactgcgccattactttgaagcattcaaggtccgagtcacctctgacagagggctcggcgaactattcagaaacccggaggcatcggtgaggattgccaagtgggcagccgaactctccggctaccacatcagcttcgagcccaggacagccatcaagtcgcaagtcctggcagacttcgtcgtcgactggactgggccagcaacacagccggacccgtccacagagaagatctggaccatccattgcgacggtgcatggtgccatgcgggggcaggcgtcgctgcagtcgtcacctcacctgccggagtcaaacacagatatgcagcacgcctcaacttcgctctggaatccgacaaatgtacaaacaatatagcagagtatgaagcggttatcctcggcctccgcaagctaagggccctcggagtcaccacatgtatcatcaagacagactccaagatagttgccggacaggtcgagaaagactatgcagcaaaagaccccgccctcatgcaatacctcgcggctatccgaagtctcgagagacaattcaagggattcaccctgcagcatgtggatagggccaagaatgaggaggccgatgccttagccaaggctgccgccaggggcgagcccctgccctccgacgtgtttttccacaccatcggcactccagccgtccggagccccgaagggctccagataactaatgatagcgaaggccaccgtatagtcaacctaatcatgaccgaagactggagggcaccaataaccctgttcctacaggggtactatcatccagccgacgtcagtgaggcaaagcacctcagacatcgaagccgggacttcgctctgatcgagggccaactatacaagaaaggggtcagtcagccaatgctcaaatgcgtcaccgaaaccgaaggcatgcagatcctacgcgaagtccacagtggcacgtgcggctcgcacgcagggccaagggccctggctgccaaggcgatccgacaagggttttactggcccgcaatgatctgcgccgcaaaccgggtcacgaggtcctgcgaagcctgccagaagttctcccctcggtcaggcaacccctcgcaatatacaaagctgattgcccatacatggcctctccagcgctggggcctggacatcgtcgggcccctgcccaccgctcaggggaaccttaagttcgccttcgtagccgtcgaatacttcaccaaatggattgaagcgagggctgtttccacaatcacatcaaagactgcccaaaaattcttctggcagaacatcgtttgccgcttcggagtaccgtccaagctaacagttgacaacggcaagcagttcgacagccaagatttcaaggatttttgtttctccatcggcaccaagcttgccttcgcttcagtctatcatccgcagtccaacggggtcgtggagcgcgccaatgggaaaatattcacagctgtcaaaaagatgctcctcgatgaaagaaaaggcagatggaccgatttattaccggaggcagtctgggcgctaaacacaaccgagtgcagggcgaccgggttcactcctttccgccttctatacggatcggaggcaatgaccccgcaagaaataaagcatgggtccccgcgtacagttccgtcagccgtcctcgacgtggatgagccaacttcaaaagatctcattgacggagaccgggtcttcgccctacaggccctaaacaaatatcaagcccagaccaaagcatggcgcgaccgcgcagtcatcccgagggagttcagcgagggggacctcgtactcatccgaacagctcggacggagtccaagggcaagttggagcccaagtgggagggccccttcatagtcaaaacaaaagcttcccccagcgcctacaggctcacaacaccaaatggcgaggacctgtag

SEQ ID NO: 87960 - DNA, 313 bp, Zea mays
  Clone ID: MRT4577_180218C.1
ccgacatggtagagcttgagaaaagcaatattcttgtcatgggaccaacgggctcggtcagggaaagcattgctggcaaaaacactggcaagatttgtgaacgtgcccttcgttatagctgatgcgacaagcctcactcagtgtaccagacgatatttcgttcctgctacaatttttttatatagaacgcgcaggagaactgcgcatcttatacattagagaggaaaagaaaccttacaaaagaggagatgttgctgagcaaatctcccaaagacccacataaacccgaaggctggatatgttggtgaggatg

SEQ ID NO: 87961 - DNA, 4797 bp, Zea mays
  Clone ID: MRT4577_180219C.1
atggcacccaagaaagctaacccgaaggctgacgaggctgcgaaggcagcactacttgctgcaagaaagggcaaggccctcgccctcacccaatccacccaccaagaggccactgaagacgacgttctccgcacccgcgaagacgacaccctccgcacctgcggccctgaaggacaatcgcagccacccccaggcttcgccccattggagggcgcggacctcaccgaggacggtgaagtcctcggcgtctcagcggaagaacagctacagctgcgcgccctgcgcctcaagaaccgcaatctccagaggcagaaagagatactggaggccaagcgccagcgcgtgtccgcactagccaaagtgcgacaaatgatacgcgacgaagagcagaaggcccaggacctcgagcgggagatcgcgctgatgcagcgcgaaggccacctcggcctacagcacgggccacccctgtcgccgttgcatcttccggaggggacgacgccacaatggccaagtctttcatcatcgccctcgaaggcccagctctcacctggttcaccaggttgcctccgctgtccatcgattcctggagaagcctccgggacaagttcctgctcaacttccaagggtaccgcccagacaccgacgccttggtcgaactctcgctctgcaagcagcgtggaaaaggaaactctgcgggagtattaccgcaaatttttaacactcaagtcacagctgccctcagtcgatgaccagatcgctatccactacgctatcagtggccttcgcgtcggcgtcctctatagccattgcatcagagatccgcccaagaacctccaggaattatatcagctgtttgaaaaatacgccaaatccgaagagctccaccagcgcaaggttgagtcccaaaggaagcccaaagatgctccgcagtccagtcgcacgtggacgaggactccgcagccagactccggtcgagacggccgcaatcaacagcaagtgcacaacatcgccaaccagcaccccgctgctgacgcccctcgttgccaggaatatccccccagggccgcggaaatggaactcgcggtaggggtcgggggcgtgcgcatccgccgcgccgattctactgcctcttccatggcgaagactgcgcccaccaaaccaaagactgcccccgaaacgaaggccaccagagacaggatggcacgggcgcagccagccgactaccccagagttgtcgcacacacttaccagcaaccccctccaccatatatccacgcccccgccccgcatccaccgcagcacgcttaccaacaccatcaggaagtacaaatcgtacctcccccacccccaccaccacaccagcaacatcaaaacatcccccacgccccaaagcaggaagacttcgccgatcagccgtatcgcggagtcattcacatgataactggggggtccagcactgacttcgacaccaagcggcagaagcgggaccactaccgcaacatcaaccacgtcgccgtcactggcccagtcgtgcagacaaagtggtcccacatttcgctgaccttcgacgcacgagacgtcgacctgcgcagtgccccccacatcgacgccatggttatcaattgcagcgtggcaggctgggacctacacaaagtcctagtcgacaatggcagtcaggcggacatcatcttcctccacgccttcgatcgcatgggcataagccacagcctgctcaagccttcggacaacccgttgtatggcttcggcggcaagggcacctttcctgtcggcaaaatagagttgcctctctccttcggtgtagcacccaatgcccgaagtgagcaagtgacctttgatattgtggatatggtatatccatacaatgccatcatgggccggggctccatcaataagtttgaagcagccattcacggactgtacctatgtatgaagataccaggtccgttaggcgttattacggtctacggcaaccaacagactgcgcgcaacatagagctggacttcgtgcccggtcagagaaacgtgcactgcctcacggcccagcgcgaggccacacccaagcagacagtcattatcaacgaagacctcacttcgcatgaagaggagaaactcctctgctgcctgtccaagaataaagatgtcttcgcctggtctgccctcgacctggtcggagtcagccgatccataattgagcacagcttgggaattgacccttcggtgcgaccaaaaaagcagaggcttcgcaaaatgtccgacgagaagacagaggccgccaaggcggaggtgcaccgcctccaggaagccaaattcatcgagccggtggcttaccccacgtggctctccaatgttgtaatggtacagaaaaaaagcgggaagtggcgaatgtgcatcgacttcaccagtctcaacaaggcctgcccaaaggacaatttgccattgccgcggatcgacaaaatagtcgatagcgcggccggatgcgaggtcatgtcactcctcgactgcttctccggttaccaccagatatacatgaaggaggaagacaaggctagcaccagctttataacacccttcggtacatattgcttcatcagaatgccggagggactcaagaacgtcgggtccaccttctccaggcttaccaaaacagtgctcgaagggcaagttggcagaaatatattcacatatgtggacgacatcgtcgtcgccagcaagagcaaggaggaccatctcgccgacctcgccgagacattcgcgaacatgcgagacgcacgactccgcctaaacccggaaaagtgcgtcttcggcgttcgccaaggcaaaatattgggctacctggtatcacaccgcggcatcgaggccaacccaaccaagattcaggccattataaacatgatgcctccgcagtccgccagagacgtccagcgcctgacaggcagattggccgctctcaacagattcatctccaggtccgctgagcgaagtctccccttcctcaaaacactccgtggtgcaaaagacttcgcctggggaccagagcaggcagcggccttcgcctcattaaaacagtacctgtcggagttggccgtccttacaagccccgactcctcgctccccctgttgctctacgtcgcggcttcgccgcatgcggttagcgcggcactagtgcaggagcagacagttgagggcgtggtcaggcagtgccctgtttactatgtctccgaagtgctgacaccgtccaagtgcaacatgacagagctggagaagattgcctacgcagtcgttatgtcttcgcgcaaattgtgccattatttcgaagcattcaaggtccgagtcacctcagacaggggactcggcgaattgttcagaaacccggaggcatcggtgaggattgccaagtgggcggtcgagctctccggctaccacatcagcttcgagcccaggacagccatcaagtcgcaagtcctggcagacttcgtcgtcgactggactgggccgataacacagccagacccgttcgcagagaaggtttggacgatccattgcgacggcgcatggtgccatgcgggggcaggcgccgctgcagtcatcacctcaccagctagggtcaagcacagatatgcagcacgcctcagcttcgctctggaatctgacagatgcacaaataatatagcagaatacgaagcagtcatcctcggcctccgcaagctgagggccctcggagtcaccacctgcatcatcaaaacagactccaaggtagttgccggccaagtcgagaaagactatgcagcaaaggaccccgcacttatgcaatacctcgcggccatccgaagtctcgagagacaattcaagggattcaccttgcagcatgtggatcgggccaagaatgaagaggccgacgcattggccaaggccgccgccaggggcgagtccttgccctccgacgtgttctttcatgtcatcggcacgccagccgtccggagccccgaagggctccaaataactaatgacagcgagggcctccgcatagtcaaccttatcatgaccgaagattggcgggcaccaataaccctgttcctacaggggtactatcatccaaccgacatcagcgaggccaagcgcctcagacatcgaagccgagacttcacactgattgaaggccaactctacaagaaaggggtcagtcagccaatgcttaagtgcgtcaccgaaaccgaaggcatccagatcctacgcgaagtccacagtggcacgtgcggctcacacgcaggaccaagggccctagctgctaaggtgatccgccaaggcttttactggcccgcaatgatctgcgccgcaaatcgggtcacaaggtcctgcgcagcttgccagaagttttctcctcggtcaggcagcccctcgcagtatacaaagctaatcgcccacacatggcctctccagcgctggggcctggacattgtcgagcccctgcccaccgctcagaagaaccttaagttcgccttcgtcgctgtcgagtacttcaccaaatggatcgaggcaagggctgtttccataataacatcaaagactgcccaaaaattcttttggcaaaacattgtttgccgcttcggagtaccgtccgaactaacagttgacaacggcaagcagtttgacagccaagacttcaaggatttttgcttctccattggcaccaagcttgccttcgcctcagtctatcacccgcagtccaacggagttgtggaacgcgccaatggaaaaatcttcacagctgtcaaatag

SEQ ID NO: 87962 - DNA, 409 bp, Zea mays
  Clone ID: MRT4577_18021C.1
cggacgcgtgggtacgtgtccagcgagcgccggtggactcgttgacgtgcctcgccaccaccaccatgatcacggtcgatgatgatcaggtgaggagctgtggcggcgacagcggcggtattccagttcctactagcgacgacgccgccgccgggcgcagatgctgacgacgatgggcgagcaccaccagcagcagctgacggtgtccaggatccggacggccgtgtccatgctcacccgccgcacgggccacgcgcgtttccgccgcggccccgtcgcggagcgtcaccacgcatcgtcgtcggaccatcatcagctgcgcccgccggcggccggtggcggcgtggcgctggacctggacttactcgtcgccaagacgtgcgacgacgcggcggcggggtttagcgcg

SEQ ID NO: 87963 - DNA, 897 bp, Zea mays
  unsure (1)..(897): unsure at all n locations
  Clone ID: MRT4577_180220C.1
gacaaatccctctccttcttctcgcacggcgggtgcgcgtcgccggcgtcggtctcgaaccgccaactggcgccgtccggccgtttcgaccgtgcgcgcgccgcggcgcaggggcccatcgtccacgtcgccgaggtcgtcgcgtaccgcctcgtcttcctggactcgcaccactccttctacggcgggctctacgtcgggggcgtcgccgacgcccgcatccgccccgcgctccgcgcgctgaagcagaacctgtcgctgctcgtctccatcctcgtggaccgcgcgcagccggtggccgtccgggaggtgatgaaggcctcgttccaggggttcctcatcgtcctgctcgccggcggcagcgacaggagcttcacggtggaggaccacgcgatggtcgaagaggacttccggagcctgaagcgggccttctgcacgcgcggggaggggctcgtgtccgagcaggtggtcgaggccgaggcccgggccgcggagggcgtcgtcgcgctcatggcgctgacggcggagcagctccgtggaggagtttggaatcgcggcgtacgagtgcaccgaggcggtctccgagaggcagcgcctaccgttgccgccgacgaccaggcggtggagccgcagtgagccaaacaccatcctgcgcgtgctgtgccatcgcgacgacgaggtcgccagccacttcctgaagcgcacatttcagcttcccaagaggcggtaactgctgactaggtttcgcatcgcagggtgctttttttaaatcgtgcgncantgtgcgtgccntgtgtgtgtggtgcaattcagcacgggggagcatataagtcgaggaagggggtacatacacaaaacaatcgatctattgacaaagaatgacattgagctacaaaa

SEQ ID NO: 87964 - DNA, 751 bp, Zea mays
  unsure (1)..(751): unsure at all n locations
  Clone ID: MRT4577_180221C.1
ctaacggcggagcagctcgtggaggagtttggcatcgcggcgtacgagtgcaccgaggcggtctccgagaggcagcgcctaccgttgccgccgacgaccaggcggtggagccgcagtgagccaaacaccatcctgcgcgtgctgtgccatcgcgacgacgaggtcgccagccacttcctgaagcgcacatttcagcttcccaagaggcggtaactgctgactaggcttcgcaggatgcttttttaatcgttgcggccagtgtgggtgtgggtgcgtgtgtgtgttgcaattcagcacgggggagcatatagtcgaggaagggggtaacatacacaaaaacaatcgatcatattaacaaaagaatgacactgaagctacaaaaaataccatcctagaatatggatggcaatgtaatgtttacaaacatatgaaagaatatgatcacacaaatctatctggtttcacgatctcgcattctcacacagacttctatatctttgcattnnnnnaggttcggtaccctctctctctctcagtctctctctcctagcgggaggtgttccattatttcaacagaagattatactagcaaacatggattacaacagtcaaatcagactaccgagacaaagctgctcacctgacctggccaaatctggttctggtcctcataaaccctcctctcgtgaccggatcagactccttggcactgcagttccagtaagnnnnnaccgtccccaggatcgcctcg

SEQ ID NO: 87965 - DNA, 1792 bp, Zea mays
  Clone ID: MRT4577_180222C.1
atgggtccctcgggccggccgggaccactcatctccaggtggaatggagttagcttgcctgcacactcagtcacggtggcgtccctataaggcgtaggcctgacgtcacccacgccctcgcctcgcacggggcggcgcggcggccggcggagggaatggcgaggcgaagcagaggcagcggcagcgtcacggacgcggcgtcgaaggcggacgcggcggcgatgcggatggtgtcccgcaggggcgccgtgcggctggtgctcgtgtcggccaccgcctgggccatgctcgggctcgtcgcgctcgccttccacctccggccatgcagctcccgcgtcgcattcctctcagctctttgcaaaaaagacagtaaagttctctctgtgttggactcgatggggctctcatccaaaccactccaccgctgcccgatacctgttgcggatgatccaaatgttgttgtcataccaaagaggactcccaacacaattgtgaagaagttggcatatataactgttgacaaacaggataaagatccctcaccgctgtttggaggacgtcaaaactggaaacagagggaggagagctttaaactgaactctaccatgaaggttcactgcggatttatgaaaaatagtggtgcagatatggatatcattgatgtcaagtacatacagaaatgcaaattcgtggttgcctctggtattttcgatggttacgacattcctcaccagccatccaatattagccgccggtctcagaagctgttctgcttcctgatggtggtggacgaagtatctcttgattttatccaaaagaacaccaccgtcaagatcgacagcgctggagggaaatgggttggcatatggcgacttctaacagtgcaccgcctcccattcgacgaacctagaaggaatggaaagatacccaagattttaacacataggctgtttcctgaagcttggtatagcatttggattgatgggaaaatggagctcatagttgacccacttcttattctcgagagatatctctggcgtggaaaaaacacatttgcagtagctgcccataagcatcataggagcatctatgaagagggtgatgcaatcaaacggcggaagcgatatgctcgtcctttggttgatcttcagatgaaattatactattatgaggggatggagccttggagcccgaagaaaaagatgcctagcgatgtgccggagggagccgtgctgatccgggaacacacagcgacgaccaacctgttcagctgcctctggttcaacgaggtgaacctcttcaccccacgcgaccagatcagcttcggctacgtggcgcgcaggctcggcgacgctctcgagctcttcatgttccccaactgcgagtacaactcgctgttcgtcctgcacaggcacacgagggagcactcgtctaaggtcgagtgggccaaaacggtcgacgagatcgtggagaaggggctgagggagagtagaggagggttggggctgtggactccgtaccctgcggacctcagctccgtggaactccctgctgtaagaagaacttcgccggcaggataaggctaggctgtcaaagaccacaaagctcccagcctagcctgccgagcctgtggtctttgattcgttcatggttgtacagagtagaactccactgtttgtttgtttgtttggcgtagattatgtaggctgacgcttggagtttgttgcttccagttctgtacaacactcatctacggaggtacaacagaaggatttctcaccccccccccacc

SEQ ID NO: 87966 - DNA, 749 bp, Zea mays
  unsure (1)..(749): unsure at all n locations
  Clone ID: MRT4577_180223C.1
gcatcataggagcatctncgaggagggccacgcgatcaagctacggaagcgctacgcccgccctttggttgatcttcagatgaacatgtactattactagcggatggagccttggagcccgaagaaaaagatgcctggcgatgtgccggagggaaccgtgctgatccgggaacgctcagcgacgtccaacctgttcagctgcctctggttcaacgaggtgaacctcttcaccccacgcgaccagatcagcttcggctacgtggcgtgcaggctcggggacgctctcgagcttttcatgttccccaactgcgagtacaactcgctgttcgtcctgcacaggcccacgagggagcactcgtctaaggtcgagtgggccaaaacggtcgacgagatcgtggagaaggggctgagggacagtagaggagggttggggctgtggactccgtaccctgcggacctcagctccgtggaactccctgctgtaagaagaacttcgccggcaggataaggctaggctgtcaaaggccacaaagctcccagcctagcctgccgatcctgtggtctttgattcgttcatggttgtacagagtagaaaaaaaaaaaaaaaaaaaagaaaaaaaaaaaaaaaaaagcggccatcggaggaaatcatgttttttctgtagattctgtaggctgaagcttggagtttgttgcttccagttctgtacaacactcatctacgaaggtagcacagaaggatttctcac

SEQ ID NO: 87967 - DNA, 1427 bp, Zea mays
  Clone ID: MRT4577_180224C.1
agaaaatcgaggaaaaaaaaaaaaaaaacaaaaaaaatagagagagggagagagagaaacaagggaggagacatggaggaggaaggccatggcatcgtcattgtcggcggcggcatctgcggcctcgccactgctcttgcccttcaccggaaagggattgctagtgtagtgctggagaagtccgagaccttacgatcagacggagccgcgattggtgttcacgccaacggatggagagccctggagcagcttggagtagctgcagagctcagggaaactgcagaccttatcaccgggactcatgacgtgtggcaggggacaaacaagacagcccagcaggtaccagtcaggaaggaactccggtgcttgaaaaggaaggatctcatggagacgatggcgaagaacatacctgcaggatcgatccgcttcggctgccacgtggttgcgatccagcaggatcctggtaccaatggagccattcttactacagtcgatggtggcacgatcagggccaaggttctgatcgggtgcgatggcgggagctcggcggtagccaagtacctcggactgtctgagccgaaagcgatccctcgcacggttctgcgtggcttcactgggtatccgcatgggcatccgttcgggaccgagttcctgcggataagatcaggaggggagttcgccgtcggcagattgcctgtcacccgcaacctagttcatttcttcgtaaccgggcctaatcctccaacaggaatggtcaccaataaagacgtgagcgccacgaaggatttcatgctggagaagctgcgaggctgcgctcccgagatcgtcgagatggtccaggactcggacccagagtccctcaacgtcgtgaacagcatccggtaccggcctccgtggcaggtcgcgctcggcaccttccacaggggcgccgtcacggtcgccggcgacgccatgcacgccatgggcccgttcatcggccagggcggctcgtcggcgctcgaggacgccgtcgtgctcgcccgctcgctgtcacgggccgccgccggcgccggcggtcacggtgccgctgttcgggagtacgtccgggagaggaggcccagggtggcgctgctgtctctagagagctttctcgccgggacgctgctgcgcgccaggtcgctggtggggaagcttgcctgtttggctgtcctggcactcctaggcaccaggtcgcttcggcatgccgactacgactgcggtcgcctctaataagccatgcaatttccttgtggatcatggcatggcatctgtatgccgaacaaaaattgtctccatccttcatcccagatgtgctgaaacgatgcatctatttcttttttcctttttaactttgcatgttgaccactacactgaaagcaaatgaacaacattgctggtcagtttgtttc

SEQ ID NO: 87968 - DNA, 601 bp, Zea mays
  Clone ID: MRT4577_180225C.1
ccgggctcgagttttttttttttttttttaagagcggaagactttacaaacattctttaccttttcaaaactcaagtttattacataggaagagttacatttattacaagtcctaatatactcaaagtgcataacttattacattagcaggaaggtaggaaccctccaaagcttatacacaagcctaactaatcctcctctagaactggaagcgccctccagcctcacgaacacctagagtactcctcatcacctttgttgcagagaggaggttctagatccttctacccaacctttagttagatagctccatccacttgatgagcaggcactggagtagactccttcaaacaccacttcttctaggtgttcaagttctctgtgcgcgcacgtaatcgctcggggaagatgcaagttggtcggtggaggttgcccacgggctccggtctggccacggtgaggtagcaaccgggtgagcatggtcaccatggcacagggagatggcgtgcaagctctgggacagggcaaatctgggggctggcaagggagttatttttgactcgaatagaatgactatatgatcacgcgaggaaaacagatc

SEQ ID NO: 87969 - DNA, 515 bp, Zea mays
  Clone ID: MRT4577_180226C.1
gggaacaaaagggagaaatggcaaaaaaaaaaaccccagcgggccaggcaaaaacaaggggggggaaaaaaagcccaaacccaggggggggaaagccccgggggcaccccccaacaaggggggcccccccccaacacaggtgggggttcccccaaaaccacccccccgggggaaacccccggccaccagaaaaaaagcgggggggagcccaaataaggcggcccaattaaaaggggacccaagttccccattgggggacaaggaaggttcccggggggccccccccaaacaaaaaggggaccctaacaacccctaacgggggggacaaaagcccccgcggaagcacccttaaaaaggctttggcaaaaaaagggttaaggaaacgggaaaccccgcccgaaaccattgggtggccttccacaagccccttaataaaaggggccgaaaacgtcttgggggggggggctaaacgccgctcaccaaattaaaacccccaaaaatcggggggggggccc

SEQ ID NO: 87970 - DNA, 758 bp, Zea mays
  Clone ID: MRT4577_180227C.1
agaaaatattcttttcatttctaaaatggaaggttattacataggaacagttacatttattacaagtcctgatatactcaaagagcataacttattacaatagcaggaaggtaggaaccctccaaagcttaaacataagcctaactaatcttcctccagaaccggaaacgccctccagccttaggaacacctagagtactcctcatcacctttgttgcagagaagaggttctagatccttctacccaacctttagttagatagctccatccacttgatgagcaggcactggagtagactccttcaaacaccacttcttctaggtgttcttccaaagtctcggtgcgtgcgcgagattgaccagggatgactccagtcgatcggtccacggtgaggctgcccgcagcaccagttccacgatgacttgactccgttctggccacggtgatataggtgaactgctggttgtggtcaccactcagggattgctgtgctcggttcagggtcaggcaaacctagggactgggtagaggctacacaaaatagaatacaagaagctccacaccttgcagtggtctgtaggtggaactcaaggcagggagggtgaccttcaattaattttgccttttaagcaactggaatggacagatgcccctaaaacctgttcaacatgcagcaaggtcgtattcccatggtgccagcaatacctggacacatctacgtggctgccatgctcaaattactcacaggtcccggaga

SEQ ID NO: 87971 - DNA, 378 bp, Zea mays
  unsure (1)..(378): unsure at all n locations
  Clone ID: MRT4577_180228C.1
gccgcccttnnttttttttnnttttttttttnntttttttttttttttttttttttttttttttttttttttttttttttttttttgggggagaaaggggaacctggtccccgcctcccatggagaaaaaaggcggggcctataggtaaaattacaaggggggcaaacagaaaccccggggggtggctgaaaaccagggggtcacttgggccaatcagggctatgacccgcccaaaacataggcggggggggggaccatgatcagcgagagcgggtagagcatgtaggccaccaggcaggtccaaagcgggaaccgggccccgaagccggggaaaagggctgaggggcaagccggagctttgggggggcccgtttgcc

SEQ ID NO: 87972 - DNA, 344 bp, Zea mays
  Clone ID: MRT4577_180229C.1
aaaaaaaaggggggaaaacctaacagggttttcatttaaagcaaacccccaaaggggtcctaaaaacatgcatgcttttttagccgtttcacatgatccacgaaactgatagaagagcgtgcccgtgcacgtgttccaaacgagtcgggttcccaagggggggcagaaaaccctccatttccgttcttcaatttcctatgcgggcatttatctcactgagaattcggctttaaacttcccctggcctatcccacgtaaacttccaaccaataacttcacgcggttaatgggcaagcgaagcggtcagcgggtgtatgcatacctgcgcgggcatggggggcatt

SEQ ID NO: 87973 - DNA, 1614 bp, Zea mays
  Clone ID: MRT4577_18022C.1
ccgtccgaattcccggtggcggacgcgtccgctgcactgttggaaacgagatacccatttgatctaacaagtgagcaagcaaacgagagcaggtcttatggaggagccaactcaagccatgatgaacctattcccgtagcatgtcatttacagagtgcactgttgaggaggcatgagagcttcactgaaggagcaccattccttagtgactttttgcaagatacacagccttcccgattcagaccatacttcatgacggaaaaaatggctaacggggaaatgacagatccagttcttgaaggagaaactagtgaaaagagcaactctaaggccagctctgctcaagactcggatagtacttcttcagttgctgaccaagaaagccagaaggatgttctagaggattgctcaaaccaaggacaacaatcttctttcagtcaaacagaggaacatgcacatatagctcggcatgcaagggaggtttctctttcccttgacatggaaccacctgtcttaattagtgattcctctgatgatgacatatcactgtctggtgaacatataaatgattgggaggaagcacaacagagtgaaaattttagtttgtcccagaatacatggcaagaggatcctaatgtcatgcaacaccatcaagaaatagatatcacaagcaatggattgaatcaaatgtcaccacattcgaatgatcttgagttgacgtcgtcatcaactgaaactactgatgatccttttgaagtgaatgacattgaaccaccagctaaggaagtggtggtcgttgatgatacccacgttgtggatcctgtatatgattcaagtccttcgggaagcgagaggcctgcacctactggtttagtaattgacggacctgtcctaaaagatggtcatgcttgtactcttgttgttgaagcaaccatcgaagaagggggttcatcatcaagaatggaggtttcttccagtgaggtagctggacctagtttgagttctgtggagcaaagcgaatccccagagaaagaagcctctgagataagagagcagtccatggttggccatgacgaggcacatggaggttctgtcagccatgctgatccttcagtatctgatataagttctcagccgagtactgaaagttcaacaaatggtgattctggcagtggtgtaacaccatccttcacaaacgcagttctttagtttcttcataaaaaaaatgacagcggcaccgatcgagcatcatcaggttggtcgtcttcagcagtacttcgagctaggcgacttttgtgtggggcgagttcattgctgaggaaaccactgggagggtatatgtttgttgcaggaaatttcttagtgcttcaaagggactaggcaacattagcattattagcactgcactgtaaaaatggctagatatggttgttgcttaatttggccagcactctcgtttgtgaataccttgtggatccgacagtcaattttgtgccgtaaattaattgttaatttgctgcttcgagtaccgtagtctatggattgcctttggaactcatactacctgctgtgtgtaaggttttacacaagtctaaaatgaaaacgaaaaggatg

SEQ ID NO: 87974 - DNA, 390 bp, Zea mays
  Clone ID: MRT4577_180230C.1
acaaaacattcttttcatttctaaaactgaaggttattacataggaagagttacatttattataagtcctgatatactcaaagtgcataacctattacaatagcaggaaggtaggaaccctccaaagcttatacacaagcctaactaatcctccttcagaacaggaaacaccctccagccacaggaacacctagagtactcctcatcacctttgttgcagagaggaggttctagatccttctacccaacctttagttagatagctccatccacttgatgagcaggcactgaagtagactccttcaaacaccacttcttttaggtgttctacaagtcaattacaaatacatgtatgcttatgttatgatatgaaatgcaaactctcacaag

SEQ ID NO: 87975 - DNA, 1700 bp, Zea mays
  Clone ID: MRT4577_180231C.1
acaaaacattctttttatttctaaaactgaagcttattacataggaagagttacatttattacaagtcctgatatactcaaagtgcataacttattacaatagcaggaaggtaggaaccctccaaagcttatacacaagcctaactaatcctcccccagaactggaaacgccctccagccacaggaacacttagagtacttctcatcacctacaacaacatgggttcgaaaaccctgagtacggagtgtactttcgcaagccttacccgactaagggaaaatgactctcaaggatatgctggttaaataggaatcaaggaaaaggctttagcaagaatcaacttagatacttttgcagaaatagcttactaaagtgagtccttactttcaatattttaacgccagattaaatattaatagactctggttgcatctagtataatttcaccatctcatcaatacaacatcatttttattcctaatgtttgcatcctgacttaggttgcagggcagcgatcaagtctccactcttcggggatataacgggtgatccgaatcgatttactcagctgaggatctctaaccacatgacatatgctttcattaacctttgcacatgtctaccattcccacggatcctccatcacatgaacaggtccgcgccacccgagagcacaccaccccttttaggcggtcctttgccaggagggtacgtgccactctcgccatctctccactcccagtgcgcgattgtcttttcacgtatggaatagccgggttcaggcttacccatgacgaggtatgtggccagataaaaggtcctagatcatcaggccaacaatcggtacggtccttaatcgacacagacgggcgacctttcctgctcagcgtttggtcccattttaaactatttcaaaattttggcgcctggcagagggggccatgcctggataatgaatttatcaacgtcttgatgccttcattatcccaagcctattttcttttttgtaaaaacatgagtcatagataaaaaacatttttcttagtctatcagcatgactaagcatctctagcttttataaaacaggtgacaaggtgtggtaatcaacctttcaaggatggtaatgcatcaagggtttaatcaatcaactcctataacctaatgcaacatataagtgataaaaattttgtaaacacaaggaaggtggcaaatgcaccggggcttgcctgggataacactacgttagtgttgttaaatgacgaccacttgatgagcatctcccatcctagtacttcatcagatcatccattcttcaggtttattcatcagcgtcaccttgagattaattcatcctttgtcctccacattacgtaatcaattatcgtacctatatgatatgcataatgcatatgagcatgaatagcatgagacagataattcacaccaaagatgataacacttaaggtaagacattacaactcctaggtgaaacccttacatacctatgattctacacaaacatgatctgcaagttaaaaggacctaaaccgattatcaaacaattataaggctgcacataaacctgaacttcatggctagagtacactaccaaacatcactcacgaaggactaattcaattttacttcgtattactgatttcacctatacttacacaaaccggccggacccgggggtacc

SEQ ID NO: 87976 - DNA, 539 bp, Zea mays
  Clone ID: MRT4577_180232C.1
ttcgctagacttaaagtgtgtaaaaattatttagaaacataaggaagaggttgcatgcaccggggcttgcctttgttgcagagaagaggttctagatccttctacccaacctttagttagatagctccatccacttgatgagcaggcactcgtgtagactccttcaaacaccacttcttctaggtgttcaagttctctgtgcacgcacgtaatcgctcgggaaagatgcaagttggtcggtggagttgcccatggccccattatgggtagtacaccacagtagagttgaagcagcgaacacagtgagcttcactgatcaatgaagagcatggaatatgtacaacatagttgaggaatgcttggagattacctggccacggtgaggtagcaaccgggtaagcatggtcaccatggcacagggagatggcgtgcaagctctaggacagggcaaatctgggggctggcacgggagttattcttgactcgaatagaatcactatatgatcacgcgaggaacacagatcaaaactcgaaggcag

SEQ ID NO: 87977 - DNA, 479 bp, Zea mays
  Clone ID: MRT4577_180233C.1
ccgggccgaccgacgcgtccggcgacatactgtgtggtcctgcagtccttctttcatcatctgccgcatggcgagctctcggggcttattgctgcccttgtagcgcatcaccttacctcaatttgcggcctgcaactgcagcatccaggtccctgcccttgcaacgcagctgccgtcggtgtctactactgaggaaactatgtactgtagtaataatgtaatggagccgctgactagctacctagctcgctagtttactcatttatcgtcgattagtaacgtattttcacccatcaccatttgtggcattgtgagcaattaccttaattaaccatttaaatggaaagtaattatttttaatgaaaaaatattattgtaaacttgtttatttaattaatatatttttttttcattttttaaatttaatctattttattttagtctttaattattttctttatttttaattatattttatt

SEQ ID NO: 87978 - DNA, 976 bp, Zea mays
  Clone ID: MRT4577_180234C.1
ccgtattcatttctcatttctcttccttctagtatgatctgaactttcatttctgcccatctctcttccttctagtatgatctgaactttcatttctgcctaaccctagcaaattatttacacaaatttcagctcaagcggaagtccacaaatcctaataaaaccatcgcgaagtaaagagaaacatcctaataagaaaaattctgatcacacgagaaccggaagagcagtgaacaagaaggaacagagaaaccgcaagcacgaagcgcacgcacggacgggtgtgtccggacggacgagtcatcaaggccggaagagcgccccgatgaagctgaggcagccgagcagcatgcggcagagggagccgcgccagcggcggccgcggcggccggggtcctccctcgcggacggcgtcatctgcaggtacgcgtacgccgcgtgcttcacgagcgggtgccggatcatgtgtatgtccccgcagctgccgcacccgccgccgccgcaggccccgggcgagccgcccgccgcggcgtactccggcgacgacaggatgtcccggaggctggtgtacccgtgccccccgccgccgccgctgctgttgctgtcgtcgccgtcgctgccggcgccgccgttgggtatctcgatcaccggcggtggcgcccactgcggcgccgcgcgcttcttgggcgtgcgccagtgccgcagctcgaagtcgccggcggccaagccgttggcgagcggcgagcgcggccggcggcactgctgcgtcggcggcgtcggcgtcagcgaaagcttctgcggctccggcgcgacggcggctggcgccggcggcatagcagaagcggtgggggaggggggggcggtcgagtgaagcggcgagggcgcctcgagctggccggagaagtcgaccaggactccgcttccgctcgctggaacggtggtgtggtgcagactgcagaagagggagtgggaggag

SEQ ID NO: 87979 - DNA, 712 bp, Zea mays
  Clone ID: MRT4577_180235C.1
tttttttttttttttaaaaatattattttcatttctaaaactgaaggtcattacataggaagagttacatttattacaagtcctgatatactcaaagtgcataacttattacaatagcaagaaggtaggaaccctccaaagcttatacccaaacctaacttaatcctcccccagaactggaaacgccctccagccacaggaactccttgaatactcctcatcacctttgttgcagagaataggttctagatccttctacccaacctttagttagatagctccatccacttgatgagcaggcactggagtagactccttcaaacaccacttcttctaggtgttctacaagtcaattacaaatacatgtatgcttatgttatgatatgaaatgcaaactctcacaaggagaggtggggaatataaacactcctaaataagtatatgataggcatacacatctagacaacctagcacttaataaaagtgaccaatttgaattcgcttaggtaaaccagggaactaatccaacttatatctcatccaaaagcttaaaacttcttaagaaactgcatctcttccttagataaacttatcccctttccaaagcactaactcacacttgattagggattaacccttttattttggggcttacaaagttttcagagcaaatggattctgaacagcctcaaacctttaccacaaactcaaa

SEQ ID NO: 87980 - DNA, 197 bp, Zea mays
  Clone ID: MRT4577_180236C.1
tcgtgcagtcacctttttttttgatctgttgtgtatctagtagctggaggagatatgcagtttgcactttgcattggacacgaacttgggtcctcaacagataagaatttgtgagggtgatgggattgacagggtggaaaaattaagttttgggggcagaaagcatgagaaagctttgtgaaatacgtgctttgggg

SEQ ID NO: 87981 - DNA, 1585 bp, Zea mays
  unsure (1)..(1585): unsure at all n locations
  Clone ID: MRT4577_180237C.1
ataaacattcttttcatttctaaaactcaagttttacatgtttcgaaagagtaatatttattacaagtcctgatatactcaaagtgcataacttattacaatagcaggaaggtaggaaccctccaaagcttatacacaagcctaactaatcttcctccagaactggaaacgccctccagccttaggaacacctagagtactcctcatcacctacaacaacatgggttcgaaaaccctgagtacgaagtgtactttcgcaactcttacccgactaaggaaaaatgactctcaaggatatgctggttaaataggaatcaaggaaaaggttttagcaagaatcaacttagatacttttgcagaaatagcttactaaagtgagtccttactttcaatattttaacgccagattaaatattaatagactctggttgcatctagtctaatttcaccatctcatcaatacaacatcatttttattcataatgttcacatcctgacttaggttgcagggcagcgatcaagtctccactctccggggatataacggcgatccgaatcgatttactcagctgaggatctctaaccacaagacatatgtagcacttaacccttgcatatgtcaaccgttcccacggatcctccactacatgaacaggtccacgccacccgagagcacaccaccccttttaggtgatcctttgccaggaggggtacgtgccacgctcgccatctctccactcccagtgcgcgattgtcttttcatgtatggaatagccgggttcaagcttaccctgtcccatatccagggcatgtggccagttaagatagtccttgatcatacatgcctacatacgcatccaatccttaattaacctggacggaacatcacctgttcctagcccaagtcctgatttaagtacttccatccttanggattgtctgtgttccttaggatgaaaagagcattatagggaactttgcagtaagatcccactatgctcccaataaaaatatattcttgcaggtagaagccgtcctttctcaggataacccctgagctaggcattaatgcaaaagacaacctctatccacaagatctaagcagggctaagcatttttgtaaatcatattttgatacttcatcagaagtatctataaaggtatggatatcaaggtaggcaatgcatccaatagtttccaagcaactcctataaacttaatgcacatttcactagacttaaagtgtataaaaatcttttaaaaacacaaggaaggggttgcatgcaccggggcttgcctttgttgcagtgaggaggttctagatccttctacccaacctttagttagatagctccatccacttgatgagcaggcactggagcagactcctcttcagaaactacttcttgaatttcatcttcttctgggaattctggttacggcgaggtggactaattgccaacgatggtcaccacctagggactgggcaaacttgggcaggggagaggtgaacactggtgtggacagaagatttaccacccacacacacgctgcaacctggctggagcttgaggatcccggccgg

SEQ ID NO: 87982 - DNA, 636 bp, Zea mays
  Clone ID: MRT4577_180238C.1
tttggggacccgggcttctcctctgtgactctctcagaactcaagcaaccaatttcaaatccaatcatggggagctcaaccttctgtgccttcttcctcctgtgtgcaatcttggccgtccacgtggcacaatcctcatcctccaccctcgacctggacgccttcttcctccctctcaagtccggctgtcgcggatccgtcgccgagtgcagcctcctcgccggcgacgacgccgagtttctgatggagtcggagagcaaccggcgcattctagcaggaaggagctacataagctacggtgcgctgaggaggaacactgtcccttgctcccgacgtggtgcttcctattacaattgccgccccggcgctcaggccaacccctacagccgcggatgcagtgctatcacccgatgcaggcgttgaatctattcttcttctcttttttttttatttcatttttttatttatatttttgtaattgatgaaaattgttatattattattgtcgtgctactaaatatatatacacaagtagagaagagaaagagaagtagagatgaataaaatctaattgccgccgtttgtatctgtaaaaaaaaaaaaaaaaaaaacaaaaaaaaaaaaaaaaaagcggcc

SEQ ID NO: 87983 - DNA, 119 bp, Zea mays
  Clone ID: MRT4577_180239C.1
cgctccaagcctcgcccccccgtgacctccaccgtcccactgacgaaagccgtcatcgcgggaatccgcacctacgtgcgagcgtgtcttcggctagttccactcctgtcaggtacatc

SEQ ID NO: 87984 - DNA, 536 bp, Zea mays
  Clone ID: MRT4577_18023C.1
cggtgacctccttctatagtcatctaactaatttaatatacctgtgaagctgaacggagaaaatgacacacacatcactaatgtgttagggaagcgcttctgaacatgctaggattttttaaacatggcaaaaataatcaatacctcgatttatctaatctctctatactattctgtgtgcgcaatgtcgctgagagtaagtttgtgccaatattcacctggatactatttacataatccatgtcttgagaaagaagcactgtagtgtttctagttgataaggacgtaacccgtatgtgtcattgtgtttccattcgcaggctggccgctctttgctgctgctgcatgatggacgagtgctgctgctgctgcttctgacatacatgcacctgaagctcgctgtgtctgggcatcgtggcacggcaacatttgagtgattatggttgctggatagtgtttacttgaattttctctttgttattgttcgtaaataatctgaatagtacatcgtgttaataaaagggtatttgcagtgg

SEQ ID NO: 87985 - DNA, 218 bp, Zea mays
  Clone ID: MRT4577_180240C.1
ctggatggagccgaattcccatgcttttttgtcggcaagtcgggccttaagacctaggacggagcgcttcgggggctcggaacgggaacaggacaggacccaaacatggtatatccttcctgcccgggcgcctggacttgatgactctaaaattttgctgccctacccccacttagatcatgttttcctccaatgttatcgtaaacgcgacaggctga

SEQ ID NO: 87986 - DNA, 1170 bp, Zea mays
  Clone ID: MRT4577_180241C.1
tctgctttagcgcacctcgcgcccctgtgcgcgtccactcatcgcgatcgcctgctcgatcgatagttcaagctgctagcctgctacatgagacgagacacgagagagaagactagctctcgcagttgcgcttcttgcttccttccttcttgctcactctcagtctctcgttcgctcatcagctctttcccacctgcatggatccctccgggcctggcccgtcgtcagtcataggggcagctggaggcgatgaggcagcggccgtggcgctgcagcggccggcgcagctgagtagatacgagtcgcagaagcggagagactggaacacgttcctgcagtacctgcggaaccaccggccgccgctgacgctggcgcggtgcagcggcgcgcacgtgatcgagttcctcaggtacctggaccagttcggcaagaccaaggtgcacgcagccgggtgcgcctactacggccagcgcgcgccgccggggccctgcccgtgcccgctgcgccaggcgtgggggtcgctcgacgcgctcatcggccgcctgcgcgcggcgtacgaggagagcggcaggacgcccgagtccaaccccttggcggcgcgcgccgtgcggatctacctccgcgaagtgcgcgactcccaggccaaggcgcgcggtatcccctacgaaaagaagacgaagcgcaagcgcgcgcagcagcaggccacggagccttcgacgagctcgtctgatgctgccgccgggagtggcagggctagagcagcagctgctgcggcgtccgctgctcaggctggagggagtagcgctgcaccgagctccacttgagagtacagtagacctgcagatctttgtttaattatattaccatgttcgcgtgtatcgtaagattaatttgggctttgattctagttttgctccacatatgcttcttgcttctttcttctctcggcagtttcattctctttgtagcttgtttttggatctttttttctttccgatttattagataggtcagtatatatatggctagaatttgtagtaggctaaggatcggaggtggaatgggctgatttaattaatcagtgcaactatgtgttcatgatctgatacgtatacgtatatatcctaataagcaaaacaagggcgatttaggccaaaaaaaaaaaaaaaa

SEQ ID NO: 87987 - DNA, 243 bp, Zea mays
  Clone ID: MRT4577_180242C.1
ccggccgggatccagtcgaactatgccactaatctacaggaatgagagcaagaagatagcgaatcaatggatcgtgaatgagggttcctcggcgtgctcctcctggccgtcatcgcgtggtaaccgttcgcgtagcgccgcgcgccggtactacgtgagaggagagatcaatagaatccccccatgcaccgccaagggaggacgatgctcccgctcctatgctcgactctgcctcatccccag

SEQ ID NO: 87988 - DNA, 5664 bp, Zea mays
  Clone ID: MRT4577_180244C.1
atggcacccaagagagctaacccgaaggctgacgaggctgcgaaggcagcactgctggccgcaagaaagggcaaggccctcgccctcacccaatccacccaccaagagcccaccgaagacaacgttccccgcacctgcgaagacgacaccttccgcacctgcgggcccgaaggacaatcgcagccgcccccaggcttcgccccactggagggcgcggacctcaccgaggacggcgaggtcctcggcgtctcagcagaagaacagctacagctgcgcgccctgcgcctcaagaaccgcaatctccagaggcagaaagagatactggaggccaagcgccagcgtgtgtccgcactagccaaggtgcggcagatgatacgcgacgaggagcagaaggcccaagacctcgagcgcgagatcgcgctgatgcagcgcgaaggccacctcggcctacagcaagagccacccctccagcagcgcgcgcaaccggaagacacgcgcgaaggccacctcggcctgcagcatggcccacccctgcaacaccgggcgcagccggagaacccgcgtttcccccagcgcgactacgccttccagcacggcgcgccattccaaggggtcaactacctcgacgagcgaagtcccctggcgccacacctgcaagtgacgccttggccagctaacttccgagcaggggcatatcccaagtacaacggcagcaccgatccggcgcaatacataatgagttatcaagtcgccgttgcatccgccggaggggacgacgccacaatggcgaagtctttcatcatcgccctagagggcccagcactcacctggttcaccagattgcctccgctgtccattgattcgtggagaagtctcagggacaagttccttctcaacttccaagggtaccgcccagacaccgacgctttggccgagctctcgctctgcaaacagctggaaaaggagactctgcgggagtattaccgcaaattcttaacactcaagtcacagctgccctccgtcgatgatcagatcgctatccactacgccatcagtggccttcgtgccggcgtcctctacagccactgtatcagagatccacccaagaacctccaggagctatatcagctctttgaaaagtacgccaaatccgaagagctccaccagcgcaaggttgagtcccagcggaagcccaaggatgccccgcagtccagccgcacgtggacgaggactccgcagccggactccggtcgagatggccgcggtcatcagcaagtgcacaacatcgccaaccagcaccccgctgctgacccccctcgtcgccaggagtgtcccccccaggaccgcggaaacggaactcgtggcaggggccgagggcgcgcgcagccgccacgccggttctactgccttttccacggcgaagactgcgcccaccaaaccaaagactgccccgaaacgaaggccaccagagacagaatggcgcgggcgcagccagccgacaatcccagaattgtcgcgcataattaccagccaccccctccaccatatatccacgctcccgctccgcatccaccgcaccacgcttaccaacaccatcaggaagtacaaatcgtaccttcctccacccccaccaccacaccagcaacaccaaaacatccccatgccccaaagcaggaagacttcgccgatcaaccatatcgcggagtcattcacatgataacaggggggtccagcactgacttcgacaccaagcggcagaagcgggaccactaccgcagcatcaaccatgtcgcggtcaccggcccagtcatgcagacgaagtggtcccacataccgctaaccttcgatgcacgagacgtcgacctgcgcagcgccccccacatcgacgctatggtcatcaattacagcgtggcaggctgggacttgcacaaagtcctagtcgacaacggcagtcaggcggacatcatcttcctccacgccttcgaccgcatgggtataagccacagcctgctcaagccttcggacaatccgttgtatggcttcggaggcaaaggcaccttccccgttggcaaaatagagcttgccctctccttcggtgtagcacccaatgcccgaagtgagcaagtaaccttcgacattgtcgacatggtatattcgtacaacgccatcatgggccggggctcaatcaataagttcgaagccgccatccacggactgtacctatgtatgaagataccaggtccgctaggcgctatcacgatctacggcaaccagcagacggcgcgcaacatagagcgggacttcgtgcctggtcagaggaacgtacactgtctcacggcccagcgcgaggtccccgcgcccgccagcccagccgacaagcagcacaagaaggcacagttgcagagccaagatggaaccaggactgttccccttgatcaggccacgcccaaccacacagtcactatcagcgaagaccttgcgtcacatgccgaagaaatgctcctctgctgcctggccataaataaagatgtcttggcctggtccgccttagacctggtcggagacagccgatccataaatatgccagactaggaaacagacccctccgtgcgaccaaagcagcgaagcctcggggaaatgtccgacgaaaagacagcggacgccaaggcggtagcccaccgcgtcctggaagataaattcatcgagccagtggcttaccccacgtggctctccaatgtcgtaatggtgcagaaaaaaagcgggaaatggcgaatgtgcatagacttcaccagtctcaataaggcctgcccgaaggacaatttcccgttgccgcggatcgacaaaatagtcgatagcgcggccggatgcgaggtcatgtcactcctcgactgcttctccggttatcaccagatatacatgaaggaggaagacaaggctagcaccagctttataacacccttcggcacttattgcttcatcaggatgccggagggactcaagaatgcggggtccaccttctccagactcaccaaaacagtactcgaagggcaggtcggcagaaacatatttacatatgtggacgacatcgtcgtcgccagcaagaataaggaggaccatctcgccgacctcgccgagacattcgcgaacatgcgagatgcacgactccgcctgaacccggaaaagtgcgtcttcggtgttcgccagggcaagatattgggttacctggtgtcacaccgcggcatcgaggccaacccaaccaagatccaggccatcgtcgacatgtcgcctccgcagtccgtcagggacgtccagcgtctgacaggcagattggccgctctcaacagattcatctccaggtccgccgagcgaagtctccccttccttaaaacacttcgcggtgcgaaagacttcgcctgggggccggagcaagcagcggccttcgcctcattaaaacagtacttatcggagctggccatcctcacaagccccgactcctcgctccccctattgctctatgtcgcggcttcgccgcacgcggtcagcgcggcactagtgcaggagcagactattgaaggcacagtcagacagtgccctatttactatgtctccgaagtcctgacaccgtccaaatgcaacatgacagagctggagaagatcgcctacgcagttgttatgtcctcgcgcaaattgcgccattactttgaagcattcaaggtccgagtcacctctgacaggggactcggcgaactattcagaaacccggaggcatcggtgaggattgccaagtgggcagccgaactctccggctaccacatcagcttcgagcccagaacagccatcaagtcgcaagtcctggcagacttcgtcgtcgactggactgggccagtagcacagccggacccgtccacagaaaaggtctggaccatccattgcgacggcgcatggtgccatgcgggggcaggcgtcgctgcaattgtcacctcaccaaccggagtcaaacacagatatgcagcacgcctcagcttcgctctggagtccgacagatgcacaaacaacatcgcagagtatgaagcggttatcctcggcctccgcaagctaagggccctcggagtcaccacatgtatcatcaagacagactccaagatagttgccggccagatcgagaaagattatgcagcaaaggaccccgcgctcatgcaatacctcgcggctatccgaagtctcgagagacagttcaagggattcaccctgcagcatgtggatagggccaagaacgaggaggccgacgcattggccaaggctgccgccaggggcgagcccttgccctctgacgtgttctttcacaccatcggcacgcccgccgtccggagccccaaagggctccaaataactaatgatagcgagggccaccgtatagtcaacctaatcatgaccgaagactggcgggcaccaataaccctgttcctacaggggtactatcatccaactgacgtcagtgaggcaaagcgcctcagacatcgaagcagggacttcacactgattgagggccaattatacaagaaaggggtcagtcagccaatgctgaaatgcgtcaccgaaaccgaaggcatgcagatcctacacgaagtccacagtggcacgtgcggctcgcacgcagggccaagggccctggctgccaaggtgatccgacaagggttttactggcccgcaatgatctgcgccgcaaatcgggtcacgaggtcctgcgaagcctgccagaagttctctcctcggtcaggcaacccctcgcaatatacaaagctgattgcccatacatggcctctccagcgctggggcctggacatcgtcgggcccctgcccaccgctcaggggaaccttaagttcgccttcgtagccgtcgaatacttcaccaaatggattgaagcgagggctgtttccacaatcacatcaaagactgcccaaaagttcttctggcagaacatcgtttgccgcttcggagtaccgtccgagctaacagttgacaacggcaagcagttcgacagccaagatttcaaggatttctgtttctccatcggcaccaagcttgccttcgcttcagtctatcatccgcagtccaacggggtcgtgaagcgcgccaatgggaaaatattcacagctgtcaaaaagatgctcctcgatgaaagaaaaggcagatggaccgatttattaccggaggcagtctgggcgctaaacacaactgagtgcagggcgaccgggttcactcctttccgccttctatacggatcggaggcaatgaccccgcaagaaataaagcatgggtccccgcgtacagttccgtcagccgtccccgacgtggacgagccaacttcaaaagatctcattgacggagaccgggtcttcgccctacaggccctaaacaaataccaagcccagaccaaagcatggcgcgaccacgcagtcatcccgagggagttcagcgagggggacctcgtactcgtccgaacagctcggacggagtccaagggcaagttggagcccaagtgggagggccccttcatagtcaagacaaaagcttcccccagcgcttacaggctcacaacgccaaatggcgaggacctggagcactcctggaacatcgacaaccttcgcaaattttttgtttga

SEQ ID NO: 87989 - DNA, 275 bp, Zea mays
  Clone ID: MRT4577_180245C.1
acgcgtctaccctagcttctggtccacatccttttctctcctcatctggggattaatcctgattgttcttctggcagtagtaagactagaaggatcggatcggagtcatcagcctatgtcgaggtcaggttcgggaatggccgtctgtgatgaatgcatgctcaagttccaggatctctccgcatgcaggagcttcggcttcatcgtgttcaagatgaaccagaacgtgcagcaggttggtttggacaggctgcgggggccaggagatattctac

SEQ ID NO: 87990 - DNA, 266 bp, Zea mays
  Clone ID: MRT4577_180246C.1
tagcccgacgtagctggcgctcagccgatgaccctgtggatgcagacagcgcaatgctgggggcggatgcgatagcggtgcccaggctgacggtacgatcgcatcgcttctcactgtctaaatgatatgcattcgagaccatattagaaagaggagggacgaggatgatgaggacatgaggtggttaattttccctgcctaatatctgatgggttcaactagaagtgggggacaaaagatgaactccatacatcagatgaacaact

SEQ ID NO: 87991 - DNA, 5121 bp, Zea mays
  Clone ID: MRT4577_180247C.1
atggcacccaagagagctaacccgaaggctgacgaggctgcgaaggcagcactgcttgccgcgaggaagggcaaggccctcgccctcacccaatccacccaccaagagcccactgacgacaatattccccgcaccagcgaagacgacaccttccgcacctgcgggcccgaaggacaatcgcagccgcccctaggcttcgccccactggagggcgcggatctcaccgaggacggcgaggtcctcggcgtctcaacagaagaacagttacagctgtgcgccctgcgcctcaagaaccgcaacctccagaggcagaaagagatactggaggccaagcgccagcgtgtgtccgcactagccaaggtgcggcaaatgatacgcgacgaggagcagaaggcccaagacctcgagcgcgagatcgcgctgatgcagcgcgaaggccacctcggtctacagcaagagccacccctccagcagcgcgcacaaccggaagacatgcgcgaaggccacctcggcctgcaacatggcccacccctgcaacaccgggcgcagccggagaacccgcgtttcccccaccatgactacgccttccagcacggcgcgccattccaaggggtcaactacctcgacgagcgaagtcccctggcgccacacctgcaagtgacgccttggccagccaactttcgagcaggggcgtatcccaagtacaacggcagcaccgacccggcgcaatacataatgagttatcaggtcgccgttgcatccgccggaggggacgacgccacaatggtgaagtctttcatcattgccctagagggcccagcactcacctggttcaccagattgcctccgttgtccattgattcgtggagaagtctcagggacaaattcctgctcaacttccaagggtaccgcccagacaccgacgccttggccgagctctcgctttgcaaacagctggaaaaggagaccctgagggagtactaccgcaaattcttaacactcaagtcacagctgccctctgtcgatgatcagatcgctatccactacgccatcaacggccttcgggccggcgtcctctacagccactgtatcagagatccacccaagagcttgcaggagctatatcagctcttcgaaaaatatgccaaatccgaagagctccaccagcgcaaggttgagtcacagcggaaacccaaggatgccccgcagtccagccgcacgtggacgaggactccgcaaccagactccggtcgagatggccgcagtcaacagcaagtgcacaacatcgccaaccagcagcctgctgcggacccccctcgtcgccaggaatatcccccccagggccgcggaaatggaactcgtggcaggggccgagggcgcgcgcagccgccgcgccggttctactgccttttccacggcgaagactgcgcccaccaaaccaaagactgccccaagacgaaggcaaccagagatagaatggcgcgggcgcagccagccgacaatccaagaattgtcgcgcataactaccagccaccccctccaccatatatccacgctcccgctccacatccaccgcaccacgcttaccaacaccatcaggaagtacaaatcgtacctcccccacccccaccgccacaccagcaacatcaaaacatcccccatgccccaaagcaggaagacttcgccgatcaaccatatcgcggagtcattcacatgataacaggggggtccagcaccgacttcgacaccaagcggcagaagcgagaccactaccgcagcatcaaccacgtcgccgtcactggcccagtcgtgcagacgaagtggtcccacataccactaaccttcgacgcacgagacgtcgacctacgcagcgccccccacatcgacgctatggtcatcaattgcagcgtggcaggctgggacttacacaaagtcctagtcgacaacggcagtcaggcggacatcatcttcctccacgccttcgaccgcatgggtataagccacagcttgctgaagccttcagacaaccccttgtatggtttcggcggcaagggcacctttccagttggcaagatagagttgcccctctccttcggtgtagcacccaatgcccgaagcgagcaagtaaccttcgacattgtcgacatggtatatccgtacaacgccatcatgggccggggctccatcaataagttcgaagctgccatccacgggctgtacctatgtatgaagacaccaggtccgctaggcgccattacaatctacggcaaccagcagacggcgcgcaacatagagcgggacttcgtgcctggccagaggaacgtacactgtctcacgacccagcgcgaggtccccgcgcccgccagcccaaccgataagcagcacgacaaggcacagttgcagagccaagacgagaccaagactatccccctcgatcaggccacgcccaagcagacagtcactatcagcgaagacctcacctcacttgaagaagagagacttctctgctgcctggccaagaataaagatgtcttcgcctggtccgccctcgatctggtcggagtcagccgatccataatcgagcacagcttgggaattgacccttcggtgcgacccaaaaagcagagacttcgcaaaatgtcagacgaaaagacagaggctgccaaggcggaggtgcgccgcctcctggaggctaaattcatcgagccagtggcttaccccacgtggctctccaatgttgtaatggtgcagaaaaaaagcgggaaatggcgaatgtgcatagacttcaccagtctcaataaggcctacccaaaggacaatttcccgttgccgcggatcgacaaaatagtcgatagcgcggccggatgcgaggtcatgtctctcctcgactgcttctccggctatcaccagatatacatgaaggaggaagacaaggctagcaccagctttataacacccttcggcacttattgcttcgtcagaatgccggagggtctcaagaatgccgggtccaccttctccagactcaccaaaacagtactcgaagggcaggtcggcagaaatatatttacatatgtggacgacatcgtcgtcgccagcaagaataaggaggaccatctcgccgacctggccgagacattcgcgaacatgcgagatgcacgactccgcctaaacccggaaaagtgtgccttcggtgttcgtcagggcaagatattgggctacctggtgtcacaccgtggcatcgaggccaacccaaccaagatccaggccatcgtcggcatgtcgcccccacagtccgccagggacgtccagcgtctgacaggcagattggccgctctcaacagattcatctccaggtccgccgagcgaagtctccccttcctcaaaacactccgtggagcgaaagacttcgcctggggaccggagcaagcagcggccttcgcctcactaaaacagtacctgtcggagctggccatcctcacaagccccgactcctcgctccccctattgctctatgtcgcggcttcgccgcacgcggtcagcgcggcactagtgcaggagcagacagtcgagggcgcagtcagacagtgccctgtttactacgtctccgaagtcctgacaccgtccaaatgcaacatgacagagctggagaagatcgcctacgcagttgttatgtcctcgcgcaaactgcgccattactttgaagcattcaaggtccgagtcacctcagacagggggctcggcgaactattcagaaacccggaggcatcagtgaggattgccaagtgggcagccgaactctccggctaccacatcagcttcgagcccaggacagccatcaagtcgcaagtcctggcagacttcgtcgtcgactggactgggccagtaacacagtcggacccgtccacagagaagatctggaccatccattgcgacggcgcatggtgccatgcgggggcaggcgtcgctacagtcgtcacctcaccagccggagtcaaacacagatatgcagcacgcctcaacttcgctctggaatccgacaaatgtacaaacaatatagcagagtatgaagcggttatcctcggcctccgcaagctaagggccctcggagtcaccacatgtatcatcaagacagactccaagatagttgccggccaggtcgagaaagactatgcagcaaaagaccccgcgctcatgcaatacctcgcggctatccgaagtctcgagagacagttcaagggattcaccctgcagcatgtggatagggccaagaacgaggaggccgatgcattagccaaggccgccgccaagggcgagcccctgccctccgacgtgttttttcacaccatcggcacgccagccgtccggagccccgaagggctccagataactaatgatagcgagggccaccgtatagtcaacctaatcatgaccgaagactggcgggcaccaataaccctgttcctacaggggtactatcatccaaccgacgtcagtgaggcaaagcgcctcagacatcgaagtcgggacttcgcactgattgagggccaattatacaagaaaggggtcagtcagccaatgcttaaatgcgttaccgaaaccgaaggcatgcaaatcctacgcgaagtccacagtggcacgtgcggctcgcacgcagggccaagggccctggctgccaaggtgatccgccaagggttttactggcctgcaatgatctgcaccacaaatcgagtcacaaggtcctgcgaagcctgccagaagttctctcctcggtcaggcaacccctcgcaatatacaaagctgattgcccatacatggcctctccagcgctggggcctagacattgtcgggcccctacccaccgctcaggggaaccttaagttcgccttcgtagccgtcgaatacttcaccaaatggattgaagcgagggctatttccacaatcacatcaaagactgcccaaaaattcttctggcagaacattgtttgccgcttcggagtaccgtccgagctgacagttggcaacggcaagcagttcgacagccaagatttcaaggatttttgtttctccatcggcaccaagcttgccttcgcttcagtctatcatccgcagtccaatggg

SEQ ID NO: 87992 - DNA, 5556 bp, Zea mays
  Clone ID: MRT4577_180248C.1
atggcacccaagagagctaaaccgaaggctgacgaggctgcgaaggcagcactgctcgccgcaagtaagggcaaggcccttgccctcacccaatccacccaccaagaggtcaccaaagacaatgttccccgcgcccgcgaagacaacactttccgcacctgcgcccctgaaggacaatcgcagccacccccaggcttcgccacactggagggcgcggacctcgccgaggatggtgaagtcctcggcgtctcagcggaagaacagctacagctgcgcgccctgcgcctcaagaaccgcaatctccagaggcagaaagagatactggaagccaagcgccagcgtgtgtccgcactagccaaagtgcggcaaatgatacgcgacgaagagcagaaggcccaagacctcaagcgggagatcgcgctgatgcagcgcgaaggccaccttggcctgcagcatgagccacccctccagcagcgcgcccaactggaagacacgcgtgaaggccacctcggcctgcagcatgggccacccctgcaacaccgagcacaaccggaagacccgcgcttccctcagcgcgaccacaccttccagcacgccgcgccattccaaggggtcaactatctcgacgagcgaagccccctggcgccacacctgcaagtgacgccttggccagctaacttccgagcagggacatatcaaaagtacaacggcagcaccgacccggcgaaatacataatgagttatcaggtcgccgtcgcatccgccggaggggacgacgccacaatggcgaagtctttcatcatcgacctagagggcccagctctcacctggttcacaagattgcctccgttgtccattgattcctggagaagtctcagggacaagttcctgctcaacttccaagggtaccgcccagacaccgacgccttggccgagctctcgctttgcaagcagctggaaaaggagactctgcgggaatattaccgcaaatttttaacactcaagtcacagctgccttctgttgatgatcagatagccatccactatgccatcagtggccttcgtgccggtgtcctctacagccactgtatcagagatccgcccaagaacctccaggagctatatcagctctttgaaaaatatgccaaatccgaagagctccaccagcgcaaggtcgagtcacagcggaaacccaaagatgccccacagtccagccgcacgtggacgaggactccgcagccagactccggtcgagacggccgcaatcagcagcaagtgcacaacatcgccaaccagcgtcccgctgctgacccccctcgtcgccaggaatatcccccccagggccgcggaaatggaactcgtggtaggggccgagggcgcgcacagccgccgcaccgattctactgcctcttccatggcgaagactgcgcccaccaaaccaaagactgccccgaaacgaaggccaccaaagacagaatggcacgagcgcagccagccgacaaccccagaattgtcgcgcacaactaccagcaaccccctccaccatatatccacgctcccgccccgcatccaccgcaccacgcttaccaacaccatcaggaagtacaaatcgtacctcctccacccccaccaccacaccagcaacaccaaaacatcccccatgccccaaagcaggaagacttcgccgaccaaccatatcgcggagtcatccacatgataactggggggtccagcacagacttcgataccaagcggcagaagcgggaccactatcgcagcatcaaccatgtcaccgtcactggcccagtcgtgcagacaaagtggtcccacataccgataaccttcgacgcacgagacgtcgacctgcgcagcgccccccactgcgacgccatggttatcaattgcagcgtggcaggctgggacctgcacgaagtcctagttgacaacggcagtcaggcggacatcatcttccttcatgccttcgatcgcataggcataagccacagcctgcttagccttcggacaacccgttcacccaatgcccgaagtgagcaaataacctttgatatcgtggacatggtatatccttacaatgccatcatgggtcgaggctccatcaataagttcgaagcagccattcacggactgtatctatgtatgaagataccaggaccgttaggcgtcatcacagtcttcggcaatcaacagacggcgcgcaacatagagcgggacttcgtgcccggtcagagaaacgtgcactgcctcacggcccaacgcgaggtccctgcgcccgccagcccaaccgataaacagcacgacaagatacagctgcagagccaagacaggaccaaaactgtccccctcgatcaggccatgcctaagcagacagtcactatcagcgaagacctcacctcgcatgaagaagagagactgctctgctgcctgtcaaagaataaagatgtcttcgcctggtccgccctcgacctggtcggagtcagccgatccataattgagcacagcttgggaattgacccttcggtgcgaccaaaaaagcagaggcttcgcaaaatgtccgacgaaaagacagaggccgccaaagcagaggtgcaccgtctcctagaagctaaattcatcgaaccagtggcttaccccacgtcgctctcaaatgttgtaatggtgcagaaaaaaagcgggaaatggcgaatgtgcatagacttcaccagtctcaacaaggcctgcccaaaggacaatttcccattgccgcggatcgacaaaatagtcgatagcgcggccggatgcgagatatacatgaaggaggaagacaaggctagcaccagctttataacacccttcggcacatattgcttcatcagaatgccggagggactcaagaacgccgggtcaaccttctccagactcaccaaaacagtactcgaagggcaggtcggcagaaatatatttacatatgtggacgacatcgtcatcgccagcaagaacaaggaggatcatctcgccgacctcgccgagacattcgcgaacatgcgagacgcacgactccgcctaaacccggaaaagtgcgtcttcggcgttcgccagagcaaaatattgggctacctggtatcacaccgcggcatcgaggccaacccaaccaagatccaggccatcgtagacatgttgcctccgcagtccgccagggacgtccagcgtctgaccggcagactggccgccctcaacagattcatctccaggtccgccgagcgaagtctccccttcctcaaaacacttcgcggtgcaaaggacttcgcctggggaccggagcaggcagcggccttcaccgcactaaagcagtacctgtcggagctggccatcctcacaagccccgactcctcgctccccctattgctctacgtcgcggcttcgccgcatgctgtcagcgcggcactagtgcaggagcagacagtcgagggcatggtcaggcagtgccctgtttactatgtctccgaggtattgacaccgtccaagtgcaacatgacagagctggagaagattgcctacgcagtcgttatgtcttcgcgcaaactgcgccactactttgaagcattcaaggtccgagtcacctcagacagggggctcggcgaattattcagaaacccggaggcatcggtaagaattgccaagtgggcagccgaactgtccggctaccacatcagcttcgagcccaggacagccatcaagtcgcaagtcctagcagacttcgtcatcgactggactgggccaataacacaaccagacccgtccacagagaaggtttggacgatccattgcgatggcgcatggtgccatgcgggggcaggcgctgctgcagtcatcacctcaccggcaggggtcaatcacagatatgcagcacgcctcagcttcgctctggaatccgacagatgcacaaataatatagcagaatatgaagcagttatcctcggcctccgtaagctaagggccctcggagtcaccacctgtatcatcaaaacagactccaaggtagttaccggccaagtcgaaaaagactatgcagcaaaggaccccgcgctcatgcagtacctcgcggccatccgaagtctcgaaaagcaattcaaggggttcaccttgcagcatgtggatagagccaaaaatgaggaggccgacgcattggccaaggccgccgcgaggggcgagtccttgccctccgatgtgttctttcatatcatcggcacgccagccgtccggagccccgaagggctccaaataactaatgacagcgagggccaccgcatagtcaacctaatcatgaccgaagactggcgggcaccaataaccctgttcctacaggggtactatcatccaaccgacgtcagtgaggccaagcgcctcagatatcgaagccgggacttcgcactgattgaaggccaactctacaagaaaggggtcagtcagccaatgcttaagtgcgtcaccgaaaccgaaggcataaagatcctacgtgaagtccacagcggcacgtgcggctcacacgcagggccaagggccctagctgctaaggtgatccgccagggtttttactggcccgcaatgatttgcgccgcaaaccgggtcacaaggtcctgcgaagcctgccagaagttttctcctcggtcaagcagcccctcgcagtatacaaagctgatcgcccatacatggcctctccagcgctggggcctggacattgtcgggcccctgcgcaccgctcaggggaaccttaagttcgccttcgtcgctgtcgagtacttcaccaaatggatcgaggcgaggactgcttctacaataacgtcgaagactgcccaaaaattcttctggcaaaacattgtttgccgtttcggagtaccgtccgaactaacagttgacaacgacaagcagtttgacagccaagacttcaaggatttttgtttctccatcggcaccaagcttgccttcgcctcagtctttcatccgcagtccaacggggtcgtggaacgcggcaatgggaaaatcttcacagctgtcaagaagatgctccttgatgagaaaaagggcagatggaccgatttgttacctgaggcagtctgggcactaaacacgactgagtgcagggcgactgggttcactcccttccgccttctatacggatcggaggccatggccccgcaagaaataaagcatgggtccccgcgaacagtcccgtcagccgtccccgacgtggacgagccaacttcaaaggatctcattgacggagaccgagtcttcgccctgcaggccctaaacaaatatcaagcccagaccaaagcatggcgcgaccacactatcatcccgaggaagttcagcgaaggggacctcgtactcgtccggacagctcggacggagtccaagggcaagctggagcccaagtgggagggccccttcatagtcaagacaaaagcttcccccagcgcttataggctcacaacgccaaacggcgaggacctggagcactcctggaacatcgacaacctccgcaaattttttgtttga

SEQ ID NO: 87993 - DNA, 2613 bp, Zea mays
  Clone ID: MRT4577_180249C.1
atgggtgcaaggaattgggcagagactcaccggttagctctgtccacgcgcggcggcgaaagatcgaagtccggtgaggtcgatctcgggcctccggtgaagtccggcctggtccgagggcttggaaagcttcacgggccactggcggagctagccgaagctttggctcgacttgggggtggctggagtgggctggccacggtggccgaagctctggtggcaatggcgggcggaaatgcgctcgccggagctaaggagagggggctggccggtgaagccgggtgcgaagtcatgtcactcctcgactgcttctccagttaccatcaaatatacatgaaggaggaggacaaggccagcaccagcttcataacacccttcggcatgtattgcttcatcagaatgctggagggactcaagaacgtcgggtccactttctcccggcttaccaaaacggtgctcgaagggcaggtcggcagaaatatattcacgtatgtggacgacatcgtcgtcgccagcagaagcaaggaggatcatcttgctgacctcgccgaaacgtttgcaaacatgcgggacgcacgtctttgcctaaaccccgaaaagtgcgtcttcggcgtttgccagggaaaaatattgggctacctggtgtcacaccgcgaaatcgaggccaacccaaccaaaattcaggccatcatcaacatgacgcccccgcaatcagccagagacgtccagcgcctgacaggcagattggccgccctcaacagattcatctccaagtccgcagagcgaagtctccccttcctcaaaactctccgtggcgcaaaaaaacttcgcttggggaccagagcaggcagcggacttcacctcattaaaacagtacctatcggaattggcagtccttacaagccccgactcttcgctacccctgttgctttatgttgcggcttcgccgcatgcgaactggaaaagattgcctatgcagttgttatgacttcgcgcaaattgcgccactattttgaagcattcaaggtccaggtcacctcagataggggactaggagaattgttcagaaacccggaggcatcggtcaggattgccaaatgggcggccgaactctccggctaccacatcactttcgagcccaagacagccatcaagtcacaagttctggcagacttcgtcgtcgactggactgggccaataacacagccggacccgtccgcagagaaggtttggacaatccactgcgacggcgcatggtgccatgcgggggcagacgctgctgcaatcatcacctcaaccgccggggtcaagcacagatacgcggcacgcctcagcttcgctctggaatctgacagatgcacaaacaacatagcagaatacgaagttgtcatcctcggcctccgcaagctaagggcccttggtgtcaccacctgcattgtcagaacagactccaaggtagtcgccgaccaagtcgagaaagactacgcattaaaggaccccgcacttatgcaatacctcgcggccatccgaagtctcgagagacaattcaagggattcaccttgcagcatgtggaccgggccaagaatgaagaagccgacgcattggccaaggctaccttcagaggcgagtccctgccctccgacgtgttctaccatgttatcagcacgccagccgtccggagccccgaagggctccaaataaccaatgacagcgagggccaccgcatagtcaaccttattatgaccgaagactgtcgggcaccaataaccctgtttctacaggggtactaccacccaaccgacatcaacgaggccaagcgcctcaaacatcgaagccgggacttcgcactaattgagggtcagctttacaagaagggggtcagtcagccaatgcttaaatgtgtcaccgagaccgaaggcgtccaaatcctgcgcgaagtccacagcgtaccgtacgaactcacagttgacaacggcaagcagtttgacagccaagacttcaaggatttctgcttctccattggcaccaagcttgccttcgcctcaatataccacccgcagtccaacagagttgtggaacgcgccaatggcaaaattttcacagctgtcaagaagatgctcctcgacgagaaaaagggcaggtgggccgatttgttacctgaagcggtctgggcgctaaacacgactgagtgcagggcgactgggttcacccctttccgccttctatatggatcggaggccatgaccccgcaagaaataaaacatgggtccccacggacagtctcgtcaactatccccgacgtggacgaacccacttcgaaggatctcatcggtggagactgcgtctttgccctacaggctctaaataaataccaagcccaaacaaaagcatggcgcgaccacgcagtcatcccgagggaattcagcaaaggggacctcgtactcatccgaacagctcggacagagtccaggggcaagctggagcccgagtgggacgaccctttcattgtcaagacgaaggcatcccccagcgcatacaggctcgcaacgccaatcggcgaagacttggagcattcctggaacattgataatctccgcaaattttttgtttga

SEQ ID NO: 87994 - DNA, 249 bp, Zea mays
  Clone ID: MRT4577_18024C.1
attcggctcgagccggattgtccagctcactttatttaggccgccctgttgtgtttactacagggaggtgtttataacacggtccggcaatagtaccgacttgttccttcaagatgacctattgcgcgtacgcgtctcaccggaagtatacgctcgtaacaagatccgatatacgcggcctgttgcaatacacagatgtgaaactaacgtcctagcgtatggataccagactgtagctaaccaccgacc

SEQ ID NO: 87995 - DNA, 1026 bp, Zea mays
  Clone ID: MRT4577_180250C.1
atggcacccaagaaagctagctcgaaggctgacgaggctgcgaaggcggcactgctggccgcaaaaaagggcaaggccctcgccctcacccacaccacccaccaagaggccactgaagacgatgctctccgcacctgtggctctgaaggacagccgcaacctcccccagactttgcttcaccggagagcacggatgtcatcgaggacggcgaagtcatcggtgtctcagcggaagaacagctacagctgcgcgccctgcgcatcaagaaccgcaatctccagaagcaaaaagagatacttgaggccaagcgccaacgtgtgtctgcacaagccaaggtgcggcaaatgatacgagacgaagagcagaaggcccaggagctcgagcaagagatcgcgctaatgcagcgtgaaggccacttcggcctgcaacacgggccacccctgcaacagcgcgcacaagtcgaagacctacacttcccacagcgcgaccacgccatcccgcacgccgcgacattccaaggtgtcaactacctcgacgagcgaagtcccctagcgccacacctgcaagtgacaccttggcccgccaacttccgggcagggacctatcccaagtacaacggtagcacggacccagcacagtacatcatgagttatcaggtcgccattgcatcttccggaggggatgacgccacgatggccaagtccttcatcatcgccctcgaaggcccagctctcacctggtactccaggttgcccccgttgtccatcgactcctggcgaagcctccgggacaaatttctgctcaacttccaagggtaccgcccagacaccgacgccttggctgaactttcactctgcaagcagctggaaaaagagactctgcgggagtactaccgcaagtttctgaccctcaagtcacagctgccttcggtcgacgaccaaatcgccatccactacgccatcagtggccttcgggccggcgtcctttacagccactgcatcagggatccgcccaagcacctctag

SEQ ID NO: 87996 - DNA, 4005 bp, Zea mays
  Clone ID: MRT4577_180251C.1
atggcacccaagagagctaacccgaaggctgacgaggctgcgaaggcagcactgctcgccgcaagaaagggcaaggccctcgtcctcacccaatccacccaccaagagcccactgaagacaatgttccccgcacctgcgaagacgacaccttccgcacctgcgggcctgaaggacaatcgcagccgcccccaggcttcgccccactggaaggcgcggatctcaccaaggacggcgaggtgcggcaaatgatacgcgacgaggagcagaaggcccaagacctcgagcgcgagatcgcgctgatgcagcgcgaaggccacctcggtctacagcaagagccacccctccagcagcgcgcacaaccggaagacacgcgcgaaggccacctcggcctgcagcatggcccacccctgcaacaccgggcgcagccggagaacccgcgtttcccccagcatgactacaccttccagcacggcgcgccattccaaggggtcaactacctcgacgagcgaagtcccctggcgccacacctgcaagtgacgccttggccagctaacttccgagcagggacctatcccaagtacaacggcagcactgacccggcgcaatacataatgagttatcaggtcgccgttgcgtccaccggaggggacgacgccacaatggcgaagtctttcatcatcgccctagagggcccagcactcacctggttcaccagattgcctccgctgtccattgattcatggagaagtctcagggacaagttcctgctcaacttccaagggtaccgcccagacaccgacgccttggccgagctctcgctttgcaagcagctggaaaaggagactctgcgggagtattaccgcaaattcttaacactcaagtcacagctgccctccgtcgatgatcagatcgctatccactacgccatcagtggccttcgcgccggcgtcctctacagtcattgcatcagagatccacccaaaaacctccaggagctatatcagctctttgagaaatatgccaaatccgaagagctccaccagcgcaaagttgagtcacagcggaagcccaaagatgccccgcagtccagccgcacatggacgaggactccgcagccagactccggtcgagatggccgcagtcagccgcaagtgcacaacatcgccaaccagcagccggctgctgacccccctcgtcgccaggaatatcccccccagggccgcggaaatggaactcgtggcaggggccgagggcgcgcgcagccgccgcgccgattctactgccttttccacggcaaagactgcgcccaccaaaccaaagactgccccaaaacgaaggccaccagagacagaatggcgagggcgcagccagccgacaatcccagaattgtcgcgcataattaccagccaccccctccaccatatatccacgctcccgccccgcatccaccgcaccacgcttaccaacaccatcaggaagtacaaatcgtacctcctccacccccaccaccacaccagcaacaccaaaacatcccccatgccccaaagcaggaagacttcgccgatcaaccatatcgcggagtcattcacatgataacaggggggtccagcactgacttcgataccaagcggcagaagcgggaccactaccgcagcatcaaccatgtcgccgtcactggcccagtcgtgcagacaaagtggtaccacataccgctaacctttgacgcacgagacgtcgacctgcgcagcgccccccacatcgacgctatggtcatcaattgcagcgtggcaggctgggacttacacaaagtcctagtcgacaacggcagtcaggcggacatcatcttcctccacgccttcgaccgcatgggcataagccacagcctgctcaagccttcggacaacccgttgtatggcttcggcggcaagggcacctttcccgttggcaaaatagagttgcccctctccttcggtgtagcacccaatgcccgaagtgagcaagtaaccttcgatattgtcgacatggtatatccatacaacgccatcatgggccggggctccatcaataagttcgaagctgccatacacggactgtacctatgtatgaagataccaggtccgctaggcgctattacgatctacggcaaccagcagacggcgcgcaacatagagcgggacttcgtgcctggtcagaggaacgtgcactgtctcacgacccagcgcgagatatacatgaaggaggaagacaaggctagcaccagctttataacacccttcggcacttattgcttcatcagaatgccggagggactcaagaatgccgggtccaccttctccagactcaccaagacggtacttgaagggcaggttggcagaaatatatttacatatgtggacgacatcgtcgtcgccagcaagaataaggaggaccatctcgccgacctcgccgagacattcgcgaacatgcgagatgcacgactccgcctaaacccggaaaagtgcgtcttcggcgttcgccagggcaagatattgggctacctggtgtcacaccgcggcattgaggccaacccaaccaagatccaggccatcgtcgacatgtcgcctccgcagtccgccagggacgtccagcgtctgacaggcagattggccgctctcaacagattcatctccaggtccgccgagcgaagtctccccttcctcaaaacactccgcggtgcaaaagacttcgcctggggaccggagcaagcagcggccttcgcctcactaaaacagtacctgtcggagctggccatcctcacgagccccgactcctcgctccccctattgctctatgtcgcggcttcgccgcacgcggtcagcgcggcactagtgcaggagcagacagttgagggcgcggtcagacagtgccctgtttactatgtctctgaagtcctgacatcgtccaaatgcaacatgacagagctggagaagatcgcctacgcagttgttatgtcttcgcgcaaactgcgccattactttgaagcattcaagcatgtggatagggccaagaacaaggaggccgatgcattggccaaggctgccgccaggggcgagcctttgccctccgacgtgttctttcacaccataggcacgccagccgtccggagccccgaagggctccaaataactaatgatagcgagggccaccgcacagtcaacctaatcatgaccgaagactggcgggcaccaataaccctgttcctacaggggtactatcatccaaccgacgtcagtgaggccaagcgcctcagacatcgaagccgggacttcgcactgatcgagggccaactctacaagaaaggggtcagtcagccaatgcttaagtgcgtcaccgaaaccgaaggcatgcagatcctacgtgaagtccacagtggcacgtgcggctcgcacgcagggccaagggccctagctgccaaggtgatccgccaagggttttactggcccgcaatgatctgcgccgcaaatcgggtcacaaggtcctgcgaagcctgccagaagttttctcctcggtcaggcaacccctcgcagtatacaaagctgattgcccatacatggcctctccagcgctggggcctggacattgtcgggcccctgcccaccgctcaggggaaccttaagttcgccttcgtagccgtcgaatacttcaccaaatggatcgaagcgagggctgtttctacaataccatcaaagactacccagaaattcttctggcaaaacattgtttgccgcttcggagtaccgtccgagctaacagttgacaacggcaagcagtttaacagccaagatttcaaggatttttgtttttccatcggcaccaagcttgccttcgcttcagtctatcatccgcagtccaacggggtcgtggagcgcgccaatgggaaaatcttcacagctgtcaagaagatgctcctcgatgaaaaaaaggcagatggaccgatttattacctgaggcagtctgggcgctaa

SEQ ID NO: 87997 - DNA, 2148 bp, Zea mays
  Clone ID: MRT4577_180252C.1
ttatggatcggctgaccccgaccaggcgaagacgtctttgttcttggacaagcagcagaggagtttctcctcgtcatgcgaagtgaggtcttcgctgatggtgaccgtctgcttgggcgtggcctggtcgagggggacagccttggtcccgtcgttgctctgtagctgtgctttgtcgtgttctttgtcagttgggctggcgggcgcggggacctcgcgctgggccgtgaggcagtgcacgtttctttgcccggggacgaagtcccgctctatgttgcgcgcagtctgctggttgccgtagaccgtgatggcgcctagcggacctggtatcttcatgcacaggtacagtccgtgaatggctgcctcaaacttgttgatggagccccggcccatgatggcgttgtacggatacaccatatcgacgatatcgaaggtcacttgctcacttcgggcattgggtgctacaccgaaggagagaggcaactctattttgccgacgggaaacgtgcccttgccgccgaagccatacagcgggttgtccgaaggcttgagcaggctgtggcttatgcccatgcggtcgaaggcatggaggaaaatgatgtctgcctggctgccattgtcgactaggactttgtgcaggtcccagcctgccacgctgcagttgataaccatggcgtcgatgtggggggcgctgcgcaggtcgacgtctcgggcgtcgaaggttagcggcacatgggaccacttcgtctgcacgaccggaccggtgatggcgacgtggttgatgctgcggtagtggtcccgcttctgccgcttcgtgtcgaagtcggcgctggaccccccagtgatcatatgaatgactccgcgatacggctgatcggcgaagtcctcttgctttggggcgtgggggtggggggtgttttgttgttgctggtgtggaggtgggggtgggggaggtacgatttgtacttcctggtggtgttggtatgcgtggtgcggtggatgcggggcgggggcgtggatgtatggcggagggggttgctgatatgtgtgcgcgacaactctagggttgtcggctggttgcgcccgtgccatcctgtctttggtggccttcgtctctgggcagtctctggtttggtgggcgcagtcggagtctggctgcggagttctcgtccacgtgcggctggactgtggagcatctttgggtttcctctgggactcaactttgcgctggtggagctcttcggatttggcgtatttttcaaatagctgatataattcctggaggtttttgggcggatctctgatgcagtggctgtaaaggacaccggcgcgaaggccactgatggcgtaatggatggcgatctggtcatcgaccgagggcagttgtgacttgagtgtcagaaacttgcggtaatactcccgcagagtctctttttccagctgcttgcagagtgagagttcggccaaggcgtcagtgtctgggcggtacccttggaagttgagcaggaatttgtcccggaggcttctccaggagtcaatggacagcgggggcaaccgggtgaaccaggtgagagctgggccctcgagggcgatgatgaaagacttggccatcgtggcgtcgtcccctccggaagatgcaacgacgacctgataactcatgatgtactgtgctgggtcagtgctgccgttgtacttgggataggtccgtgcccggaagttggcatgccagggtgtcacttgcaggtgaggcgccaggggacttcgctcgtcgaggtagttgacccgttggcgcttggcctcaagtatctccttttgcttctggagattgcggtttttgatgcgcagggcgcgcagctgtagctgttcttctgctgagacaccgatgatttcgccgtcctcgatgaagtccgtgccctctggtggagcgaagcctgggggaggttgcggctgcccttcagggccgcaggtgcggagagcgtcgtcttcgcaggtgcggagaacgtcgtcttcgcaggtgcggagaacgtcatcttcagtagcctcttggtgggtggagtgggtgagggcgagggccttgcccttttttgcggccagcagtgctgccttcgcagcctcgtcagccttcgagctagctttcttgggtgccat

SEQ ID NO: 87998 - DNA, 4473 bp, Zea mays
  Clone ID: MRT4577_180253C.1
atgtcaattctacgcaaggcagacgcacttgcccgctcaggccctgcaagcaatacccatcacctggtcgtttgctgtgtggggtctggacctcgtcggtcccttgcagaaggcacccgggggctaccgcacctgctggtcgctctcgataaattctccaagtggatcgaggtccgacccctaaatagcatcaggtccgaacaggcggtggcgttcttcaccaacatcatccatcgctttggggtcccgaactccatcatcaccgacaacgacacccagttcaccggcacaaagttcctggacttctgcgaggaccaccacatccgagtggactgggccgccgtagctcaccttatgacgaatgggcaggtagagcgtgccaacggcatgattttgcaaggactcaagccacggatctacaacgacctcaacaagttcggcagacttggaatacggatccccgaggacgagggtgtacgacgaccgaagcaaccacaccaaccgagaagactcactggaccagctggaagaggctcgggacatggccttactacactcggctcggtatcagcagtccctacgacgctaccacgcccgaggggtttggtcccgagacctccaggtgggcgacttggtgcttcggctacgacaagacgctcgagggcgccacaagctcacgcctccctgggaaggaccgttcatcatcgccaagattttgaagcctggaacatacaagctgaccaacagtcaaggcgaggtctacagcaacgctcggaacatccgacagctacgtcgcttctacccttaagatgttttcaagtcgttcatatacctcatttacatacacaaataaaatctaaccatcaaggaagggttagccttgcctcggcaaagcccgaccctccctcgggggctagaaggggtgaaccccctctgcgtcaaaattttcctcagaaaaaatctttctgccagaacatctttcgtgcttttcgactacttcgaaagtgggatcctgaaaacgacggagtacacgatcagacatcagcagggggagcagcagcaccctcggtgccgactccgccttcggcggaatccgacccggcctcggacggcaacacgcaagtgccaacatttggcgcccaccgttcgtgctacgagaaaaaccacccacgatggcacccaatagagctaacccgaaggctgacgaggctgcgaaggcagcactgctcgccgcaagaaagggcaaggccctcgtttctcacccaatccacccaccaagaggccactgaagacaacgttccccgcacctgcgaagacgacactctccgcacctgcggccctgaaggacaatcgcagccaccctcaggcttcgccccactggagggcgcggacctcaccgaggatggtgaaatcctcggcgtctcagcggaagaacagctacagctgcgcggcctgcgcctcaagaaccgcaatcttcagaggcagaaggagatactcgaggccaagcgccagcgcgtgtccgcactagccaaagtgcggcaaatgatacgcgacgaagagcagaaggcccaggacctcgagcgggagatcgcgctgatgcagcgcgaaggccaccttggcctacagaacgggccacccctccagcagcgcgcacaactggaagacacgcgcgaaggccacctcggcctgcagcatgggccacccctgcaacaccgcgcacaaccggaagacccgcgtttcccccagcgcgaccacaccttcccgcacgccgtgccattccaaggggtcaactatctcgacgagcgaagtcccctggcgccacacctgcaagtgacgccttggccagctaacttccgggcagggacctatcccaagtacaacggcagcaccgacccggcgcaatacataatgagttatcaggtcaccgttgcatcttccggaggggacgatgccacaatggcgaagtctttcatcatcgccctagagggcccagctctcacctggttcaccaggttgcctccgctgtccattgattcctggagaagcctcagggacaagttccagctcaacttccaagggtaccgtccagacaccgacgcattggccgaactctcgctctgcaagcagctggaaaaggagactctgcgggagtattaccgcaaatttttaacactcaagtcacagctgccctcagtcgatgatcagatcgctatccactacgctatcagtggccttcgcgtcggcgtcctttacagccactgcatcagagatccgcccaagaacctccaggaattatatcagctgtttgaaaagtacgccaaatccgaagagctccaccaacgcaaggttgagtcccaaaggaagccaaaagatgctccacagtccagccgcacgtggacgaggactccgcagccggactccggtcgagacggccgcaatcaacagcaagtgcacaacatcgccaaccagcaccccgctgctgacgcccctcgtcgccaggagtatcccccccagggccacggaaatggaactcgcgactgcgcccaccaaaccaaagactgcccagaaacgaaggccaccagagacaggatggcacgggcgcaaccagccaacaaccctagagttgtcgcacacacttaccaacaaccgcctccaccatatatccacgccctcaccccgcatccaccgcaccacgcttaccaacaccatccggaagtacaaatcgtacctcccccacccccaccaccacaccagcaacagcaaaacatcccccatgctccaaagcaggaagacttcgccgatcagccatatcgcggagtcattcacatgataactggggggtccagtactgacttcgacacaaagcggcagaagcgggaccactactgcagcatcaaccacgtcgccgtcaccggcccagtcgtgcagacaaagtggtcccacataccattaaccttcgacgcacgagacgtcaacctacgcagcgccccccactgcgacgccatggtcatcaattgcagcgtggcaggctgggacctgcacaaagtcctagttgacaatggcagtcaggcggacatcatctttctccacgccttcgatcgcatgggcataagccacagcctgctcaagccttcggacaacccgttgtatggcttcggcggcaagggcacctttcctgtcggcaaaatagagctgcctctctccttcgatgtagcacccaatgctcgaagcgagcaagtaacctttgatatcgtggatatggtatatccatacaatggcatcatgggccggggctccatcaataagttcgaagcagccatccacggactgtacctgtgtatgaagataccaggtccgttaggcgtcattacggtctacggcaatcaacagactgcgcgcaacatagagcgggacttcgtgcccggtcagagaaacgtgcactacctcacggcccagcgcgaggccacgcccaagcagacagtcactatctgcgaagacctcacttcgcatgaagaggagaagctcctctgctgcctgtccaagaataaagacatctttgcctggtccgccctcgatctggtcggagtcagccgatccataattgagcacagcttgagaattgacccttcggtgcgaccaaaaaagcagagactttgcaaaatgtccgacgaaaagacagaggccaccaaggcggaggtgcaccgcctcctggaagacaaattcatcgagtcggtggcttatcccacgtggctctccaatgttgtaatggtacagaaaaaaagcgggaagtggcgaatgtgcatcgacttcaccagtctcaacaaggcctgcccaaaggacaatttcccattgccacggatcgacaaaatagtcgatagcgcggccggatgcgaggtcatgtctctcctcgactgcttctccggttaccaccagatatacatgaaagaggaagacaaggctagcaccagctttataacgccctttggcacatattgcttcatcagaatgccggggggactcaagaacgctgggtccaccttctccaggcttaccaaaacagtgctcgaaggccaggtcggcagaaatatattcacatatgtggacgacattgtcgtcgccagcaagagcaaggaggaccatctcgctgacctcgccgagacattcgcgaacatgcgagaacgcacgactccgcctaaacccggaaaagtgcgtcttcggcgttcgccaaggcaaaatattgggctacctggtatcacatcgcggcatcgaggccaacccaaccaagattcaggacatcataaacatgacgcctccgcagtccgccagagacgtccagcgcctgacaggcaggttggccgctctcaacagattcatctccaggtccgccgagcgaagtctccctgttgggggccttcggcttacgaaggtcctcaaaaacaggatttaacaatatttctggagtataatgcgtga

SEQ ID NO: 87999 - DNA, 627 bp, Zea mays
  Clone ID: MRT4577_180254C.1
aattcggcacgaggtgctggttggcgatgttgcgcacttgctgctgattgcggccgtcccgaccggagtctggctgcggagtcctcgtccacgtgcgactggactgcggagcatctttgggtttccgctgtgactcaaccttgcgctggtggagctcttcggatttggcatatttttcaaagagctgatatagctcctggaggttcttgggcggatctctgatacagtggctgtagaggacgccggcacgaaggccactgatggcgtagtggatagcgatctgatcatcgacggagggcagctgtgacttgagtgttaaaaatttgcggtaatactcccgcagagtctccttttccagctgcttgcaaagcgagagctcggccaaggcgtcggtgtctgggcggtagccttggaagttgagtaggaacttgtcccggaggcttctccaggaatcaatggacagcggaggcaacctggtgaaccaggtgagagcggggccctccagggcgatgatgaaagacttcgccattgtggacgtcgtcccctccggcagatgcaacggctacctgataactcattatatattgtgctgggtcggtgctgccgttgaacttgggatatgcccct

SEQ ID NO: 88000 - DNA, 371 bp, Zea mays
  Clone ID: MRT4577_180255C.1
ggtacacgggcccctctctcgagttttttttttttttttttttttttttttttttttttttttttttttttttttttttttttttttttaaaaaaaaaaaagggctcctgggggggaataaaatccctgaaaaaattaatttggggcgttgggccaagggccaacacccaccccattgttactgcactggcccccatgccatgaaggcccccaaccgccaaaaaaaaaaaaatttccagccttttatccaggcaacgccacaggccagggccaagagtttttcctaagttccttttgaacacgaaaaaaaaacctgaccgaggcagaaacacaggcacagccgggggtcaacccggttaaaggcgtccgct

SEQ ID NO: 88001 - DNA, 4689 bp, Zea mays
  Clone ID: MRT4577_180256C.1
atggcacccaagagagctaacccgaaggctgacgaggctgcgaaggcagcactgcttgccgcaagaaagggcaaggccctcgccctcacccaatccacccaccaagaggccactgaagacaacgttccccgcacctgcgaagacgacactctctgcacctgcggccctgaaggacaatcgcagccacccccaggcttcgccccactggagggcgcggacctcaccgaggatggtgaagtcctcggcgtctcagcggaagaacagctacagctgcgcgccctgcgcctcaagaaccgcaatctccagaggcagaaagagatactggaggccaagcgccagcgtgtgtccgcactagccaaagtgcggcaaatgatacgcgacgaagagcagaaggcccaagacctcgagcgggagatcgcgctgatgcagcgcgaaggccaccttggcctgcagcacgggccacccctccagcagcgcgcacaactggaagacacgcgcgaaggccacctcggcctgcagcatgggccacccctgcaagaccgcgcacaaccggaagacccgcgtttcccccagcgcgaccacaccttcccgctcgtcgcgccattccaaggggtcaactatctcgacgagcgaagtcccctggcgccacacctgcaagtgacgccttggccagctaacttccgggcagggacctatcccaagtacaacggcagcaccgacccaacacagtacataatgagttatcaggtcgtcgttgcatcttccggaggggacgacgccacaatggcgaagtctttcatcatcgccctagaaggccccgctctcacctggttcaccaggttgcctccgctgtccattgattcctggagaagcctccgggacaagttcctgctcaacttccaagggtaccgcccagacaccgacgccttggccgaactctcgctctgcaagcagctagaaaaggagactctgcgggagtattaccgcaaatttttaacactcaagtcacaactgccctcagtcgatgaccagatcgctatccactacgctatcagtggcctttgcgccggcgtcctttacagccactgcatcagagatccacccaggaacctccaggaattatatcagctgtttgaaaaatacgccaaatccgaagagctccaccagcgcaaggttgagtctcaaaggaagccaaaagatgctccacagtccagccgcacgtggacgaggactccgcagccggactccggacgagacggccgcaatcaacagcaagtgcataacatcgccaaccagcaccccgctgctgacgcccctcgtcgccaggagtatcccccccagggccgcggaaatggaactcgcggtaggggtcgggggcgtgcgcagccaccacgccgattctactgcctcttccacggcgaagactgcgcccaccaaaccaaagactgcccagaaacgaaggccaccagagacaggatggcacgggcgcaaccagtcgacaaccccagagttgttgcacacacttaccagcaaccccctccaccatatatccacgcccccgccccgcatccaccgcaccacgcttaccaacaccatcaggaagtacaaatcgtacctcctgcacccccaccaccacaccagcaacatcaaaacatcccccatgctccaaagcaggaagacttcgccgatcagccatatcgcggagtcattcacatgataactggggggtccagcactgacttcgacacaaagaggcagaagcgagaccactaccgcagcatcaaccacgtcgccgtcaccggcctagtcgtgcagacaaagtggtcccacataccgctaaccttcgacgcacgggacgtcgacctgcgcagcgccccccactgcgacgccatgatatcaggtccgttaggcgttattacggtctacggcaaccaacagacggcgcgcaacatagagcgggacttcgtgcccggtcagagaaacatgcactgcctcatggcccagcgcgaggtccccgcgcccgccagcccaaccgataaacagcacgacaaggcacagctgcagagcaacgacgggaccaagactgtccccctcgatcaggccacgcccaagcagacagtcactatcagcgaagacctcacttcgcatgaagaggagaagctcctctgctgcctttccaagaacaaagatgtcttcgcctgtgatggtgcagaaaaagagcgggaagtggcgaatgtgcacgacttcaccagtctcaataaggcctgcccaaaggacaatttcccgttgccgcggatcgacaaaatagtcgatagcgcggccggatgcgaagtcatgtcactcctcgactgcttctccggttaccaccagatatacatgaaggaggaagacaaggctagcaccagctttataacacccttcggcacatattgcttcatcagaatgccggagggactcaagaacgccgggtccaccttctccaggcttaccaagacagtgctcaacgggcaagttggcagaaatatattcacatatgtggacgacatcgtcgtcgccagcaagagcaaggcggaccatctcgctgacctcgccgagacattcgcaaacatgcgagacgcacgactccgcctagacccagaaaagtgcgtcttcggcgttcgccaaggcaaaatattgggctacctggtatcgcaccgcggcatcgaggccaacccaaccaagattcaggccatcataaacatgacgcctccgcagtccgccagagacgtccagcgcttgacaggcagattggccgctctcaacagattcatctccaggtccgccgagcgaagtctccccttcctcaaaacacttcgtggtgcaaaagacttcgcttggggaccagagcaggcggcggccttcgcctcattaaaacagtacctgacagagttggccgtccttacaagccccgactcctcgctccccctgttgctctacgtcgcggcttcgccgcacgcggtcagcgcggcactagtgcaggagcagacagttgagggcgtggtcaggcagtgccccgtttactatgtctccgaagtgctgacaccgtccaagtgcaacatgacagagctagagaagattgcctacgcagtcgttatgtcttcgcgcaaattgcgccattacttcaaagcattcaaggtccgagtcacctcagacaggggactcggcaaattattcagaaacccggaggcatcggtgaggattgccaagtgggcggccgaactctccggctaccacatcagcttcgagcccaggacagccatcaagtcgcaagtcctggcagacttcgtcgtcgactggactgggccaacaacgcagccagacccgtccgcagagaaggtttggacgatccattgcgacgacgcatggtgccatgcgggggcaggcgccgctgctgtcatcacctcaccagtcggggtcaagcacagatacgcagcacgcctcagcttcgctctggaatccgacagatgcacaaataatatagcagaatacgaagcagtcatcctcggcctccgcaagctaagggccctcggagtcaccacctgcatcatcaaaacagactccaaggtagttgccggccaagtcgagaaagactatgcagcaaaggaccccgcgcttatgcaatacctcgcggccatccgaagcctcgagagacaattcaagggattcaccttgcagcatgtggatcgggccaagaatgaagaggccaacgcattggccaaggccgccgccaggggcgagtccttgccctccgacgtgttctttcatgtcatcggcacgccagccgtccggagccccgaagggctccaaataactaatgacagcgagggccaccgcatagtcaaccttatcatgaccgaagactggcgggcaccaataaccctgttcctacaggggtactatcatccaaccgacatcagtgaggccaagcgcctcagacatcgaagccgagacttcgcaatgattgaaggccaactctacaagaaaggggtcagtcagccaatgcttaagtgcgtcaccgaaaccgaaggcatccagatcctacgcgaagtccacactggcacgtgcggctcgcacgcagggccaagggccctagctgctaaagtgatccgccaaggcttttactggcccgcaatgatccgcgccgcaaatcgggtcacaaggtcctgcgaagcctgccagaagttttctcctcggtcaagcagcccctcgcagtatacaaagctgatcgcccacacatggcctctccagcgctggggcctggacattgtcgggcccctgcccaccgctcaggggaaccttaagttcgccttcgtcgctgtcgagtacttcaccaaatggatcgaggcaagggctgtttccacaataacatcaaaaactgcccagaaattcttttggcaaaacatcgtttgccgcttcggagtaccgtccaaactaacagttgacaacggcaagcagtttgacagccaagacttcaaggatttttgcttctccattggcaccaagcttgccttcgccttagtctatcatccacagtccaacggagttgtggaacgcgccaatgggaaaatcttcacagctgtcaaaaagatgctcctcgatgaaaaaagggcagatggaccgatttgttacccgaggcagtctgggcactaa

SEQ ID NO: 88002 - DNA, 126 bp, Zea mays
  Clone ID: MRT4577_180257C.1
ccggtcgaccccgcggggtcataggaacgacactgtgcggggtcgggacgaccggcagcctactcacgtgatgccagtgaggaggcggccgccagactcatgatttacagaaaccgagtgtgtgtg

SEQ ID NO: 88003 - DNA, 673 bp, Zea mays
  Clone ID: MRT4577_180258C.1
gtgacttgagatattgccagaaatgttgccactataaacctccacgtgcacaccattgccgtgtttgcaagagatgtgttctgaaaatggaccatcattgcatttggattaataactgtgttggacatgagaactacaagattttcttggtctttgtattatatgctgtggttgcaagcttctatgcattgattctcatcgtagggagcgttttgcacagtgttcctaaagatgagcagccaggcagcgattcttctcgaacatccattattatctgtggggtcattctttctccattagcgttagcgctggcagtgctcttaggttggcatatttacctcatattacagaataaaactacaattgagtaccatgaaggagttagagcgatgtggttggcagaaaaaggtggagatctctatcatcatccatatgaccttggtgtctatgagaatcttatttcagttcttgggcctaacatattttgctggctctgccctgtattgaatactgttggaaatggccttcggtaccgtacatcctatgatattccggtatctacaccaccaaaaaaaatagcagcacattcacaataggtcgtgtaactctgcaacatacaggagatgatgactacacagcctctcgccaggtgtttgtcttgaatcgagacatg

SEQ ID NO: 88004 - DNA, 1337 bp, Zea mays
  Clone ID: MRT4577_180259C.1
ctggccgggtgcgcgtcgtcaaggacggcaaggttgaggaccaagatggcaatgtcgtcggcgagatcgtcgagggcaacgccaagaagcttgtcggccttgctgtcgacgaggatggtgatattatcgacaagtacggtaacgtcaagggtcacgccgacccttgggaggaagaggaggaggaagaggtcgacctctctgcccttgctggtaccaccatcaacaagaccggcaacgctgtcgacagcagcggtaagatcattggccgtgttgctgagggcgatgtcgcttctcttgttggcaagaaggtcgacggccagggtcagatctgggacaacgctggcaacgtcattggacgtgccgagcttgtcttcggcgaagacaccagccccgaaggaccgttcgctggcttcgagggtcttcagatcaacaaggatgagaccatcaccactcccgcaggagacatcattggtcgtatcaccgagggcgacatcaagaagcttcttggtcacaccgttgaagaagatggcagcatcatcgacaagaacggcaaccagatcggtgctgccgagcgctgggagcctgaggagaaggagcgtcgcgtcaaccccatgtctggaatgcgtgtcaacaaggagggtgaggtccgcgatgagaacggagacctcgtcggtcgtctcaccgacggcaaccttggacactgcgtcggccaggagatcgatgataacggcaacgttgttgaccatgacggcaacaagatcggcgagtgcactcttctcgagaacatcgacgaggaggagtacgagggccccaccgaggaggagctcgctgaggccgcgaagcgcgagcaggagcgtgagatcgcgcagaagatgaacaccatctgccagcagactctcgagcgcgtccagcccatctgcaagcagatcaaggagcacatggacaaggccgaccgtacccccagggacgagctcgacgaggaggagcttgtcaacaacgtcaagcccctcatcgaagaggccggtcgtcacttgcaagagtgcaacggctcccttcgcggcctcgaccccgacggcaagatcgctgctcaggctaagggccgccagggcactggcgaggcgactcctgaggagcacgctctcgctgagagcctcaaggagctgaccaccaccgttgtcaccaccatcgacgacgcgaagaagaagctcaacgacatgcctcacgccaagaagaagctcaaccccctctggggcctgatgacccagcctctgttccagatcctcgcagccgtcggcctcttgctggcaggtgtccttggtctggtcggtcagctgctc

SEQ ID NO: 88005 - DNA, 674 bp, Zea mays
  Clone ID: MRT4577_18025C.1
ccccggctgaggaattcggcacctcacattttacgagatgtggctggttgtcattcatcaagcacatgtgagttaatctcgtttttcttcttcacgacttgattgttttcagcaaactctactatgcgtgctctgatttggttgtcttccacctcacttgtgtgctctgatttgattgtcttccacctcacctcattagactatgttggaatttatcgaagaaaccaggagcaaagttaaatctgcatatttgagatggaagaaaatagttatacgaagccatggttgttactttttcactagatcagatagattttatttgttcaatgaacaacatattattttttggttcctgtagagtgggtgtgctaccttgtttgatacctgaagttggcatggagttcaatactattgatgaggtttggatgttttggattgcctatggaggtcaaaaaggggttgaggttagaaaaagctacacaaacaaaagaaaatctgacggaaagattaggtcttgtagatatatttgtgcagaagcgggtcatagaaaaaagataaaagggatcatctaacaaaagtgtccaagagctgaaccagaaccgattgtcaagttcgcatgggtgttgtactagatcaagagaaggagaaacataaagttgttgttctagttttgg

SEQ ID NO: 88006 - DNA, 1506 bp, Zea mays
  Clone ID: MRT4577_180260C.1
gcgggcctctgctccttccgcccgccgatcttagggagcgcgagctcttcttaaacgggcgcacgccgcgtgcgcgcccgacccgcttgccccgcgctcggacgcgtcccgatgcgcctccgccggccggaaaaaccctactagtcctagggctcgcctcgccgccctgatggggggccggccggggtacctcaccctgccgatcttttccgtggtcgcggcgatcgggtacgtctactacaccacggtgttcgtggccgtgccgcggtggctgggcctgtccacggctgcgggggtagccaacgccgccgcgttcacagcgctagcagctgcctgcctcgccacctacgccgtcgccgttcgcagggaccccgggcgggtgcccccgggtttcgtgcccgacgtcgaggacgccgagagcaccgtccacgagatcaagcgcaagggtggtgacttgagatattgccagaaatgttgccactataaacctccacgtgcacaccattgccgtgtttgcaagagatgtgttctgaaaatggaccatcattgcatttggattaataactgtgttggacatgagaactacaagattttcttggtctttgtattatatgctgtggttgcaagcttctatgcattgattctgatcgtagggagcgttttgcacagtgttcctaaagatgagcagccaggcagcgattcttctcgaacatccattattatctgtggggtcattctttctccattagcgttagcgctggcagtgctcttaggttggcatatttacctcatattacagaataaaactacaattgagtaccatgaaggagttagagcgatgtggttggcagaaaaaggtggagatctctatcatcatccatatgaccttggtgtctatgagaatcttatttcagttcttgggcctaacatattttgctggctctgccctgtattgaatactgttggaaatggccttcggtaccgtacatcctatgatattccggtatctacaccaccaaaaaaaatagcagcacattcacaataggtagtagttgctaatttgtgaaaggatttcccattaagctgctagaacgtgtttggtctgaacgattccgaaggcaggtcgtgtaactctgcaacatacaggagatgatgactaccacagcctctcgccaggtgtttgtcctgaatcgagacatgaactcttaaccttgttttttatttcattcttgacatacttgataatgtctcgcttgtaatctggagtaggctgttcttaccaaaaagaaaaaaaaactgcaattctgttgtaaagttagttcgtatgtttgggagccatgtaatgtagccaaaggccatgaaaccgattttcccagagtatttgtgtacatttgtttaaaatgaaatgtaacatctggtgtacttttgaaaaaaaaaaaaaaaaaaaaaaaaaaaaaaaaaaaaaaaaaaaaaaaaaaaaagaaaaaaaaaaaaaaaaaagcggcc

SEQ ID NO: 88007 - DNA, 301 bp, Zea mays
  Clone ID: MRT4577_180261C.1
ccggccgggcccttgtttcccgggcaccacccgcaccctggcctctctcgccgaaccacaaatagagcctatagtcagtggaaacctgcctcctgggtttgatgcaagcacatgccgaagcgtgtatgttgatgatatccatgttgaagtgacgggcacagggctgggcgaagtcttccaaagcatcgggacaggagaaggttgcatgctgatcaggaaggaaaagtcatggctttggttgaattcactagtatgagcgcgcatatgctgtagtgggagtggtatctgtgaatgggacgac

SEQ ID NO: 88008 - DNA, 242 bp, Zea mays
  Clone ID: MRT4577_180262C.1
ttcttcttgtgcacactactcatgcacgctcaaacacctctgcgcatgaaagaacatgctctatcaaatccaaccaatgcctcacaaccctacaaggccaagctcattttcatggtggggtacacacacgatcatgtgttctagcacctgtggaaccggttgacagcccaagccgtgccgcaaggttacggatactggcttgtgtaccgcgctctaccatgtcgcatacgaacacaccatac

SEQ ID NO: 88009 - DNA, 348 bp, Zea mays
  Clone ID: MRT4577_180263C.1
ggaacaaaaaacagggcataaacttatttgcccccaaccccaaaaaaaagtttccaaattaaaaaaacaaacttgcttaatttcaaaaaacttttttgccctggggggcatttttaaacatcacctttaaaccccactgaaaacctaatttgggcaaccaaaacattcagtttttttttaggagggccaaaatgtaaacttttttgacccaaatttgttccatttgtttacaaaaaaggggaaaaaatgggaaaaaaaaaaaccacttttttgcgctttgttagaaaccaccgaacgagccctttccctaccaaaaagtccaaattgggcacaggaactttttgtttt

SEQ ID NO: 88010 - DNA, 272 bp, Zea mays
  Clone ID: MRT4577_180264C.1
gagctcactagttggtggccgccctttctttttttttttttattgggttttttttttattttttgtagggttttttttctaataaaaaaacattgacccaagtactttaaacactgacgacccccgggcatcacagggccacattggctggttgtttttattacagggccgagcatcacgttgcttccatcacaacccggcctgattcacgcctaggctgattccattgttttttgttgaacccggattttacggggtttaggacaatccca

SEQ ID NO: 88011 - DNA, 145 bp, Zea mays
  Clone ID: MRT4577_180265C.1
tttcttttataggcgcgtagcgtggcgtgccggacagtcctattctagaactcctactgttgccgtcctacatgaggttgggccaatttcccatgccctgccacgctctggcggttggcttagcttccgatggcaccatggtgat

SEQ ID NO: 88012 - DNA, 865 bp, Zea mays
  unsure (1)..(865): unsure at all n locations
  Clone ID: MRT4577_180266C.1
attatagttccacacacgaatcaacttgcctacaagtaccacctccccgcctctgctatttgcagacccaagctataccaccaccaagctcttagcaagcaagcattgaccaatcgaccatggcgaggcttcagctttccgtcgtggcggcctgcgccgtcctcttcgcgctcgccgccccctccctcgccggcgacgccgacatgctccaggacgtctgcgtcgccgacctggcgtccccgatcaagatcaacggcttcccgtgcaaggcgaacatcacggcggacgacttcttcttcgccggactcaagaaggccggcaacaccaacaacccggccgggtcggtcgtcaccgcggctaacgtgcagtcattccccggggtgaacacgctcggcgtgtccatggcgcgcatcgactacgcggtcggagggcagaacccgccgcacacccacccgcgcgccaccgagatcatcttcgtcaccgagggaaccctcgaggtgggcttcatcaccaccgccaacaagctcttcactaggttcgtcaccgtcggagaggtgttcgtcttcccgcgtggcctcgtgcacttccagcagaacaggggacatcgccccgcctccgtcatcgccgccttcaacagccagctccagggcacacaagccatcgccaccacactcttcgctgccacaccaccagtgccaaccgacgtgctggcaaggnccttcagggttgataacgaagacatcgacgccgtcaagggcaggttcaactagggagcctctgccctctggncactctgcatccatttcggaagaaaaaaatcgtctgtttgttactggataaatggtaatcaagtcatcaagtgagc

SEQ ID NO: 88013 - DNA, 281 bp, Zea mays
  Clone ID: MRT4577_180267C.1
cccacgcgtccgaagagattattcctacattgctagttgatgaagactttgatcaacttataaggtgaatttggtgtatattgtttgagaagttggaaaaaatatgttgacgtgtcacacgcgctcgctcacctcgctaggccatggacggttgagtctaactggactgatggccatcaaggcctacccaaaggcgttcaagatggggccctggcatcgggctctgcatacacggaccaacgactatcttcgacgattgtcactagttgttttatattgat

SEQ ID NO: 88014 - DNA, 157 bp, Zea mays
  Clone ID: MRT4577_180268C.1
cacccataaagaatcgcgtcagtacgtgatttcatagggattggatcactggaccgataattctggccctaacagggatagcctgagtaaccttggttatagagcagtggactgttgcctctgccgtctgattatggctcactattgcagtgatcag

SEQ ID NO: 88015 - DNA, 620 bp, Zea mays
  Clone ID: MRT4577_180269C.1
ttgggtacctcgaggccggccgggacctccttcacaaacatcgtattcttaggaactttccccgtgatgggggactcccatgcggattcatctgtcggctcctgtacacctcttctgtctctcggaacccacgtctgaccagggggccattcaaccacttgctcgcgaccatggaactagctctcgggcaaggctgactgtgctcgacaacatgagcccaggctcgtcttccctagaataggcagacgcccccgccacactgacgatgatggcagcaatggcactcaacgaagctcatgatggacacaaaggccacgcccagagggatatccagactttgaagtaccccatcagaacatgctattgttaccaaatggcatgacatggagaagatctggcaccacaccttctataatgaactccgagtgacgcctgaagagcaccctgtgctgctgacgagaagtcccactcaccccctatgctagaagggagaagatgacccctatcatgtcttgagaccttcaatgatcctgtcatgtatgtcaccatccattctgtgctttccctgtatgccagtgcgctcacacactgatattgagttggactcagatgatgatgtc

SEQ ID NO: 88016 - DNA, 816 bp, Zea mays
  Clone ID: MRT4577_18026C.1
ccacgcgtccgggagacactcagtgccgaactgataagattgtcttcaagcttttcgataaagttcccagcgacttacctccagttttgcggtcgcagattcttggttggttgtcgagtagcccatctgatatagaaagccatattaggcctggctgtattattctaactgtatatgttcggttagttgagtctgcatggcaagagctttctgagaatatgagcctgctcctgggtaagcttttgaatagctccactgacgaattttgggcatctggcttggtatttgtgatggttcggcaccacttagcttttatgctcaatggtcaaattatgttggacaggcccctggcacccagttctcatcattactgcaagattttatgtgtcagacctgttgctgcaccttattctgcaacaataaatttcagggtagaaggttttaacctactcagtacttcctcaaggctaatttgttcttttgaaggacactgcatattccatgaagacacggattctggagcagagaatgttgagtacaaggatagggacatcgaatgcctcagtttttgttgttctgttcctggtccaagaggaagaggatttatagaggtcgaagatagtggttttagcaatggcttcttccccttcataattgctgagaaggatgtatgcgctgaggtttctgagctggagagcatatttgagtcatccagtaatgaacatgcaaatgccagggaccaagctctggagtttctaaatgagctgggttggcttcttcaatagagcgaacagaatgtctaaagaggagaaactg

SEQ ID NO: 88017 - DNA, 484 bp, Zea mays
  unsure (1)..(484): unsure at all n locations
  Clone ID: MRT4577_180270C.1
gaggctcgaagggggtttgctgtcctttttttggcggaaatttaattttgccaagcaaagggggggggggggggggggaaattcttacaggccattggccaaacctttagggggggggggccctttttttacacgtttgggctcactttttgggttgggtggggcctttggcccgggggccccacacgtgggcttctcggttgggggggggaccaccttatggggctgtccttggggggaaaaattgtccccggtttccggggccggccccgggggggtttaccccaagccgacgagctttttgttggtttcccaaagctttttggccttgggggggtcggtggcctcctcaaagagctggtttttaggggggggggggtttttgttccctttccattaccccccggatttgggaaggctggggggnttcaccacctgggccagccgtttcccgggcttcttctgggggacgtcccccttgggg

SEQ ID NO: 88018 - DNA, 401 bp, Zea mays
  Clone ID: MRT4577_180271C.1
gttatataccctcgcttcaaaatttactttaaaaagacaaaaaaataaattaaaaggggttaaaaaaaaaaaggtatgtggtaaaaaaaaaaacataactactaaacttaaaaacatttacagttaattatagcttttttatttacaaagagagctttatccttttgtatctatttcttaagttcctgatctccttataaaaagttattcgtttataaatttttctctacaaacaattttatcagtttataccatattcatttcttatttaacttattttttcaacatttactatatctttcatctttcacttctatagttttcttttaataatagttctacctttatttttatatttttatacacttttttgtatactttttattttttctcttttcttt

SEQ ID NO: 88019 - DNA, 768 bp, Zea mays
  unsure (1)..(768): unsure at all n locations
  Clone ID: MRT4577_180272C.1
ggccggccggggaagaaaggcccgccggccgccgcggtttgctcgctatcgctcccttgctggctgcggtgcgggtgcgccgccgtcgacgagggagtccctggctccctccctccgggttcgaattcgggttgcttccttggggttcagtggcagtacatagcatggccctaaagctcggctggaggagaggaggaggaggctggcttgcgcttccattggggaatcggaccaccgcgtcttcctccgcatgcagcagctccaacttgttcgtcggcggtctttcctacgacactaacgagacagctctcaaggatgttttctctcaatgtggtgatgttattgcggcgaaggttatatgccatcccacaagcggcaagtcgaaaggatttggttttgtcaagttttcttcgcaaaaccaagctgacgcagcattgcaaaagatgaacggtcagagatgagcaggtgatgattgatgagcatccagcggctggatcttaaaaatccacatttgccattgaagttttgttgagatctcgaagttgttaaaactcggacgaactcaagcgagacaaagatttctcttggtgacacggactgttataagatgtttgctgtgaggaaaaagttagtctatcatattttcacttgccactatttttatttggtctgtaaaataaaatgagttgatccactcatagttagttaatactaacatggagagtgaggtcatcctacaannatttagaaataaattcataatggcat

SEQ ID NO: 88020 - DNA, 968 bp, Zea mays
  Clone ID: MRT4577_180273C.1
gcgcaatcacccgcgggccttgggcttgggccttggaatagggtaccaccaaccaatcaatcgaagaagaggcccgccggccgccgcggtttgctcgctatcgctcccttgctggctgcggtgcgggtgcgccgccgtcgacgagggagtccctggctccctccctccgggttcgaattcgggttgcttccttagggttcagtggcagtacatagcatggccctaaagctcggctggaggagaggaggaggaggctggcttgcgcttccattggggaatcggaccaccgcgtcttcctccgcatgcagcagctccaacttgttcgtcggcggtatggtaacagcttacagtagaagaagcaacggatgatgcagccttcctttttattttctctgcaggtctttcctacgacactaacgagacagctctcaaggatgttttctctcaatgtggtgatgttattgcggcgaaggttatatgccatcccacaagcggcaagtcgaaaggatttggttttgtcaagttttcttcgcaaaaccaagctgacgcagcattgcaaaagatgaacggtcaggtgcttgatggaaggaaaattcgggtgcactatgcaaacgggactggatgacttgtgatttagaaacagatagaaaatgagatgagcaggtgatgattgatgagcatccagcggctggatcttaaaaatccgcattcgccattgaagttttgttgagatctcgaagctgtaaaaactcggacgaactcaagcgagacaaagatttctcttggtgacacggactgttataagatgttttctgtgaggaaaaagttagtctatcatatttttacttgccactatttttatttggtttgtaaaataaaatgagttgatccactcatagttagttaatactaaggttatcttcagtaacatcctctaaattttattccctaaaagaatattttttgtc

SEQ ID NO: 88021 - DNA, 891 bp, Zea mays
  Clone ID: MRT4577_180274C.1
gccggccgggcctgcggaagaagaggcccgccggccgccgcggtttgctcgctatcgctcccttgctggctgcggtgcgggtgcgtcgccgtcgacgagggagtccctggctccctccctccgggttcgaattcgggttgcttccttagggttcagtggcagtacatagcatggccctaaagctcggctggaggagaggaggaggaggctggcttgcgcttccattggggaatcggaccaccgcgtcttcctccgcatgcagcagctccaacttgttcgtcggcggtctttcctacgacactaacgagacagctctcaaggatgttttctctcaatgtggtgatgttattgcgggttgctcctcctcctcttctatattcttcttatgaaactactttttggctacgaaaaaaatcgatctttctctcatgacgattcatttacaatatatttatgcactgcagcgaaggttatatgccatcccacaagcggcaagtcgaaaggatttggttttgtcaagttttcttcgcaaaaccaagctgacgcagcattgcaaaagatgaacggtcaggtgcttgatggaaggaaaattcgggtgcactatgcaaacgggactggatgacttgtgatttagaaacagatagaaaatgagatgagcaggtgatgattgatgagcatccagcggctggatcttaaaaatccgcattcgccattgaagctttgttgagatctcgaagctgtaaaaactcggacgaactcaagcgagacaaagatttctcttggtgacacggactgttataagatgttttctgtgaggaaaaagttagtctatcatatttttacttgccactatttttatttgggttggtaaataaaatgaggtgatccact

SEQ ID NO: 88022 - DNA, 463 bp, Zea mays
  Clone ID: MRT4577_180275C.1
ccagggaatgtgggtagagctatccggaaaaatgcatgtattagcaagatactggggcatctacgtcagaaaaccgatgatcgtattgttcttgtatcaaattatactcagacattggatctatttgttcaattatgccgggaaagaagatacccatatgttagacttgacggatcaacatccatcaataaaaggcagaagctggtgaaccaattcaatgatctatctagggacgagtttgtctttctacttagtagcaaggcaggtggctgtgggcttaacctggtaggtggaaatcgtttggttctcttcgaccctgattggaaccctgccaatgataagcaggctgctgctagagtgtggagagatggacagaaaaagagagtttacatatataggttcttaagcacaggaactatcgaggagaaggtatatcagcgtcaaatgtcgaaagaaggcctgc

SEQ ID NO: 88023 - DNA, 683 bp, Zea mays
  Clone ID: MRT4577_180276C.1
ccggccggggaggcccgtcggccgccgcggtttgctcgctatcgctcccttgctggctgcggtgcgggtgcgccgccgtcgacgagggagtccctggctccctccctccgggttcgaattcgggttgcttccttagggttcagtggcagtacatagcatggccctaaagctcggctggaggagaggaggaggaggctggcttgcgcttccattggggaatcggaccaccgcgtcttcctccgcatgcagcagctccaacttgttcgtcggcggtctttcctacgacactaacgagacagctctcaaggatgttttctctcaatgtggtgatgttattgcggcgaaggttatatgccatcccacaagcggcaagtcgaaaggatttggttttgtcaagttttcttcgcaaaaccaagctgacgcagcattgcaaaagatgaacggtgcttgatggaaggaaaattcgggtgcactatgcaaacgggactggatgacttgtgatttagaaacagatagaaaatgagatgagcaggtgatgattgatgagcatccagcggctggatcttaaaaatccgcattcgccattgaagttttgttgagatctcgaagctgtaaaaactcggacgaactcaagcgagacaaagatttctcttggtgacacggactgttataagatgttttct

SEQ ID NO: 88024 - DNA, 731 bp, Zea mays
  Clone ID: MRT4577_180277C.1
gcccagtgtatacagatatttgattcatggggtggacagcttccacctcatgtgtgggagcagtggtcaaaaccatatatcaaacaggagttgatgttattgggcttgactggacagtggacatgactgatggaaggaggcgccttggtaatggcattagtgtacaagggaatgtggatccagcatttttgttctcaccattaccagtactgactgatgaaattcatagggttgtgaaagcagctggtccaaaaggtcatatacttaatctgggccatggtgtacttcagaaaacacccgaagaagctgtagcacatttctttgatgtcacaaggcgcttgagatatgacacccttttccaaggttctgttgctgaagaattgcatcacgttgcttgacaacggcaatgacattcccatttttcatcaagtggtgtatttgatctgtcatatcatcttagagtcgtagtagattcctagtgttgcctgcattctacctttcaagagagactcattttcttaagcctgtatatgtattgcagagataccggcggcaaatctagtgcaattttattcattgtttgttcgttccattattcatctggctgaagaagggatgcatgatgaccctggtttggtttcaatgattaatgacaatataaattattatagttaatgtatgttttacagaaacaatgttacaataatgcaagatgattggattcatatggt

SEQ ID NO: 88025 - DNA, 158 bp, Zea mays
  Clone ID: MRT4577_180278C.1
ctacataagcctgagatctaagtgaccaccccctacacttctttcgaggcaagtagataagataggaaatggccattagctagggctgtgctccccgagatgggcaaccccctacttgacatctcccccttctgtctatgacgccttcctggcaaagt

SEQ ID NO: 88026 - DNA, 843 bp, Zea mays
  unsure (1)..(843): unsure at all n locations
  Clone ID: MRT4577_180279C.1
ccggccgggggtttgctcgctatcgctcccttgctggctgcggtgcgggtgcgccgccgtcgacgagggagtccctggctccctccctccgggttcgaattcgggttgcttccttagggttcagtggcagtacatagcatggccctaaagctcggctggaggagaggaggaggaggctggctcgcgcttccattggggaatcggaccaccgcgtcttcctccgcatgcagcagctccaacttgttcgtcggcggtctttcctacgacactaacgagacagctctcaaggatgttttctctcaatgtggtgatgttattgcggcgaaggttatatgccatcccacaagcggcaagtcgaaaggattcggttttgtcaagttttcttcgcaaaaccaagctgacgcagcattgcaaaagatgaacggtcaggcaagactatcttctttcatatatatcatcatataggacaagaacacctgcctgcctctcaccgacacaaattaagcttcgcaggtgcttgatggaaggaaaattcgggtgcactatgcaaacgggactggatgacttgtgatttagaaacagatagaaaatgagatgagcaggtgatgattgatgagcatccagcggctggatcttaaaaatccgcattcgccattgaagttttgttgagatctcgaagctgtaaaaactcggacgaactcaagcgagacaaagatttctcttggtgacacggactgttataagatgttttctgtgaggaaaaaagtagtctatcatatttttacttgcccactattttatttggnttgtaaaatannatgangtgatccactcatagntagg

SEQ ID NO: 88027 - DNA, 729 bp, Zea mays
  Clone ID: MRT4577_18027C.1
tttttttttttttttttttttttggttctaatcccacattgtttcttatttttttacgtgggtgcggctgcacccctagaatgaactaatatacatgggcccaggtcacttacaaaagaggagctcaaagttacagataggctagcaagcataagctacagcatatgagctagcgtgcacagtaccaaaaaaattcctaggtagtagcttttcaccgatgctacttggctgaataatctccgatctgacatgcatgcacgtccagtcagccgtccacagcacgtccgcctgactggtggcgggagacacggcgtgacgtgtactacgccgccgtgatccttgaaccatcacctccatgctgccatgctccatctgatcatgtccatggtgtgtatggtcgtatgagccggccgggctggccgtagaacacgacgacgcgcgcatgcatgcattgggcctccgacccctgtgcaggtatataccctacgccgcgcctccaattccagtgaatgacagatataaagacctccctttttctctctgtctctctctccccctctgtcccatgctcgcgtcatgagttggacggaccatagctagctggactggacctccatctccatgcatgcatccaacatgttctttgcatcctcgatgcgtggttatcttgcttcggaccccctcatgatcctcagcttcttgcaggaacagatgaacattcccagggca

SEQ ID NO: 88028 - DNA, 1741 bp, Zea mays
  unsure (1)..(1741): unsure at all n locations
  Clone ID: MRT4577_180280C.1
cggggnnnccgttcgacaactcgccagcacatccacctggccaacctgacctcttcgtctaccagggggcgagagccacggtaaccgccaccgtcatgatgccaccgacggccactgcgatgcccgtcttcctctccgcgccgccccctcctttttccacccgccgtcggcgcagccgccttcctgccatttccgcatccctttcgccgtccccttcctcttggggggaacccaactcccttcctctctccccaccatttcgcccctaatctgaactacacgccgcgtgtccagaggagccgctgctggtgcgcgcggcgcggggggaggacggcctcccacgcccacccgcgtggatgatgcgacaggcagggcggtacatggcggagtaccaggcgctggccaagcgccacccctcgttccgggagcgctccgagaacacggacctcatcgtcgagatcacgctgcagccgtggcgtgccttcgcgcctgacggcgtcatcctgttctcagacatactcacgcccctaccggccatcggggtaccgttcgatatctcggactccaaggggcccgtgatccaatcgccagtgcggtccgaagggcaggtgagggagctcgtccccatcgaccttgatatgctccagttcgtcggagagtcactaaagattctgcgaaatgagattgatggaaaagctgctttgctaggatttgtgggggccccatggacaattgcaacttacattgttgaaggggggatgaccaacacatacacaaatataaagaacatgtgccatacagctcccgatgtcttgaggtgtcttctatctcatcttgcagaagcgatatctgactatatcatttaccaagttaactccggggcccagtgtatacagatatttgattcatggggtggacaacttccacctcatgtgtgggagcagtggtcaaaaccatatatcaaaaagattgtgaataggattaagaaagagtgccctcatgtaccccttgtgttgtatataaatggaaatggaggtttacttgagcgcatgaaggacacaagagttgatgttattgggcttgactggacagtggacatggctgatggaaggaagcgccttggtaatggaattagtgtacaagggaatgtggatccagcatttctgttctcaccattaccagtactgactgatgaaattcgtagggttgtgaaagcagctggtacaaaaggtcatatacttaacttgggccacggtgtacttcagaaaacacccgaagaagctgtagcacatttctttgatgtcacaaggagcttgagatatgacacccatttccaaggttctgttgctgaaggattgcagcctgttgcttgattcgtagtgttgtctgcattctacctttttaagacatactcattattgaagcctggatatgtcctgtggagatatcggcagcaaattaaatgtaattttattcattgtttatctgttagttttattcattgtttatctgttccattattcatgtgactgaagaagggatgcatgatgcatgcaacctggtttcgtaggagagccgggctacaggcacagtccgcttcagcggcgcctgtggctgttcaaatcagagctgctataattcctgtgaaaccgtccagtctcggtgccttctccgaggggagttcttctaggtgtttagttggttttactaactaaagttttgtatcgaatggttgaataat

SEQ ID NO: 88029 - DNA, 119 bp, Zea mays
  unsure (1)..(119): unsure at all n locations
  Clone ID: MRT4577_180281C.1
aggtaattatntttgtgccattggatgcgataatgtgcaacaggatgcttcgtttgttagacactagaaaaagttttcattttttcgtaactgattgttttttaataccatttgatgca

SEQ ID NO: 88030 - DNA, 491 bp, Zea mays
  Clone ID: MRT4577_180282C.1
ccccgcgtccgcagacctggagtgtgcatgctgtcctgctcctcgtgaaccccatgatgcaagacgtggagtcgtcgtggacattacaaaaatgcttgggtgcttatagtcttcctcctgtataggggtccatctttgtgctgtaatgtgtcaagcatcgcatgctattttttttccggtgatgcaagtgtgtaagaaccatgtcgttgcaggaatagtgaagcagtgggacctgttattgtgactacctagtatcccgtaaaaaaaaaaaaaaaaaaaaaaaaaaaaaaaaaaaaaaaaaaaaaaaaaaaaaaaaaaaaaaaaaaaaaaaaaaaaaaaaaaaaaaaaaaaaaaaaaaaaaaaaaaaaaaaaaaaaaaaaaaaaaaaaaagggggggcccttttaaagaaccaaatttaacttccgctggcttgaaagttaaaagtttttttatagggcccccaaattaaaataaatgggccgggttttaa

SEQ ID NO: 88031 - DNA, 844 bp, Zea mays
  unsure (1)..(844): unsure at all n locations
  Clone ID: MRT4577_180283C.1
ctcgaggccggccgggatcgcttccttgctggctgcggtgcgggtgcgccgccgtcgacgagggagtccctggctccctccctccgggttcgaattcgggttgcttccttagggttcagtggcagtacatagcatggccctaaagctcggctggaggagaggaggaggaggctggcttgcgcttccattggggaatcggaccaccgcgtcttcctccgcatgcagcagctccaacttgttcgtcggcggtatggtaacagctttcaattacagtagaagaagaattggcaacggatgatgcagccttcctttttattttctctgcaggtctttcctacgacactaacgagacagctctcaaggatgttttctctcaatgtggtgatgttattgcgggttgctcctcctcctcttctatattcttcttatgaaactactttttggctacgaaaaaaatcgatctttctctcatgacgattcatttacaatatatttatgcactgcagcgaaggttatatgccatcccacaagcggcaagtcgaaaggatttggttttgtcaagttttcttcgcaaaaccaagctgacgcagcattgcaaaagatgaacggtcaggtgcttgatggaaggaaaattcgggtgcactatgcaaacgggactggatgacttgtgatttagaaacagatagaaaatggtatagtctataatacaaacagtnatttgcacgattgcacgactatatgtatgatcgatcgtaggcttacatggtctccgatagtagcagcatcttttactctagctctttttctttttatagagatgagcaggtggatgatgatgagcatc

SEQ ID NO: 88032 - DNA, 447 bp, Zea mays
  Clone ID: MRT4577_180284C.1
aaggaagcgccttggtaatggaatgagtgtacaagggaatgtggatccagcatttctgttctgggggttaccagtactgactgatgaaattcgtaggaccttcgtacaggggaagtgattgggactggccgttactgtagagctgctcctcgactgtacatctcggacactttgcggcttcccttcttggctacgtctatagcgcatgtgctttcagggttgtgaaagcacctggtacaaaaggtcatatacttaacttgggccacggtgtactttagaaaacacccgaagaagctgtatcacatttctttgatgtaacaaggatgcttgagatatgacacccattttcaaggttctgttgctgaaggattgcaccctgttgcttgattagtagcgtcgtctgcattctacctttttaagacattactcattattgaaccctggata

SEQ ID NO: 88033 - DNA, 1649 bp, Zea mays
  Clone ID: MRT4577_180285C.1
actataaagaacatgtgccaggaaaaaaaaaaaaaaaaaaaaaaaaaaaaaaaaaaaaaaaaaaaagctcttcgcgtatcaccccgaagccgggcgggaagctgagatgagagatagcaaaaggcgaagcgacggtaaccgccaccaccaaatcgctaccgccaatccgccatgatgctcccgacggccaccgcgacggccgtcttcctcaccgcggcgccttcctctttctccacccgccgtcggcgcagtcgcgccatcttcgcatccctttcgccgtccttctccgcctcggaggagccgctgctggtgcgcgcggcgcggggcgaggacggcctcccacgcccgcccgcgtggatgatgcggcaggcagggcggtacatggcggagtaccaggcgctggccaagcgccacccctcgttccgggagcgctccgagaacacggacctcatcgtcgagatcacgctgcagccgtggcgtgccttcgcgcccgacggcgtcatcctgttctcggacatactcacgcccctgccggccatcggggtgccgttcgatatctcggactccaaggggcccgtgatccaatcgccagtacggtccaaagagcaggtgagggagctcgtccccatcgaccttgatatgctccagttcgtcggggagtcactaaagattctgcgaaatgagattgatggaaaagctgctttgctaggatttgtgggggccccatggacaattgcaacttacattgttgaaggggggatgaccaacacgtacacaaatataaagagcatgtgccatacagctccagatgtcttgaagggtcttctctctcaccttgcacaagccatatctgactatatcatttaccaagttaactcgggggcccagtgtatacagatatttgattcatggggtggacagcttccacctcatgtgtgggagcagtggtcaaaaccatatatcaaacagattgtgagtaggattaagaaagagtgccctaatgtaccccttgtgttgtatataaatggaaatggaggtttacttgagcgcatgaagaacacaggagttgatgttattgggcttgactggacagtggacatgactgatggaaggaggcgccttggtaatggcattagtgtacaagggaatgtggatccagcatttttgttctcaccattaccagtactgactgatgaaattcatagggttgtgaaagcagctggtccaaaaggtcatatacttaatctgggccatggtgtacttcagaaaacacccgaagaagctgtagcacatttctttgatgtcacaaggcgcttgagatatgacacccttttccaaggttctgttgctgaagaattgcatcacgttgcttgacaacggcaatgacattcccatttttcatcaagtggtgtatttgatctgtcatatcatcttagagtcgtagtagattcctagtgttgcctgcattctacctttcaagagagactcattttcttaagcctgtatatgtattgcagagataccggcggcaaatctagtgcaattttattcattgtttgttcgttccattattcatctggctgaagaagggatgcatgatgaccctggtttggtttcaatgattaatgacaatataaattattatagtt

SEQ ID NO: 88034 - DNA, 1966 bp, Zea mays
  Clone ID: MRT4577_180286C.1
ttcggccgggagagggaggtggcgctgatctgtcagccgtagttgacttccatgctctgcttgccgccgacggggagcttcctgacgggattggtcggcgtgagtgccccggattcgaccgccccgtgttctgcttcttggaccggccagggttctatttcattcctggtgctttatcaactgaggaacaatgctgttggatcagggaaagcttgaaaacatttccacagccacctaataggactaatttgactgcaatatatggttcaatttcggacttactcatcgctgccgaaaatcaacagatattggttgaagcagaaaatcctgatatccaagaaaaaaataaacagaataattgtggagggaaaacagaatccaaatacttcaaatttgtggactcagagagccagaaaggggaagagcataggtcaaacgcagcaactacccttgtgaggaagctccggtggagcacccttggtctgcaatttgattggtcaaagcggaactacgatgtatcacttccacacaacaagattccaggtgctctagctagtcttgccaaaaagatggctattccagctatgccttctggagaagaattcaagccagaagctgctatagtgaactattacggtccaaattgatgtaggtgacatgcttggtggccatgttgatgacatggaagcagattggacaaaacctattgtaagcataagtttgggctgcaaatgcatctttcttttgggaggaaagactcgagatgaagttccaacagcaatgttcctgcgcagcggtgatatagttttgatggctggggaagcacgagaacgcttccatggtgtaccgcggatcttcacagagagtgaccagcaagaaatccctgcactgatttcacaactatctagtggagatgacgtctttatcttggagtatatcaagaattctaggataaatatcaacatcagacttgtctacttgctgtgtacgtgattgcctgatcctggcacgtacatggttcgcattcggtttgccttctaaaaaccgggtgtgacaggtacccttggaagttgagcaggaacttgtccctgagacttctccacgaatcaatggacagcggaggcaatctggtgaaccaggtgagtgctgggccctctagggcgatgatgaaagacttcgccattgtggcgtcgtcccctccagcggatgcaacggcgacctgataactcattacgtattgcgccgggtcggtgctgccgttgtacttggggtaggtccccgctcggaagttagctggccaaggcgtcacctgcaggtgtggcgccaggggacttcgctcgtcgaggtagttgactccttggaatggcgcgccgtgctggaaggtgtagtcgcgctgggggaaacgggggctctccggccgcgcccggtgatgcaggggtgggccatgctgcaggccaaggtggccttcgcgcgtaccttccggttgcgcgcgctgctggagggggggctcttgctgcaggccaaggtggccttcgcgctgcatcagcgcgatctcgcgctcgaggtcttgggccttctgctcctcgtcgcgtatcatttgccacaccttggctagtgcggacacacgctggcgcttggcctccagtatctctttctgcctctggagattgcggttcttcacgcgcagggcgcgcagctgtagctgttcttctgttgagacgccgaggacctcaccgtcctcggtgatgtccgcgccttctagtggggcgaagcctgggggcggctgcgattgtccttcggttccgcaggtgcggaaggtgtcgtcttcgccggtgtggggaacattgtctttagtgggctcttggtgggtggattgggtgagggcgagggccttgccctttcttgcggccagcagtgctgccttcgcagcctcgtcagccttcgggttagctctcttgggtgccat

SEQ ID NO: 88035 - DNA, 253 bp, Zea mays
  Clone ID: MRT4577_180287C.1
aggttatatctacaatatttaatgaggacaggttcgccaaaatgcaaggccaacatgatagcagcaaaaagtccactggtaacattgataacagtgaacttttggataccatcgttgaggttgccaaggaggttttcaagcggcattgtgctaaaaggttccaaatatcacctttgcatactttggagtggaattttaccaaaaacaggggacacacagtgaaaatcttaactcaaggaggagagatgctaga

SEQ ID NO: 88036 - DNA, 589 bp, Zea mays
  Clone ID: MRT4577_180288C.1
agtccctaccccgatcgatcgaaaggtaggttcttctccacgccccctccacaaatccccactttgcgccggcgaatcttcttggcgatggctggtaagcagggccgcaagaaggcgaggagtccccccggatgccctcagctgcgtccgatcggcagcaccgtctccggatcgaagaagcctgcggcggcgacggttccttcgtgcaagtaccacctgtcggaggcgtctgtccaggcggtcctaaaccacaagagggtgcctttcgtccttgggggctacttcgacgacctgacccccgaggagcagcaactcacgctcgaggtggccgcccagcacgaggaggtcgaggacaggtacgccaagtaccaggaaagagtccgcaaggagctggatgagaagggattcgtcgcgctccccgatgacgttgacaagaggagggccgcgctgaacgcgcgctgaacgccgcaagcatcgaggctttcagaggagtcgccgaggtcaagtaggttttcaggaatttacatagaagaagaggatgcaccatagcgccgtctgcctctcttggtttatctatctatatatcttt

SEQ ID NO: 88037 - DNA, 4066 bp, Zea mays
  Clone ID: MRT4577_180289C.1
atggcgcgggcgcagccagccgacaaccctagaattgtcgcgcataattaccaaccaccccctccaccatatatccatgctcccgctccgcatccaccacaccacgcttaccaacaccatcaggaaggggggtccagcactgacttcgacaccaagcggcagaagcgggaccactaccgcagcatcaaccatgtcgcggtcaccggcccagtcgtgcagacgaagtggtcccacataccgctaaccttcgatgcacgagacgtcgacctgcgcagcgccccccacatcgacgctatggtcatcaattgcagcgtggcaggctgggacctacacaaagtcctagtcgacaacggcagccaggcggatatcatcttcctccacgccttcgaccgcatgggtataagccacagtctgctcaagccttcggacaatctgttgtatggcttcggcggcaagggcacctttcccgttggcaaaatagaacttcccctctccttcggtgtagcacccaatgcccgaagtgagcaggtaaccttcgacattgtcgacatggtatatccgtacaacgccatcatgggtcggggctccatcaataagttcgaagctgccatccacggactgtacctatgtatgaagataccaggtccgctaggcgctatcacgatctacggcaaccagcagacggcgcgcaacatagagcgggacttcgtgcctggtcaaaggaacgtacactgcctcacgacccagcgcgaggtccccgcgcctgccagcccaactgacaagcagcacgagaaggcacagttgcagagccaagacggaaccaagactgttccccttgatcaggccacgcccaagcagacagtcactatcagcgaagacctcacgtcacatgaagaagagaagcttctctgttgcctggccaagaataaagatgtcttcgcctggtccgccctagacctggtcggagtcagccgatccattattgagcacagcttgggaattgacccttcggtgcgaccaaaaaagcaaaggctccgcaaaatgtccgacgaaaagacagaggccgccaaggcggaagtgcaccgcctcctagaagctaaattcatcgagccagtggcttaccccacgtggctctccaatgtcgtaatggtgcagaaaaaagcgggaaatggcgaatgtgcatagacttcaccagtctcaataaggcctgcccgaaggacaatttcccgttgccacggatcgacaaaatagtcgatagcgcggccggatgcgaggtcttgtcactcctcgactgcttctccggctatcaccagatatacatgaaggaggaagacaaggctagcaccagctttataacacccttcggcacttattgcttcatcaggatgccggagggactcaagaatgcggggtccaccttctccagactcaccaaaacagtactcgaagggcaggttggtagaaacatatttacatatgtggacgacatcgtcgtcgccagcaagaataaggaggaccacctcgccgacctcgccgagacattcgcgaacatgcgagatgcacgactccgcctgaacccggaaaagtgcgtcttcggtgttcgccagggcaagatattgggttacctggtgtcacaccgcggcatcgaggccaacccaaccaagatccaggccatcgtcgacatgtcgcctccgcagtccgtcaaggacgtccagcgtctgacaggcagattggccgctctcaacagattcatctccaggtccgccgagcgaagtctccccttcctcaaaacacttcgcggtgcgaaagacttcgcctgggggccggagcaagcagcggccttcgcctcactaaaacagtacttgtcggagttggccatcctcacaagccctgactccttgctccccctattgctctatgtcgcggcttcgccgcacgcggtcagcgcggcactagtgcaggagcagactgttgaaggcacagtcagacagtgccctgtttactatgtctccgaagtcctgacaccgtccaaatgcaacatgacagagctggagaagatcgcctacgcagttgttatgtcctcgcgcaaactgcgccattactttgaagcattcaaggtccgagtcacctcagacagggggctcggcgaactattcagaaacccggaggcatcggtgaggattgccaagtgggcagccgaactctccggctaccacatcagcttcgagcccaggacagccatcaagtcacaagtcctggcagacttcgtcgtcgactggactgggccaaaaacacagccggacccgtccacagagaaggtttggaccatccattgcgacggcgcatggtgccatgcgggggcaggcgtcgctgcagtcgtcacctcaccagccggagtcaaacacagatatgcagcacgcctcagcttcgctctggaatccgacagatgcacaaacaatatcgcagagtatgaagcggttatcctcggcctccgcaagctaagggccctcagagtcaccacatgtatcatcaagacagactccaagataattgccggccagatcgagaaagactatgcagcaaaggaccccgcgctaatgcaatacctcgcggctatccgaagtctcgagagacagttcaagggattcaccttgcagcatgtggatagggccaagaacgaggaggccgatgcattggccaaggctgccgccaggggcgagcccttgccctccgacgtgttctttcacaccatcggcacgcctgccgtccggagccccaaagggctccaaataactaatgatagcgagggccactgcatagtcaacctaatcatgaccgaagactggcgggcaccaataaccctgttcctacaggggtactatcatccaaccgacgtcagcgaggccaagcgcctcagacatcgaagccgggacttcgcgctgatcgagggccagctctacaagaaaggggtcagtcagccaatgcttaagtgcgtcaccgaaaccgaaggcatgcagatcctacgtgaagtccacagtggcacgtgcggctcgcacgcagggccaagggccctagctgccaaggtgatccgccaagggttttactggcccgcaatgatctgcgccgcaaatcgggtctcaaggtcctgcgaagcctgccagaagttctctcctcggtcaggcaacccctcgcagtatacaaagctgattgcccatacatggccgctccagcgctggggcctggacattgtcgggcccctgcccaccgctcaggggaaccttaagttcgccttcgtagccgtcgaatacttcaccaaatggatcgaagcgagggctgtttctacaataacatcaaagaatgcccagaaattcttctggcaaaacattgtttgccgcttcggagtaccgtccgagctaacagttgacaacggcaagcagtttgacagccaagatttcaaggatttttgtttttccatcggcaccaagcttgccttcgcttcagtctatcatccgcagtccaacggggtcgtggagcgcgccaatgggaaaatcttcacagctgtcaagaaaatgctcctcgatgaaaaaaaggcagatggaccgatttattacctgaggcagtctgggcgctaaacacaactgagtgcagggcgactgggttcactcctttccgccttctatacggatcggaggccatgaccccgcaagaaataaagcatgggtccccgcgtacagttccgtcagccgtccccgacgtggacgagccaacttcaaaagatcttattgacggagaccgagtcttcgccctacaggccctaaacaaataccaagcccagaccaaagcatggcgcgaccacgcagtcatcccgagagagttcagcgaaggggacctcgtactcgtccgaacagctcggacggagtccaggggaaagctggagcccaagtgggagggccccttcatagtcaagacaaaagcatcccccagcgcctacaggctcacaacgccaaacggcgaggacctggagcactcctggaacatcgacaacctccgcaaattttttgtctga

SEQ ID NO: 88038 - DNA, 585 bp, Zea mays
  Clone ID: MRT4577_18028C.1
ctcttcattcgccctcttgaccaaccatggcgcatcagcctcctctggcgccggcccccctagcccccaacgaccccctaccagcgccaacggccgcccagagcgcccgcccccagccggtcgtcgccacagctaccgccaccgtcctaggccacctcccacggacggcgccgcgggaccgcgccggcgtgagggtgctggacgacggcactgtctcacccgcggaccccgcccgacccctcgccgacgccatgtccgtccgcggcggccgcgtcctccgcgtcgggagctgcgagtgcgtcaagggcgcgttgacgttttgctctgcctcttcctccctctgatcctctgccccgtctggtcggtgtttcttgcaggagctcgagggccctcgcactcgtgagcttaatctcactggcaacgtggtgctcctcgggttcgtcgactcccatgtccacttcatcgatggtggattgcagattcaggaggggactgctggatggcacaaagtggcgaatgaagcagccaggacgattccgggtagggagaatggcggccctcagacccttaaactgtttgaagtgc

SEQ ID NO: 88039 - DNA, 4905 bp, Zea mays
  Clone ID: MRT4577_180290C.1
gaacatgcgagacgcacgactccgcctaaacccggaaaagtgcgtcttcggcgttcgccagggcaaatattgggctacctggtatcacaccgcggcatcgaggccaacccaaccaagatccaggccatcgtagacatgacgcctccgcagtccgccagggacgtccagcgtctgacaggcagattggccgctctcaacagattcatctccaggtccgccgagcgaagtctccccttcctcaaaacactccgcggtgcaaaagacttcgcctggggaccggagcaggcagcagccttcgcctcactaaaacagtacctgtcggagttggccatcctcacaagccccgactcctcgctccccctattgctctacgtcgcggcttcgccgcatgcggtcagcgcggcactagtgcaggagcagacagttgagggcgtggtcaggcagtgccctgtttactatgtctccgaagtactgacaccgtccaagtgcaacatgacagagctggagaagattgcctacgcagtcgttatgtcttcgcgcaaactgcgccactacttcgaagcattcaaggtccgagtcacctcagacaggggactcggcgaattattcagaaacccggaggcatcggtgaggattgccaagtgggcagccgaactatccggctaccacatcagcttcgagcccaggacagccatcaagtcacaagtcctggcagacttcgtcgtcgactggactgggccaataacacaaccagacccgtccgcagagaaggtttggatgatccattgcgacggcgcatggtgccatgcgggggcaggcgccgctgcagtcattacctcaccagccggggtcaagcacagatatgcagcacgcctcagcttcgctctggaatccgacagatgcacaaataatatagcagaatatgaagcagtcatcctcggcctccgcaagctaagggccctcggagtcaccacctgcatcatcaaaacagactccaaggtagttgtcggccaggtcgagaaagactacgcagcaaaggaccccgcacttatgcaatacctcgcggccatccgaagtctcaagagacaattcaagggattcaccttgcagcatgtggatagggccaagaatgaggaggccgacgcattggccaaggccgccgccaggggcgagtccttgccctccgacgtgttctttcatatcatcggcacgccagccgtccggagccccgaagggctccaaataaccaatgacagtgagggccaccgcatagtcaacctaatcatgaccgaagactggcgggcaccaataaccctgttcctacaggggtactatcatccaactgacgtcagtgaggcaaagcgcctcagacatcgaagccgggacttcgcactgattgagggccaattatacaagaaaggggtcagtcagccaatgctcaaatgcgtcaccgaaaccgaaggcatgcagatcctacgcgaagtccacagtggcacgtgcggctcgcacgcagggccaagggccctggctgccaaggtgatccgacaagggttttactggcccgcaatgatctgcgccgcaaatcgggtcacgaggtcctgcgaagcctgccagaagttctctcctcggtcaggcaacccctcgcaatatacaaagctgatcgcccatacatggcctctccagcgctggggcctggacatcgtcgggcccctgcccaccgctcaggggaaccttaagttcgccttcgtagccgtcgaatacttcaccaaatggattgaagcgagggctgtttccacaatcacatccaagactgcccagaaattcttctggcagaacatcgtttgccgcttcggagtaccaccgcaccacgcttaccaacaccatcaggaagtacaaatcgtacctcctccacccccaccaccacaccagcaacatcaaaacatcccccatgccccaaagcaggaagacttcgccgaccaaccatatcgcggagtcattcacatgataacaggggggtccagcactgacttcgacaccaagcggcagaagcgggaccactaccgcagcatcaaccatgtcgccgtcactggcccagtcgtgcagacgaagtggtcccacataccgctaaccttcgacgcacgagacgtcgacctgcacagcgccccccacatcgacgctatggtcataaattgtagcgtggcaggctgggacttacacaaagtcctagtcgacaacggcagtcaggcggacatcatcttcctccacgccttcgaccgcatgggtataagccacagcttgctgaagccttcggacaacccgttgtatggtttcggcggcaagggcacctttcccgttggcaaaatagagttgcccctctccttcggtgtagcacccaatgcccgaagtgagcaagtaaccttcgacattgtcgacatggtatatccatacaacgccatcatgggccggggctccatcaataagttcgaagctgccatccacgggctgtacctatgtatgaagataccaggtccgctaggcgccatcacaatctacggcaaccagcagacggcgcgcaacatagagcgggacttcgtgcctggtcagaggaacgtacactgtctcacgacccagcgcgaggtccccgcgcccgccagcccaaccgataagcagcacgacaaggcacagttgcagagccaagacgggaccaagactgtccccctcgatcaggccacgcccaagcagacagtcactatcagcgaagacctcacctcacttgaagaagagaaacttctctgctgcctggccaagaataaagatgtcttcgcctggtccgccctcgacctggtcggcgtcagtcgatccataattgagcacagcttgggaattgacccttcggtgcgacccaaaaagcagaggcttcgcaaaatgtccgacgaaaagacagaggccgccaaggcagaggtgcaccgcctcctggaggctaaattcattgagccagtggcttaccccacgtgggtctccaatgttgtaatggtgcagaaaaaaagcgggaaatggcgaatgtgcatagacttcaccagtctcaataaggcctgcccaaaggacaatttcccgttgccgcggatcgacaaaatagtcgacagcgcggccggatgcgaggtcatgtctctcctcgactgcttctccggctatcaccagatatacatgaaggaggaagacaaggctagcaccagctttataacacccttcgacacttattgcttcgtcagaatgccggagggtctcaagaatgccgggtccaccttctccagactcaccaaaatagtactagaagggcaggtcggcagaaatatatttacatatgtggacgacatcgtcgttgccagcaagaataaggaggaccatctcgccgacctggccgagacattcgcgaacatgcgagatgcacgactccgcctaaacccggaaaagtgcgtcttcggtgttcgccagggcaagatattgggctacctggtgtcacaccgcggcatcgaggccaacccaaccaagatccaggccatcgtcgacatgtcgcctccgcagtccgccagggacgtccagcgtctgacaggcagattggccgctctcaacagattcatctccaggtccgccgagcgaagtctccccttcctcaaaacactccgcggtgcgaaagacttcgcctggggaccggagcaagcagcggccttcgcctcactaaaacagtacctgtcggagctggccatcctcacaagccccgactcctactctatgtcgcggcttcgccgcacgcgatatgcagcacgcctcaacttcgctctggaatccgacaaatgtacaaacaatatagcagagtatgaagcggttatcctcggcctccgcaagctaagggccctcggagtcaccacatgtatcatcaagacagactccaagatagttgtcggccaggtcgagaaagactatgcagcaaaagaccccgcgctcatgcaatacctcgcggctatccgaagtctcgagagacagttcaagggattcaccttgcagcatgtggacagggccaagaacgaggaggccgatgcattagccaaggccgccgccaggggcgagcccctgccctccgacgtgttctttcacaccatcggcacgccagccgtccggagccccgaagggctccaaataactaatgatagcgagggccaccgtatagtcaacctaatcatgaccgaagactggcggacaccaataaccctgttcctacaggggtactatcatccaaccgacgtcagtgaggcaaagcgcctcagacatcgaagccgggacttcgcactgattgagggccaattatacaagaaaggggtcagtcagccaatgcttaaatgcgtcactgaaaccgaaggcatgcagatcctacgcgaagtccacagtggcacgtgcggctcgcacgcagggccaagggccctggctgccaaggtgatccgacaagggttttactggcctgcaatgatctgcgccgcaaatcgagtcacaaggtcctgcgaagcctgccagaagttctctcctcggtcaggcaacccctcgcaatatacaaagttgattgcccatacatggcccctccagcgctggggcctggacattgtggggcccctgcccaccgttcaggggaaccttaagttcgccttcgtagccgtcgaatacttcaccaaatggattgaagcgagggctgtttccacaatcacatcaaagactgcccaaaaattcttctggcagaacattgtttgccgcttcggagtaccgtccgagctaacagttgacaacggcaagcagttcgacagccaagatttcaaggatttttgtttctccatcggcaccaagcttgccttcgcttaa

SEQ ID NO: 88040 - DNA, 3879 bp, Zea mays
  Clone ID: MRT4577_180291C.1
atggcacgggcgcaaccagccgacaaccctagagttgtcgcacacacatatcagcagccccctccaccatacatccacgcccccgctccgcatccaccgcaccacgcataccaacaccaccaggaagtacaaatcgtacctcccccacccccacctcctcatcagcaacaacaaaacatccaccaccctcatgccccaaaacaagaggacttcgccgatcagccgtatcgcggagtcattcacatgatcactggggggtccagcaccgacttcgacacgaagcggcagaagcgggaccactaccgcagcatcaaccacgtcgccatcaccggtccggtcgtgcagacgaagtggtcccatgtgccactaaccttcgacgcccgagacgtcgatctgcgcagcgcccccacatcgacgccatgtcaagcagacatcattttcctccatgccttcgaccgcatgggcataagccacagcctgctcaagccttcggacaacccgttgtatggtttcggcggcaagggcacatttcccgtcggcaaaatagagttgcctctctccttcggtgtagcacccaatgcccgaagtgagcaagtgaccttcgatatcgtcgatatggtgtatccgtacaacgccattatgggccggggctccatcaacaagtttgaggcagccattcacggactttacctgtgcatgaagataccaggtccgttaggcgccatcacggtctacggcaaccagcagactgcgcgcaacatagagcgggactttgtccccgggcaaagaaacgtgcactgcctcacggcccagcgcgaggtccctgcgtccgccaacccaactgacaaagaacacgacaaagcacagctacagagcaacgacgggaccaagactgttcccctcgaccaggccacgcccaagcagacagtcaccatcaacgaagacctcacttcgtatgacgaggagaaactcctctgctgcttgtccaagaacaaagacgtcttcgcctggtccgccctcgacctggtcggagtcagccgatccataattgagcacagcttgggaatcgacccttcggtgagaccgaaaaaacaacggctccacaaaatgtctgacgagaagacagaagccgccaaggccgaggtacatcgcctcctggaggccaaatttatcgagccagtggcttaccccacgtggctcgccaacgttgtgatggtgcagaaaaagagcggcaagtggcggatgtgcatcgacttcaccagtctcaacaaggcctgcccaaaggacaacttcccgctgcctcggatcgacaaaatagtcgatagcgtggccgggtgcgaagtcatgtcactcctcgactgcttctccagttaccatcaaatatatatgaaggaggaggacaaggccagcaccagcttcataacacccttcggcacatattgcttcatcagaatgccggagggactcaagaacgccgggtccactttctcccggcttaccaaaacggtgctcgaggggcaagtcggcagaaatatattcacatatgtggacgacatcgtcgtcgccagtaggagcaaggaggaccatcttgctgacctcgccgagacatttgcgaacatgcgggacgcacgacttcgcctaaaccctgaaaagtgcatcttcggcgttcgccaggggaaaatattgggctacctgtcagccagagacgtccagcgcctgacaggcagattggccgccctcaacagattcatctccaaatccgcagagcgaagtctccccttcctcaaaactctccgcggcgcaaaagacttcgcttggggaccagagcaggcggcggccttcgcctcattgaaacagtacctgtcggaattggcggttcttacaagccccgactcttcgctgcccctgttgctttatgttgcggcttcgccgcacgtggtcagcgcggcattggttcaggagcagacagtagagggcgtgatcaggcagtgtccagtttattacgtctccgaagtgctcacaccatcaaaatgtaacatgacggaactggaaaagattgcttatgcagttgttatatcttcgcgcaaattgcgccactattttaaagcattcaaggtccgagtcaccttagataggggactcggcgaattgttcagaaacccggaggcatcggtacggatcgccaaatgggcggtcgaactctccggctaccacatcactttcgagcccaggacaaccatcaagtcacaagttctagcagacttcgtcgtcgactggactgggccaataacacagccggacccgtccacagagaaagtttggacaatccactgcgacggcgcatggtgccatgcaggggcaggcgctgctgcagtcatcacctcacccgccggggtcaagcacagatacgcggcacgcttaagcttcgctctggaatctgacagatgcacaaacaacatagcagaatacgaagctgtcatcctcggcctctgcaagctaagggcccttggtgtcaccacctgcattgtcagaacagactccaaggtagtcaccgaccaagtcgagaaagactatgcagcaaaggaccccgcacttatgcaatacctcacggccatccgaagtctcgagagacaattcaagggatttaccttgcagcatgtggaccgggccaagaatgaagaagccgccgcattggccaaggctgccgccagaggcgagtccctgccctccgacgtgttctaccatgttatcggcacgccagcagtccggagccccgaagggctccaaataaccaatgacagcgagggccaccgcatagtcaaccttattatgaccgaagactggcgggcaccaataaccctgttcctacaggggtactaccacccaaccgacatcaacgaggccaagcgcctcaaacatcgaagccgggacttcgcactgattgagggccagctttacaagaagggggtcagtcagccaatgcttaaatgtgtcaccgagaccaaaggcgtccaaatcctgcgcgaagtccacagcggtacttgcggctcccacgcagggccaagggccctagccgcaaaggtgatccgtcaaggtttctactggcccacaataatctgcgccgcaaatcgggtcacaaggtcctgtgaagcctgccagaagttttctcctcgatcaggcagcccttcgcaattcacaaaactgatcgcccacacatggcctctccagcgctggggcctggacattgtcgggcccctgcccacggctcaggggaacctcaagttcaccttcgtcgctgtcgagtattttaccaaatggatcgaggcgagggctgtatccacaataacatcaaagactgcacagaaattcttttggcaaaacattctttgccgcttcggagtaccgtccgaactcacagttgacaacggcaagcagtttgacagccaagacttcaaagatttctgcttctccattggcaccaagcttgccttcgccttagtataccacccacagtccaacggagttgtggaacacgcaaatggcaaaattttcacagctgtcaagaagatgctcctcgacgagaaaaaggccaagtgggccgatttgttacctgaagcggtctgggcgttaaacacgactgagtgcagggcgactgggttcacccctttccgccttctatatggatcggaggccatgaccccgcaagaaataaaacatgggtccctgaaagggaaatatgcccttaggccatttctaagtattttggtgattaagggccaacacaagtgcttaagtgttaatatatgcaaggaggtgaacaaagtgcaaatcaagtcaaaaggtatgtttttagacttagtacattgttttatggactaa

SEQ ID NO: 88041 - DNA, 418 bp, Zea mays
  unsure (1)..(418): unsure at all n locations
  Clone ID: MRT4577_180292C.1
ccggccgggaccagcggcatctatagcaaccggtccagcactttcacgctcagctccagcaatggctgcctccaccatggcgatctcctccacggcgatggccggcacccccatcaaggtggtctccttcggcgagggccgcatcaccatgcgcaagaccgtgtgcaagcccaagggggcggggtgcggaagaccctgatacngccccgaccgcgtcaagtaccgtcggccccttctccgaggagtctccctagctacctcaccgtactgactccccgagcaactacaaaatgatacaccgacaagctggccgccgactccgaaaccttccacatgaaccgcgagctggaggtgatcgcactcgcacgatgggacaatgttcttggagctctgctgcaacttccgcaagctgctcgtc

SEQ ID NO: 88042 - DNA, 350 bp, Zea mays
  Clone ID: MRT4577_180293C.1
gctggatatacctctgtatgtgagtgaggccaatgagagccctaggagggggggggttcccttcggcgggcttgctgctgctgttgcagctcgcaagagcgtcgcatgtcgcctacaaccacagggacctagaagcctacgctgctactagaacagaccaggtgccgacgtccatcctcaaccccctgctcaggacggtcttccactgacagcctccctagaactggatcaatgctcccaacgcgcccatggactacaaggcgtggtcccattttttgtaccagtacaaacccaagggcgccttatgtttctacatcattttggcccacataggagtagtttgaatcttt

SEQ ID NO: 88043 - DNA, 6552 bp, Zea mays
  Clone ID: MRT4577_180295C.1
tcaaacaaaaaatttgcgaaggttgtcgatgttccaggagtgctgcaggtcctcgccgtttggcgttgtgagcctgtaggcgctgggggaagcttttgtcttgactataaaggggccctcccacttgggctccagcttgcccctggactctgtccgagctgttcggacgagtacgaggtccccttcgcggaactccctcgggatgactgtgtggtcgcgccatgctttggtctgggcttggtatttgtttagggcctgcagggcgaagacccgctctccgtcaatgagatcctttgaagttggctcgtccacgtcggggacggctgacagaactgtacgcggggacccatgctttatttcttgcggggtcatggcctccgacccgtatagaaggcggaaaggggtgaacccagtcgccctccactcagttgtgtttagtgcccagactgcctccggtaacaagtcggtccatctgccttttttttcatcgaggagcatcttcttgacagctgtgaagattttcccattggcgcgctccacgaccccattggactgcgggtgatagactgaagcgaaggcaagcttggtgccgatggagaaacaaaaatccttgaaatcttggctgtcaaactgcttaccgttgtcaactgttagctcggacggtactccgaagcggcaaacaatgttttgccagaagaatttttgggcagtctttgatgttattgtagaaacaacccttgcttcaatccatttggtgaagtattcgacggctacgaaggcgaacttgagattcccctgagcggtgggcaggggcccgacaatgtccaggccccagcgctggagaggccatgtatgggcaatcagctttgtatattgcgaggggctgcctgaccgaggagaaaacttctggcaggcttcgcaggaccttgtgacccggtttgcggcgcagatcattgcgggccagtaaaacccttggcggatcaccttggcggctagggcccttggccctgcgtgcgagccgcacgtgccactgtggacttcacgtaggatctgcatgccttcggcttcggtgacgcacttaagcattggctgactgacccctttcttgtagagttggccctcaatcagtgcgaagtcccggcttcgatgtctgaggcgcttggcctcactgacgtcggctggatgatagtacccctgtaggaacagggttattggtgcccgccagtcttcggtcatgattaggttgactatgcggtggccgtcgctatcattagttatttggagcccttcggggcttcggacggctggcgtgccgatggtgtgaaagaacacgtcggagggcaagggctcgcccctggcggcagccttggccaatgcatcggcctcctcgttcttggccctatccacatgcgatgcctccgggtttctgaatagttcgtcgagtcccctgtctgaggtgactcggaccttgaatgcttcaaagtaatggcgcagcttgcgcgaagacataacgactgcgtaggcgatcttctccagctctgtcatgttgcacttggacggtgtcagtacttcgaagacacagtaaacagggcactgtctgaccgcaccctcaaccgtctgctcctgcactagtgccgcgctgaccgcgtgcggcgaagccgcgacatagagcaatagggggagcgaggagtcggggctcgtgaggattgctagctccgacaggtactgtttcagcgaggcgaaggccgctgcttgctccggtccccaggcgaagtcttttgcaccgcggagtgttttgagaaaggggagacttcgctcggcggacctagagatgaacctgttgagagcggccaatctgcctgtcagacgctggacgtctctggcggactgcggaggcgtcatgtttatgatggcctggatcttggttgggttggcctcaatgccgcgatgtgataccaggtagcccaatatcttgccctggcgaacgccgaagacgcactttttcggatttaggcggagtcgtgcgtctcgcatgctcgcgaatgtctcggcgaggtcggcgagatggtcctccttattcttgctggcgacgacgatgtcgtccacatatgtaaatatatttctgccaacctgctcttcgagtactgttttggtgagtctggagaaggtggacccggcattcttgagtccctccggcattctgatgaagcaataagtgccgaagggtgttatgaagctggtgctggccttgtcttcctccttcatgtatatcattacaacattggagagccacgtggggtaagccactggttcgatgaatttggcctctaggaggcggtgcacctccgccttggtggcctctgtcttttcgttggacattttgcgaagccgttgcttttttggtcgcaccgaagggtcaattcccaagccgtgctcaattatggatcggctgactccgaccaggtcgagggcggaccaggcgaagacatctttattcttggcgaggcagcagagaagcttctcttcttcctgtgaggtaaggtcttcgctgatagtgactgtctgcttgggcgtggcctgatcgagggggatagtctttgtcccgtcttggctctgcaactgtgccttgtcgtactgcttatcggttgggctggcgggcgcagggacctcgcgctgggccgtgagacagtgcacgtttctttgaccgggcacgaagtcccgctctatgttgtgcgcagtctgttgattgccgaagactgtgatgacgcctaacggacctggtatcttcatgcataggtacagtccgtggatggcagcttcgaacttattgatggagccccggcccatgatggcgttgtatggatataccatgttgacaatatcgaaggttacttgctcacttcgggcattgggtgctacaccgaaggagaggggcaactctattttgccaacgggaaaggagcccttcccgccgaagccatacaacgggttgtccgaaggctttagcaggctgtggcttatacccatgtggtcgaaggcgtggaggaagatgatgtccgcctgactgccgttgtcgactaggactttgtgtaagtcccagcctgccacgctgcaattgatgaccatagcgtcgatgtggggggcgctgcgcaggtcgacgtctcgtgcgtcgaaggttagcggtatgtgggaccactttgtctgcacgactgggccggtgacggcgacatggttgatgttgcggtagtggtcccgcttctgccgcttggtgtcgaagtcagtgctggacccccctgttatcatgtgaatgactccgcgatatggttggtcggggaagtcttcctgctttggggcatgggggatgttttggtgttgctggtgcggtggtgggggtggaggaggtacgatttgtacttcctgatggtgttggtaagcgtggtgcggtggatgcggagcgggggcgtggatatatggtggagggggttgctggtagttgtgcgcgacaattctggggttgtcggctggctgcgcccgtgccattctgtctctggtggccttcgtttctggacagtctttggtttggtgggcgcagttgcggccgtctcgaccggagtctggctgcggagtcctcgtccatgtgcggctggactgcgaggcgtctttgggtttccgctgtgactcaaccttgcgctggtggagctcttcggatttggcatatttttcaaagagctgatatagctcctggaggttcttgggtggatctctgatacaatgactgtagaggacgccggcacgaagtccactgatggcgtagtggatagcgatctgatcatcgacggacggcagctgtgacttgagtgttaagaatttgcggtaatactcccgcaaggtctccttttccagctgcttgcaaagcgagagctcggccaaggcgtcagtgtctgggcggtacccttggaagttgagcaggaacttgtccctgagacttctccatgaatcaatggacagcggaggcaacctggtgaaccaggtgagtgctgggccctctagggcgatgatgaaagacttcgccattgtggcgtcgtcccctccggcggatgcaacggcgacctgataactcattatgtattgcgccgggtcgatgctgccgttgtacttgggataggtccctgctcggaagttagctggccaaggcgtcacctgcaggtgaggcgccaggggacttcgctcgtcgaggtagttgaccccttggaatggcacggcgtgctggaaggtgtagtcacgctgggggaaacgcgggttctccggctgtgctcggtgttgcaggggtggcccatgctgcaggccgaggtggccttcgcgcgtgtcttccggttgtgcgcgttgctggaggggtggctcttggtgcaggccaaggtggccttcgcgctgcattagcgcgatctcgcgctcgaggtcttgggccttctgctcctcgtcgcgtatcatttgccgcaccttggctagtgcggacacacgctggcgcttggcctccagtatctctttctgcctctggagattgcggttcttgaggcgcagggcacgcagctgtagctgttcttctgttgagacgccgaggacctcgccgtcctcggtgaggtccgcgccttccagtggggcgaagcctgggggcggctgcgattgtccttcgggcccgcaggtgcggagagtgtcgtcttcgcaggtgcggggaacattgtcttcagtgggctcttggtgggtggattgggtgagggcgagggccttgccctttcttgcggcaagcagtgctgccttcgcagcctcgtcagccttcgggttggctctattgggtgccatcgtgggtggttttctcgtagcacgaacggtgggcgccaaatgttggaacttgctctcagttgcaaggggatccaacaagggtgaacaatgacgtaagcagggctctcgcgcgtgtgggcaataactctgttaatctggcctctcacgggcactgtgcgggggtatttataggtacctgagcgaccagcgccttgcgctaaggacgcatgtgccctcagctacctaggttatccccagaatattcccataaagcagggttacagactgtaattacagggatgcctttacaaattaggcccgtaacacgcggcggccacgcagggcccgttacaatgggccggaacacacgtgggcctctgaactggacgaggccgcactgtgggttgacgccgtcgcaggccttcgtttggtgccgaatcgagcgaagggtgtctctgaccgttttgcctccgtcagacccgcgactgcagcgaaggcctcgagcgaagggtggcgtctttgccttcgccccaacacttattctggccttagtctgcccgaggcaaagcttacccatgacgaggcatgtgaccagttaaagggtcctcgatcatcaagcctacatacgcatccaatccttaatcaacctgggtagaacatcacctgttcctagcccaagtcccgatttaagtacttccatccttaggattgtttgtgttccttaggatgaaaagagcatcacagggaactttgcagtaagatcccaatgctcccaatgaaaatatatccttgcaggtagaagccatccttcctcaggataacccctgagctaggcagtattgcaaaagacaaactctaaccacaagatctaagcagggctaagcatttttgtaaatcatattttgatacttacccagaagtatctataaaggtatggatttcaaggaaggcaatgcatcaaagggtttccaagcaactcctataaacctaatgcacatttcactagacttaaagtgtgcaaaaattatttaaaaacacaaggaaggggttgttttcaccggggcttgcctggaataaacactacgttagtgttgttaggtgacgtccacttgacgatcatccttgtcctagcacttgatcaggtaggttcgtttatcagcatctccatgcggagtagtccgcgcttggggtcgacttggctcgtcttccacatcacacgatcaattatcgtaccaataacttaatatgtcttgaaggccatgagcacagctacgattttcaattctgccattacctcgagcacctcgcgagtgacactgtggacgagtcgaggacacaggatacgaaggcacggctggtggtgtcctgcagctaaagccagcgagctgcgaaggacgcagttcggcgcgcgcaaccaaggcgtacagaggaaccggggtgtcgggcgcgtgtgcgcggcaacgcacggccaacgagtaaagacggcgcgacggccatgatacaggcgagctggatgccggcaagctgacggcgctgggaaactcgcgagcaggatctggagcagccatggcgagctagagacgaacggtcggacatggagcagcacaacagcgcacgacgaggagtctagctcggcagcttctgggagccaagcacaaatggcagagaagggttgcggcctgaggaagaagtgctgagacgagtgccgagaggagc

SEQ ID NO: 88044 - DNA, 5671 bp, Zea mays
  Clone ID: MRT4577_180296C.1
atggcacccaagagagctaaccccaaggctgacgaggctgcgaaggcagcactgctggccgcaagaaagggcaaggccctcgccctcacccaatccacccaccaagagcccattgaggacaatgttccccacaccggcgaagacgacaccttccgcacctgcggaaccgaaggacagtcgcagccgcccccaggcttcgccccactggaaggcgccgacctcaccgaggatggtgaggccctcggcgtctcaacagaagaacagctgcagctgcgcgccctgcgcctcaggaaccgcaatctccagaggcagaaagagatactggaggccaagcgccaacgtgtttccgcattagccaaagtgcggcaaatgatacgcgacgaggagcagaaagcccaagacctcgagcgcgagatcgcgctgatgcagcgcgaaggccacctcggtttgcagcaagaaccacccctccaacaacgcgctcagccggaggacatgcgcgaaggctacctcggccgacagcacggccaacccctgcagcaccgggcgcagccggagaacccgcgtttcccccagcatgactacgccccccagcacggcgcgccattccaagggatcaactacctcgacgagcgaagtcccctggcgccacacctgcaagtgacgccttggccagccaactttcgagcgggggcataccccaagtacaacggcagcaccgatccggcgcaatacatcatgagttaccaagtcgccgttgcatcagccggaggggacgacgccacaatggcaaagtctttcatcatcgccctagagggcccagcactcacctggttcaccagattgcccccgctgtccattgattcgtggcgaagtctcagggacaagttcctcctcaacttccaagggtaccgtccagacaccgacgctttggccgagctctcgctttgcaaacagctggaaaaggagactctgcgggagtattaccgcaagttcttaacactcaagtcacagctgccctctgtcgacgatcagatcgctatccactacgccatcaatggccttcgggccggcgtcctctacagccattgtatcagggatccacccaagagcttgcaggagctatatcagctcttcgaaaaatatgccaaatccgaagagctccaccagcgcaaggtcgagtcgcaacggaaacccaacagtcagactccgcagtccagccgcacgtggacaaggacttcgcagccagactccagtcgagacagccgcagtcagcagcaagtccacaacatcgtcaaccaacagcctgctgctgacccccctcgccgccaggaatatcccccccaaggccgcggaaatggaacgcgcggcaggggtcgagggcgggcgcagcagccgccgcgccggttctattgccttttccacggcgaagactgcgcccaccagaccaaagactgccccgagacgaaggccaccagagatagaatggcgagggcgcagccggccgacaatcccagaattgtcgcgcataactaccagccaccccctccaccatacgtccacgcccccgctccgcatccaccgcaccacgcttaccaacatcatcaggaagtacaaatcgtacctcctccacccccaccaccacaccagcaacaccaaaacattccccatcccccaaagcaagaagacttcgccgatcaaccttatcgcggagtcattcacatgataacaggggggtcaagcaccgacttcgacaccaagcggcagaagcgggaccactaccgcagcatcaaccatgtcgccgtcactggcccagtcgtgcagacgaagtggtcccacataccgctaaccttcgacgcgcgagacgtcgacctgcgcagcgccccccacatcgacgcaatggtcatcaactgcagcgtggcaggttgggacttacacaaagtccttgtcgacaacggcagtcaggcggacatcatcttcctccacgccttcgaccgcatgggtataagccacagcttgctgaagccttcggacaacccgttgtatggtttcggcggcaagggcacctttccagttggcaagatagagttgcccctctccttcggtgtagcacccaatgcccgaagtgagcaaataaccttcgacattgtcgacatggtatatccatacaacgccatcatgggccgaggctccatcaacaaattcgaagccgccatccacgggttgtacctatgtatgaagataccaggcccgctgggcgccatcacaatctacggcaaccagcagacggcgcgcaacatagagcgggacttcgtgcccggtcagagaaatgtacactgtctcacgacccagcgcgaagtccctgcgccggctagcccaaccgacaagcagcacgacaaggcacagttgcagtgccaagacgggaccaagactgtccccctcgatcaggccacgcccaagcagactgtaactatcagcgaagacctcacgtcacttgaagaagagaaacttctctgctgcctggccaagaataaagatgtcttcgcctggtctgccctcgatctggtcggagtcagccgagccataatcgaacacagcctggggattgacccttcggtgcgacccaaaaagcagaagcttcgcaagatgtcagatgaaaagacagaagccgccaaggcggaggtgcatcgcctcctggaggctaaattcatcgagccggtggcttaccccacgtggctctccaatgttgtgatggtgcagaagaaaagcggaaaatggcgcatgtgcatagacttcaccagtctcaataagtcctgcccaaaggacaatttcccgttgccacggatcgacaaaatagtcgatagcgcggccggatgcgaggtcatgtccctcctcgactgcttctccggctatcaccagatatacatgaaggaggaagacaaggccagcaccagctttataacacccttcggcacttattgctttgtcagaatgccggagggtctcaagaatgccgggtccaccttctccagactcaccaaaacggtgctcgaagggcaggtcggcagaaatgtattcacatatgtggacgacatcgtcgtcgccagcaaaaataaggaggaccacctcgccgacctggcggaaacattcgcgagcatgcgagatgcacgactccgcctaaacccggaaaagtgcgttttcggtgtccgccagggcaagatattgggctacctggtgtcccgccgaggcatcgaggccaacccaaccaagatccaggccatcgtcgacatgtcgcctccgcagtccgccagggacgtccagcgcctgacaggcaggatggccgccctcaatagattcatctccaggtccgccgagcgaagtctacccttcctcaaaaccctccgcggcgcgaaggacttcgcttggggaccggagcaagcagcggccttcgcctcattaaaacagtacctggcggagctggccatcctcacaagcccagactcctcgctccccttattgctctatgtcgcggcttcgccgcacgcggtcagcgcggcactagtgcaggagcagacagtcgaaggcacagtcagacagtgccctgtttattatgtctccgaagtcctgacaccatccaaatgcaacatgacagagctggagaagattgcttacgccagttgttatgtcctcgcgcaagctgcgccattattttgaagcattcaaggtccgagtcacctcggacaggggactcggcgaactattcaggaacccggaggcatcagtgagaatcgccaagtgggcagccgagctctccggctaccacatcagcttcgagcccaggacagccatcaaatcgcaagtcctggcagacttcgtcgtcgactggactgggccagtaacacagccggacccatccacagaaaaggtctggactatccattgcgacggtgcatggtgtcatgcgggggcaggcgtcgctgcagtcatcacctcaccagccggagtcaaacacagatatgcagcacgcctcagcttcgctctggaatccgacaaatgtacaaacaacatagcagagtatgaagcagtcatcctcggcctccgcaagctaagggccctcggagtcaccacctgtatcatcaaaacagactccaagatagtcgccggtcaggtcgaaaaagactatgcagcaaaagaccccgcgctcatgcaatacctcgcggctatccgaagtctcgagaggcagttcaagggattcaccctacagcatgtggacagggccaagaatgaggaggccgatgcattagccaaggccgccgccaggggcgagcccctgccctccgacgtattctttcacaccatcggcacgccagccgtccggagccccgaagggctccaaataacaaatgatagcgagggccaccgtatagtccacctaatcatgaccgaagactggcgggccccaataaccctgtttctacagggatactatcacccaaccgacgtcagtgaggcgaagcgcctcgagcatcggagccgggacttcgcgctaatcgagggccaattatacaagaagggggtcagtcagccaatgcttaaatgcgtcaccgaaaccgaaggcatccaaatcttgcgcgaggtccacagtggaacttgcggctcgcacgcggggccaagggccctggctgctaaggtgatccgacaagggttttactggcctgcaatgatctgcgccgcaaatcgagtcgcaaggtcctgcgaagcctgccagaagttctctcctcggtcaggcaacccctcgcaatacacaaagctggtcgcccatacatggcctcttcagcgctggggcctagacatcgtcgggcccttgcccaccgctcaggggaacctcaagttcgccttcgtagccgtcgaatacttcaccaagtggattgaagcgagggctgtgtccacaatcacatcaaagactgcccaaaaattcttttggcagaacattgtttgccgcttcggagtaccgtccgagctaacagttgacaacggcaagcagtttgacaatcaagatttcaaggatttctgtttttccattggcaccaagcttgccttcgcttcagtctatcatccgcagtccaacggagtcgtggagcgtgccaatgggaaaatcttcacagccatcaagaagatgctcctcgacgagaaaaagggcagatggaccgacttgctaccggaggcagtctgggcgctgaacacaaccgagtgcagggcgaccgggttcactcctttccgccttctatacggatcagaggcaatgaccccgcaagaaataaaacacgggtctccgcgcacagctccgtcagccacccctgacgtggatgagccaacctccaaagatctcattgacggagaccgggtctccgccctgcaggccttaaacaaataccaagcccagaccaaagcatggcgcgaccgcgcagtcatcccaaaggagttcagcgcgggggacctcgtactcatccgaacagctcggacggagtccaagggcaagctggagcccaagtgggagggccccttcatagtcaagacaaaagcttcccccagcgcttacaggctcgcaacgccagatggcgaggacctggagcactcctggaacattgacaaccttcgtaaattttttgtttaa

SEQ ID NO: 88045 - DNA, 354 bp, Zea mays
  Clone ID: MRT4577_180297C.1
cagaaagatcctactctaagaccaacctttgcagagattgtggatacacaaactttataaacaaggtggtttggagttctgtgcatcaccagaggcatctaggtcgatcccactcttcttcgtatttatgcccgctacgcaggatggcactatagcgctgatggagttggacgatgtcatcagactcgactgggtgtggatgggatgaactctgctcgtgttgaaggcgagagagagagagcgtgcttggcttgcgtgagaccatatttcggttcatattttttcatgggtcgtgttaattgttatgtcatattacacaacttcagatatttatatgtctttgtgagagaagta

SEQ ID NO: 88046 - DNA, 548 bp, Zea mays
  Clone ID: MRT4577_180298C.1
aattcggcacgaggatcttttcccctttcgatgtgctcatctcatgtgtggttctgtgactgttgagagagaggtgggcgaggcagccatacgaagttggtggtcggagccagatctgcttggatgcatagtgaaagggccggagatcggcacggcacctacctccggcggcgggcgacggctgcttcttctagatctggaaactaatgtttcttctccgatccagcagttttagcaaacaccatatatagcaatatgtggacatgctcattgtacctttccccctactaatcatgcaaaggtatcatctgaagaaagagaaagacaggttcttggaagccaaatcaagagttgatgatgccttcagaagaaaggaataccttgcattagtggattcttacatgaaggtaactaagatggaatgattttcccacaaagaaagagcacaaaataaattgaattctagaagttaattttgtacaatttaatttttctgcatgtaataatgattaacatgcatatttttcctttggggggagggcaaagga

SEQ ID NO: 88047 - DNA, 159 bp, Zea mays
  Clone ID: MRT4577_180299C.1
atggggctatatgatagtaattctgattaatggggctacacatgcgcaaatctgtcaaattcctccgtggggacattttggacatacagttcttacaaaaccaaacacattcgggacctcagctgggggcagggggcaaaccaacgcgaaaaaggcccg

SEQ ID NO: 88048 - DNA, 265 bp, Zea mays
  unsure (1)..(265): unsure at all n locations
  Clone ID: MRT4577_18029C.1
ataagttgtagnaggaggtgnggtanggacggagttanaaggtagnanggcganancgtanctgtggtntcggngatgaaggtggcgtttnggtttcttgtagagggtttgggcgtattgaaggggcaagacgantnngctatgntnacgtgtttgagnaagatggactacggcaagntacaancgattgaanagganaaggatattgtatcggtttctagattggtgcgatggagntgtttcttcggataatacggtagcgggt

SEQ ID NO: 88049 - DNA, 184 bp, Zea mays
  Clone ID: MRT4577_1802C.1
acacaattaccatggggctatttggttcctagccatagtttagattagtgtgacgagtaagaaggcgcatctagaagattttttagagctgtactttactgtatctaaaaatattactttttgacactttgacatatgagaagtgatcttgtttaggtttagttgacaactaaacgcttgcaac

SEQ ID NO: 88050 - DNA, 760 bp, Zea mays
  unsure (1)..(760): unsure at all n locations
  Clone ID: MRT4577_180300C.1
acggaaagcactgtttgacnagnccntgcnagccctcctctctctcttacttatngggtcgtttcctcttcctttccgtaaagattgcacacaaaaactattggatcttttcccctttcgatntgctcatctcccgtgcgtccgcttttcccctttcgatgtgctcatctcatgtgtggttctgtgactgttgagagagaggtgggcgaggcagccatacgaagttggtggtcggagccagatctgcttggatgcatagtgaaagggccggagatcggcacggcacctacctccggcggcgggcgacggctgcttcttctagatctggaaactaatgtttcttctccgatccagcagttttagcaaacaccatatatagcaatatgtggacatgctcattgtacctttccccctactaatcatgcaaagggagcaagaaaatgtaatgcttgggaccataagatgctagagcctgacgtgtcatatagtaaggtacaaaaatatgattgatttgagttgacagaaagttttaagtgtacgtaggcttatttcactttcaaggtatcatctgaagaaagagaaagacaggttcttggaagccaaatcaagagttgatgatgccttcagaagaaaggaataccttgcattagtggattcttacatgaagttgggtttgtttcttcaatgctgtgttcgtgaagatcaacaaggcttactattaacatgcttcgcagggttgagccatatgttgcacactggt

SEQ ID NO: 88051 - DNA, 501 bp, Zea mays
  Clone ID: MRT4577_180301C.1
aattcggcacgagggcaagcgcctcctacgccttcgcactccacctcactgcgatgcgataatatgctacgacaacttgactctgacgcatcttgaactactactgtcccgcatccgacctatagctgtggttcatactacatgtgtcttggaactgggagctgatacggaggagggcggactggacccatggactcgcacggagaggtagcctccacggcgccaaatcagacatctaaaccgggtctacaacaagaccgtgcctagagcgaggccgtgatgactgatctgctactgctgagcggcaagtcttagctgcagagcactggcgatgccgttgcgcaacacactggaactgccgatgagacaagccatcacatcggagacggatcgcacggtgtacctcaagacagtgaccgactgttacacgcggacgacgaagctcctcgacgattccatgacgggcaggaccacgaacgagcgttcgagcggaacgaggag

SEQ ID NO: 88052 - DNA, 432 bp, Zea mays
  Clone ID: MRT4577_180302C.1
ctctgcatctgcaggcgtcgtcgtcactcttggtggacgtagtacatcggtgcgtggagtatctgttgtttaattgcgtacgttcagttcattctgtttcttgtattctttcggttcctttcctctggtatattcatggatgatgaggtgtttctgtttaatcctctgattcacctgtaaccatgtatcatgtaacgtgcgcgtttatgtcctactgatttctgcagctgtatttattttacttgatagcttactatcgacatatgatcatgctactatcattcatatgataacaattacgtggggtgcatttgttgtcacaaatcattttttctcattatcttctttctcttttgctttctaactctttctttctacttttatcttctttcttttatttttctttctacttatttttcttttttttatttt

SEQ ID NO: 88053 - DNA, 286 bp, Zea mays
  Clone ID: MRT4577_180303C.1
gtgttacgactaattgctcttgtctgcgtttgccgtttctcctcagaccgagcgggcggtggaagaagaccacctggatccatctccttcttggttgactcagcgagagcttatttcggttacaatggagcgcatgcacagaatgcttacgagaaagtccctttcgtggaggtgggacagtcatattaaaccaaagaactccgcggggcttgctgataatgaggcagatgaccacaaggcattcaaagagatgctgacgctcataaaagataaaagtgatgtcttt

SEQ ID NO: 88054 - DNA, 130 bp, Zea mays
  Clone ID: MRT4577_180304C.1
gccaggagcgtcttcctccacttgatgaaggtggacccagactccacctggttcctcctgaacgagctttactgccccgtgcagttcacacctccccatcccagcctccaccctgtgcagctgcacgggg

SEQ ID NO: 88055 - DNA, 200 bp, Zea mays
  Clone ID: MRT4577_180305C.1
ttccatcacagaatggttgagctcggctgccttctgttgatttcgacatacatttgcctgccggtggcgtcctgcccactgttgtcgctggacaacacgtcgtttttagacttgtgatgtcttactactgttgtgaccctcgcttgttttgtgtatttcgtgttagactgtgcaataaaagcagtcccagcgtgtttctt

SEQ ID NO: 88056 - DNA, 374 bp, Zea mays
  Clone ID: MRT4577_180306C.1
ggagtggagggtagccaatgcatcaaagggtttccaagcaactcctataaacctaatgcacatttcgctagacttaaagtgtgtaaaaaatcatttaaaaacacaaggaaggggttgcatgcatcgaggcttgcctggaagaacattaagttagtattgttagacgtcgatcacttgacgatcaacctttgttccgatacatgctccatctatccatctccaggtttgtctaccagcatcaccatgcaaagaagcccacgcttaacaacatcttgtggtcaacttaactttggtccttgtcctttgcttcgtacgattctcagctagcgtacctaatgagatgcattatgcacatgtatgaacataagaaggaa

SEQ ID NO: 88057 - DNA, 257 bp, Zea mays
  Clone ID: MRT4577_180307C.1
ctagagacttattgcattaagacatcacttaacagattgtttagttttggtaatataatttgacatctaaacataagctgagagggatctccctcaaaacctttgataatatgattcattgtcaaatgtttgttttgcctatctggcactcattaattaattctttttaatatagcttggatttactgattttgaaaaagagaattattcttattgatgttgctacatatccaggtggcttgaatttcaccaactag

SEQ ID NO: 88058 - DNA, 684 bp, Zea mays
  unsure (1)..(684): unsure at all n locations
  Clone ID: MRT4577_180308C.1
ttcccgtcccgtcggcgagtgtttgctgggagaaatttgttggggccatggggaagaagggcaagtggctgggcgccgtcaagaaggtgttcagccctgagtccaaggagaagaaggaggagtcaatgttttgatgccgccgccgcctcccgccgttccttctccgcaccaaactgaggaggttcaggtccgtgatgttgagctggagcaggagcaggagcagagcaagcatgtgaccgtggaggcagcccctgatgctcctgcgcagacgtcggcggcattgccacctggtgtatcgagggaagagctcgcggcaatcaagatccagaccgccttcaggggatacctggcaaggagggcactacgagccttgaagggccttgttagattgaagtcattggtcgagggtaattcggtcaagcgtcaagctgctagtactctgcgctgtatgcagactctcgcacgggtgcagtcacagatacgttcaagaaggctgaagatgtctgaggagaaccaggccctccagcgccagctcctgctgaaacaagaattggacagtttgaggatgggggagcactgngacgacaccactcaatccaaggagaagatcgaagcaagtctaataagcaggcaagaggctgcgataagaagagagagagcgctcgcatacgcgttttcccatca

SEQ ID NO: 88059 - DNA, 659 bp, Zea mays
  Clone ID: MRT4577_180309C.1
actcaacctgaccacctccccttcccatcccttcccttccttcccgttagttagctgccgctcgccaccgcaccgcaccgcaagaggaagggcactcgcccgccctcctcaccttgcttccgcagaaagatccatttggttggactggcggtggctcccctgcacaccgcagtggtaaagtcgcgcccttttgtgtgtgcgcttgccttgccgccgcggcatccgtcccgccccgtggataactagtgatagatctgggaggcgcagatctgaccggtggtattctccttcccgtcccgtcggcgagtgtttgctgggagaaaatttgttggggccatggggaagaagggcaagtggctgggcgccgtcaagaaggtgttcagccctgagtccaaggagaagaaggaggagaaactgaggaagaaattggctgcaagagaccccagtccaccagatctaacaccttctacttccttggaagtcaatgttttgatgccgccgccgcctcccgccgttccttctccgcaccaaactgaggaggttcaggtccgtgatgttgagctggagcaggagcaggagcagagcaagcatgtgaccgtggaggcagcccctgatgctcctgcgcagacgtcggcggcattgccacctggtgtatcgag

SEQ ID NO: 88060 - DNA, 123 bp, Zea mays
  Clone ID: MRT4577_18030C.1
ggggcgtaggcaggagatcaaatcatgagggaggcaaatactaacacataccttgtacatataacgactaatgcacgtgaaacaacggaaaatcacgggcatgacctactacattttatcgga

SEQ ID NO: 88061 - DNA, 853 bp, Zea mays
  Clone ID: MRT4577_180310C.1
ccggccgggatactgtcgtcattgtcgcattgaatttactaacatcacctacagacaaaccaaaggacccgagtgagcctagggataccaaagaggagaagcaagtgccatcgatcaagcaacccgacggtgacgaaagcaaagagggcgtgacgactaatgctcccctcgcaccaccgcccaagccaacccagaacggcagtgataacgactacttctcatcaggaaacaagcccactcatttctcaagcgagcctaacccgttcgagaacgcgtttggtagcaacccagcagacactcccggcaaaccacaattgccaggtgtgactagtctcacgtcgccagcttcgcttctcccatcggctacgccgggctggccaggctcattacgctctggaccattgagcccagcaatgcttactggtcctaccagcaacaacgactacttcagcggcgaccaccacttctcgggtagcttccctacgcctaacgaatcttctttgcgcaccggattgacgccaggaggtggcgggtctatgttcccgcagccttcacctaattcccaagctctctacaactccctgcaaagtggtggcgcaaccccaggcacccttgacttccaccgtactgctatgactgcacgcgcacacagccaggccaacaacaacttcaacatgccagcatcaacatctcagccccagcagaaccctaatatccaaccggacctcgacagcaagccgtacaaccccaacggccaggctcagcaaccggaagctcaagatcccttcagctcgcatcaaacgaacgatgctgcgaacggtctcttcatgctcgcacaagctggcggccagca

SEQ ID NO: 88062 - DNA, 530 bp, Zea mays
  Clone ID: MRT4577_180311C.1
tttgcgagtttttttttttttttttttttttttttttttttttttttttttttttttttttttttttttttttggggaataaccccctttttttcctttaaaaaggaaaggcccctcttataaaccatttgggaaggggcccttttttacaaaaaaaacttaacccctggctgggggggccaattgcaacaaaccccccaaaaataaattccacccgatgcacaaaggttgcgatctatggttgaaagaggatcttaaccggaccggctttttgggcccaaaaatagaacccctttaaccttatgtgggcagttttcctgtctctggccttccctgaaccaaaagatggaacgtttgttccatttccccggtggaggtttgggaaaacattcaaagggatggtttccctagggtttccatgccaagggcgccgcccggggtgctgggaacaccggaggaagcccaaaaaaaagggggttcttaaaagtgccaacccgcccgggttccatatcggtaaaaaagaaaagggc

SEQ ID NO: 88063 - DNA, 302 bp, Zea mays
  Clone ID: MRT4577_180312C.1
aaaaaaaaccggagggccttgccccttttttgttccttgtttaagggcattttttgtagggaaatttgcccggttgaaacgaagggcatactagacaccccttatgccctttttttggggccccttccccccccctagtgggccagttccgggtgttttgagatcaatgtccccccccaaaacgattgtgggaaaaattcccctacataaatttttatttttttcgatttgaagggaaaaaacttgcccagttccttattgggttggaccgggagcaaactgcttttgttcgaaataatttt

SEQ ID NO: 88064 - DNA, 245 bp, Zea mays
  Clone ID: MRT4577_180313C.1
ggcgtgcgtagaggcgattgcatagcacaaggttttttcccaccataagtaggcgggcgccgccatgcagagactagtgcgcgtgctcgtggagctgggcgcggccaccgcggtgttggagtaaggaccgacggtggggccaacttcgcccaaacacacgtgggataagacggtggcgacggcgccaaaaacggcgtgcagaaacattacgcctgtgctggacaagggcggggagctaaacacct

SEQ ID NO: 88065 - DNA, 592 bp, Zea mays
  Clone ID: MRT4577_180314C.1
gaaattgaaatctcattgtatttataatttatattttacataaatgtatcaaaataatgttataaaaaaaaggattggtaacattttcacaaggtgacaaaaaaaagatcctcagttttgatgatcaagtggctgaagaagacggctcaaccatgaaattagctatcctgttcaacaggtttaaaccaaaaaccgtttcttcgcaattgatcttgactgttaaattcagaacttcggtgcatttgccttcgactgtgatggtaatcaaaagagggatctcactgctcaagattttgctgctgaatcttaatcgcagaccagttgcatcttcgagtgagtttgcaactggtaaatccacagatacaaggtgtagatttgagttgctaagcacctttagtgttatactctcgcagatgctaagaaatttgtctttcccattctccgttcttgaatctttaacatgatcgtcaaaagtacaccttcgactatactcaaacattccaggtaatcgagattctgtagctaagaattcctcgatgctcattgaaaatggtttcacaaggtatccaagatcaggtcgtaacttgacagg

SEQ ID NO: 88066 - DNA, 244 bp, Zea mays
  Clone ID: MRT4577_180315C.1
aataaattttggttcaaaaatgaatagaattagagtccgatccttaaattttatagtgtaaaatttagagcccattgtcacctctaccaggaccagaagaaaggaatttaaactgttgctttctcattcttcttgtaattggttggttgagtggtctttagtttacaaacaatgaactttatatttggaaaaggtgtaactgatgttcagttacgtttctatatctagaaagtttcctactata

SEQ ID NO: 88067 - DNA, 646 bp, Zea mays
  Clone ID: MRT4577_180316C.1
gaagtctccttccttactctggtgatatttctccatctctcaaatgcaattccggagaacaccctcctctgccaatatccagatctatgaggaaaagatatcttctgcttcttagcataatgcctcgtatctctcgaacgatgacttcggccgcctctacatagaccttgccgaaattgaaatggcctgactcatggtgtgacgcgatcacctcggtccgcccaagcacttagatgaggctacgatctcgactcctttccatatgaccatgcacaccgccggcctcatacatatcctcaccgctctcagttgcgaggcccgctggtggtcctggaacatcttctccacgcacgactgcaccgccgacacacatcacgcgcgacttcgtccgccgggctcgcctgtaacgggtacatcctcaacgactactgtaggtacaccgatggctgcctccactggggtcatgcagtgggccccgacctcttcctctacgacgtcggcgaccccactctgctcatccacgagggtgtcaaggccgaagaggattacgagaagaccggcaagatcccccatccggagtccaccgacaactctgaaatcaagatcgagctcaccatcatcctcgacggtgtcaaggctgacccca

SEQ ID NO: 88068 - DNA, 148 bp, Zea mays
  Clone ID: MRT4577_180317C.1
cgcatactcgtcaatgagatattgtgtgttttcgagccatcaagagtataatttttcttttaccggcgaagcgatgcttttcggggcctgagactactccctgtatgctttaacgggccgcacgaataataccggttatggatgtatt

SEQ ID NO: 88069 - DNA, 440 bp, Zea mays
  unsure (1)..(440): unsure at all n locations
  Clone ID: MRT4577_180319C.1
cancttttagtgtcaagganggcacaaacaaaaaccagggggggaacattcagagcngaaaaccggagactaagcaagggaaaaagaccccgagccagcagcggggnccccnggagacgaaagaacccccacagcagcacaaaaccacagggccnaggcagcaacaaaaaacccaaaacagggcaaaaaggagaaaaaaacacaaacgggacaggaccacgaccacaacaaaaaaaccccccaccggccggaacacccccggggggacggnagnccgacaaagccaaaccaaaccagggncccgaaccaccccaacngggagggggacnncaccaaaccgaccacagaagggcagcaacangggcaggcagacccggaagcaacacggnngagaacgggggaaaggcaaacagcacacgagcggcgccgcgggacacaaa

SEQ ID NO: 88070 - DNA, 254 bp, Zea mays
  Clone ID: MRT4577_18031C.1
cgcacgtttgtctacactatacagtcgcgccaactggtcgctctcctctctgccgcgcccgcctactgtgcgagattgtattcaggacacaagggcacacaagacacgagtcgcgatgatcaagggcagcgtctgcgggcccccatgcgctggctacctcacctcaaataaggccaagtgcctgccgatcaagaagtggaacaacctgtctctctcagcccgtgacagaatggtggacaactgcgccagatgcc

SEQ ID NO: 88071 - DNA, 1520 bp, Zea mays
  Clone ID: MRT4577_180320C.1
gaagatcaaccggcagccacgtgatccgccgacagcaacgcctcattgaattcggttagatgagtgagtctagttttggttggctttgcggttgacgacgaccagccagctggataagattccattttattatggtgacaagtcattgttgccgtgagcgtgacattgttgtgcgccttccactgccagtaatggaagcaggcgccggggaagcagcaccaagcgcgccgcgcagactgaccctgccgtggaaggtgcggctcctgctcctctgcctcgatgtcgtcgccggtctctcgatgcgtcgcgacggcaccatcaaccgctccatcttcaacctcttcgaccttcgtgccaccgccagcacgcgcccggacaggcagggcgtccggtccgccgacgtggacgtggacgcgtcgcgcggcctgtgggcgcgcgtgttctggccgtcgccggagtcgtccgcggccccgctcccagtcgtggtctacttccacggcggcgccttcacgctgctctctgcggcctcgtacgtctacgacgccatgtgccgccggttctgccgcgagctgggcgccgtcgtcgtgtccgtcaactaccgcctcgcacccgagcaccgctgccccgccgcgtacgaggacggcgtcgccatgcttcgatacctcgcctccgcgggcctccccgacagcgtcgacgtccccgtggacctctcccgctgcttcctcgccggggacagcgccggcgccaacatcgcccaccacgtggcgcagagctggacgacggcctcctccccgccgtgtcccatccccgtccgcctcgccggcgccatcctggtgcagccgtactttggcggcgaggagcggacggaagctgaggtccggctggatgggaacgtgccggtggtgaccgtgcgaggctcggactggatgtggcgggcgttccttccggaaggcgccgatcggaaccactccgccgcgcacgtgacagacgacaacgccaacctggcggacggctttccgccggtgatggtggtgatcggtggcttcgacccgctgcaggagtggcagaggcggtacgccgacgtgctgcggaggagggggaaggaggtaagggtggtggagttcccggacgccattcacacgttcttcctcttccccgagctcaccgactatggtacgctcgtcgaggcgatgaaggcgttcatacgcgagcaacgcatctgatctaattctgcctcacggatcaccaacctacgtggacctacatggtccgtgcaaataattttgtttcccatgcacgtaatggtccctacatggtccgtgcaaataatttctctataaaccactattcaagtctcccatatatttattcagttcatcgagcatctcttctagatcttaattctggatcgtcatgtacattatgttatggattcatagttgcccttttgttctacagcaccatcgaattcatcccaatgttgctctaatttttcagttaaggaaaaaaaaaaaaaaaaa

SEQ ID NO: 88072 - DNA, 209 bp, Zea mays
  Clone ID: MRT4577_180321C.1
gccgtttccaagacactccactcttcagcttttcagagctctgcccaagaaaaggggaggaaggacgagccggagccactcagccgccacctcaccccccccatcggccgcctgcgttcctccacccgctcctgctgccgggtctgccgcccgttgctcccgccactgaagccctcgccgccgccctccgcctcccaccgcttgcttgc

SEQ ID NO: 88073 - DNA, 278 bp, Zea mays
  Clone ID: MRT4577_180322C.1
cgcagctccgctgccctgctctccacctcctccagacctccaccatggacgagccgccggtgcatccaccgtcccttccccatgccctcaccaccgccgagtaacaccttctcggtgctggagctcgaggcagcgatcgccgggcacgccgacttctgccacgcgctctgcaggcgcccgacgccggccacggccgaacggctcatcgcaacggtgccgcagctgcttcgcggcgcccacgccggcggcaaggaagaaaaaaccctggtggttgttga

SEQ ID NO: 88074 - DNA, 3108 bp, Zea mays
  Clone ID: MRT4577_180323C.1
atggcttcgttcaacgatcaagctggagctgcttcggccccgaagctggtactcccgataacaggcggttcatgctcagaaccagccaacaagaagcagaagaaggaagcacagagaagggtacagcacgtcggggtgcaaggacccttcatcaagtcaagatggtctcatattccaattaccttctcccaagaggatcttcaactcaaggattacccacacaatgatgttatggttatctcttgtgtgatcaaaggatttctggtccataatgttttggttgatacaggcagcgcagctgatatcatatttgctaaagctttcagacaaatgcaagagcccgaagacaagatccatgatgctacgcaccctttttgtggcttcggaggacggcaaattgtagcacttgggaagatcaccatgtcagtaaccttcgggtttgttaacaatacaaggactgagcaagttgtgtttgacattgttgacatggagtatccttacaatgctatcattggtcgtggtactctcaatgccttcgaagcaattcttcatccagcttacctttgtatgaagataccttcggaccaagggcccatcgctattcatggaagtcaggaagctgccagaagggccgaaggaaattggacagattcaaaagcgatccataacatagatggagctgaagcttctaatgatctttgcggagttaacagggatgttattgagcactcgctcaatgttgacccatctttcagacccagaaagcagagacttcagaagatgtctgatgacaaggccgaaggtgctcggaatgaagtgaaaagactcctcagtgctggagttaatagagaggtaaaatacccagaatggttggctaatactgttatggtgaagaaggccaatggtaaatggagaatgtgtatcgattttactgatctcaataaggcctgtccgaaggacgagtttccattgccaaggatagattctttggttgatgcagcagcttcttcagagcttatgagtctgttggattgttattcagactatcatcaaatctggatgaagaaggaggatgaaccgaagaccagcttcataacccctagtggaacatattgttaccttcggatgcctgaggggcttaagaatgctggaggaagcttcagcagaatgacagctaacgttctccattctcagataggtaggaatgtgctaacttatgttgatgatatcattgtaaaaagcacaaagcaagataatcacattgctggtctgcaggagaccttcgctaattttagacaggctggtttaaagctaaacccagaaaaatgtgtcttcggagtgaagaaggggaaatttcttggttgcctagtttcaacaaaaggaattgaggctaatccaaacaaaatcgaagctatccttcgaatggaaccaccaagtacgaagaaaggggctcaaagattgacaggaagactggcatctctcaacagattcatatccagatcagcagagagaaatttgccatttttcgaagtgctgaagtcagctgaagtttttcagtggggaccagtccagcagaaagccttcgaagagctgaagcaatatttaatagatctaacaacattaactccaccaatgccaggggctcctttgttattatatgtggcagcttcgcactcagcggtaagtgcagcacttgttcaagagaagcttgaaggccaagtcaaaaagcaggccccaatatactttgtgtccgaagttcttagtttatcaaagaaaaattatacagaattggagaaggtactgtatgctgttttgatggcctccaggaagcttcggcattattttcaagcttacaacataattgttccttcttcacaacctttgaaggatattataagaaaccgagaagctactagaaggattggaaaatgggctgcagagctcaatgaattttgtattgattatgtccatagatcttcgattcagtcccaagcgttggcagacttcattgctgactggacgccaggagctcaggaagaagaaatgaataaagatgccgaagcatggacagtgttctgcgatgggtcttggggaacctttggagcaggagcagctgctgtgttggtttcaccttccaaagttagaacttgttatgcgatctataaagcaagagatccgaagcttgaaaaatatctagatacagcccgaaggattgaggcttcctttgaaggattctctgtcaaaaatattcctcgcggagaaaatgaatatgctgatctgttagccaagtcagcggcacaggggctgcctttaccttcggatgtattttttgaaacaataaaagcaccttcggttgagcttcttgaaagagcggtcctcaacatatcccctgtctatagtgaagattggagaactgaaatcatctctttccttcaggtgccgaaggccattactgtggacaatggaacgcagtttgacttcgaagcttttagagagttttgtgaccaaattggcacgaagatccattttgcgtcagttcggcatccagaatcaaatggactagtcgaaagagccaatgggatcataatgacaggaataatgaagtcaatcttcaatcggcccaggggaaagtggccagaagaattaatcaaagtggtgtggagccataacacaacagcgtcaagatcaacaggctttacgccatttaaactattgttcggcgacgaagcaataacaccggaagaagccaaagcaggatctataagaacaatagcttcggcagaaggcgaagatgaagctgattgctctatggaaaaggatgctatagaggggatcaggcttcaggctgtggaaaacatcaataaataccaagccgaaacagtaaaatggcgtgacagaaaggttcggttgaagaacatcaagccaggacatttggtgcttcggagagtggccaacccagatacagtaggcaagctgcagctaaaatgggaaggcccttccttggtagtatcttcgtcaagacccggttcctacagattaaaggatatgtacggcaacgacatccctagatcgtggaacgcggatgagcttcggcgatattatgtttag

SEQ ID NO: 88075 - DNA, 894 bp, Zea mays
  Clone ID: MRT4577_180324C.1
atgggcatcagaagggccattcttaaaactgattcccaagttatttctggtcatgttgacaagagctataaagcaagagatttgaagcttgaaaaatatctagatacagtccgaagaattgagacttcctttgaaggattctctgttaaaaatattcctcgtggagaaaatgaatatgctgatctattggccaagtcagcagcaccggggctgcctttaccttcggaagtatttttcgaaacaataaaagcaccttcggtcgagcttcttgaaagagcggtcctcaatatatcccctgtctatagtgaagattggagaactgaaatcatctctttccttcagggtaattttctttcagacgacgaagcttacaacaagaggatagaagcaagagctcgaccatatgtcataatagaaggggagctatacaagcgtggggtctgttccccgttgctcaagtatttatccagatccgaaggctttacaccattcaaactattgtttggggatgaagcaataaccccagaagaggccaaagcaggatcgataagaacggtagcttcggcagaaggtgaagacgaagttgattgctctgtggaaaaagatgctatagaagggatcagacttcaagctgtggaaaatatcaataaatatcaagccgaaacaataaaatggcgtgacaggaaggttaagctcaagaacattgaaccaggacatctggtgcttcgaagagtagccaaccctgaaacagtaggcaaattacagctgaagtgggaaggaccctttttggtagtatcttcgtcaagacccggttcctatagattgaaggatatggacgacaacgacattcctagatcatggaatgtggatgagcttcggcgatattatgtttag

SEQ ID NO: 88076 - DNA, 4107 bp, Zea mays
  unsure (1)..(4107): unsure at all n locations
  Clone ID: MRT4577_180325C.1
atggcttcgttcaacaaccaagctggagctgcttcggctccgaagctggtactcccaataacaggcggttcatgctcagagctagccaacaagaagcagaagaaggaggcacagagaagggaggaccttcagctcaaggattaccctcataatgatgctatggttatttcttgtgttaccaaaggatttctggtccacaatgttctggttgatacaggcagtgcagcggatatcatatttgctaaggccttcagacagatgcaagagccagaggataagattcatgatgctacacaccctctttgtggcttcggagaaaggcagattgtagcactcggcaagatcacgatgccagtgaccttcggatttgtcaacaatacaaggactgaacaagttgtgtttgatattgtcgacatgaaatacccttacaatgcaatcattggtcgagggacactcaatgcttttgaagcaattcttcatccagcatatctttgcatgaagataccttcggatcaagggcctattgctattcatggaagtcaggaagctgccagaaaggccgaaggaaactggacagattcaaaagcaatccataatatagatggagtcgaggcttgtgagcaatacaagtacagaagggagaaggctgcttcggctgatcagccgaagcccatgctcttatgtgaagatatagcagaacagaaggtgctactgggatctcaattgtctgaggagcaggagaaaaccctaataaggtttttgttcaacaacaaggatgtctttgcatggtcagccaatgatctctgtggagttaatagggatgttattgagcactcgctcaatgttgatccatccttcagacccagaaagcagaggcttcgngaaaatgtcagatgataaggccgaaggtgctcgtaacgaagtcaaaagactcctcagtgcaggagttatcagagaagtaaagtacccagaatggctagctaacactgttatggtaaaaaaggtcaatggcaagtggcgaatgtgtatcgactttacagatcttaacaaggcttgtccgaaggatgaattcccattgccaaggatagactctttagttgatgcagcagcctcttcagagctcatgagtctgttagactgttattcaggctaccaccaaatctggatgaagaaggaagatgagccgaagactagcttatggaatacccttacaatgcaatcattggtcgtggtactcttaatgccttcgaagcaattctgcatccagcttatctttgcatgaagataccttcagaccaaggccccattgctattcatggaagtcaagaagctgccagaagggccgaaggaaattggacagactcaaaagcaatccataatatagatggaattgaagcttgtgagcaatacaagttcagaagggaaaaagctgcttcggctgatcagccgaaacccatgctcttatgtgaggatatagcagagcagaaggtgctattgggatctcaattgtccgaagagcaggagaaaaccttgataaggtttttgttcaataataaagatgtttttgcttggtcagctaatgatctttgtggagttaacagggatgttattgagcactcgctcaatgttgatccatccttcagacctaggaagcagaggcttcggaagatgtctgatgacaaggccgaaggtgctcggaatgaagtgaaaagactcctcagtgccggagttattagagaggtaaaatacccagaatggttggctaacactgttatggtgaagaaggccaatggtaaatggagaatgtgtatcgattttactgacctcaataaggcctgtccgaaggacgagtttccactaccaaggatagactctttagttgatgcagcagcttcatcagagcttatgagtttgctggattgttattcaggctatcatcaaatttggatgaagaaagaggatgaaccgaaaaccagcttcataacccctagtgggacatattgttaccttcggatgcccgaggggcttaaaaatgctggaggaagcttcagcagaatgacagcgagagttctccattctcagataggcaggaatgtactaacttatgttgatgatatcattgtaaaaagcacgaagcaagataaccacattgctgatttacaggagaccttcgctaattttagacaggctggtctaaagctgaatccagaaaaatgtgtcttcggagtaaagaaggggaaatttcttggttgcctagtttcaacaaagggaattgaggccaacccaagtaaaatcgaagctatacttcgaatggagccaccaagtacaaaaaagggggctcaaagattgacaggaaggctggcatctctcaatagattcatatccagatcagcagagagaaacttaccattcttcgaagtgctgaagtcagccgaagtctttcaatggggaccaatccagcagaaagccttcgaagagctaaagcagtatttgatagatctaacaacattaactccacctacgccaggggctcctttgttattatatgtggcagctttgcacttagcggtaagtgcagcacttgttcaggagaagcttgaaggccaagttaagaggcaggccccaatatattttgaatccgaggttcttagtttatcaaagaaaaattatacagaattggagaaggtactatatgctgttttgatggcctccaggaagcttcggcactattttcaagcttacaacataattgttccttcttcacaacctctgaaggatattatgagaaaccgagaagctactggaaggattggaaaatgggctgcagagctcaatgaattttgtatcgattatgttcatagatcttcgattcaatcccaggcgttagcagacttcattgctgactggacgccaggggctcaggaggaagaaacaaataaagatgccgaaggatggacagtgttttgcgatgggtcttggggaaccttcggagcaggagcggctgctgtgttggtttcaccttccaaagttaaaacttgttatgcggcaaaacttgattttagttgtacaaataatatcgctgagtatgaagctttgctcttgggtcttcgaaaattaaaggcaatgggaatcagaagggtcattcttaaaactgattctcaagttatctctggtcatattgacaagagttacaaagcaagagacccgaagcttgaaaaatatctagatacagttcgaaggattgaggcttccttcgaaggtttctctgtcaaaaatattcctcgtggagaaaacgaatacgctgatctattggctaagtcagcagcccaggggctgcccataccttcggaagtattttttgaaacaataaaagcaccttcggtcgagcttcttgaaagagcaatccttaatatatcccctgttcacagcgaagattggagaactgagatcgtctctttccttcagggtaattttctttcagatgacgaagcttataataggagaatagaagcaagagctcgaccatatgtcataatagaaggggagttatacaagcatggggtctgttccccattgctcaagtgtttatccagatccgaagtgccgaaggctattattgtggataatgggacacagtttgattctgaggccttcagagaattttgtgatcaaattggcacgaagattcattttgcatcagttcgacacccagagtcaaatggacttgtcgaaagagccaatggaatcataatgacaggaataatgaagtcaatcttcaatcagcccaggggaaagtggccagatgagttaatcaaagtggtgtggagccataatacaactatctcaaggtcaacaggctttatgccctttaaactattgttcggtgacgaagcaataactccagaagaagccaaagcaggatcaataaggacagtagcttcggcagaaggcgaagacgaagctgattcctctgtagaaaaagatgctattgaagggatcagacttcaagctgtggaaaacatcaataaatatcaagctgaaacaataaaatggcgtgacagaaaggtcaagctgaagaacattgaaccaggacacttggtgctttga

SEQ ID NO: 88077 - DNA, 1254 bp, Zea mays
  Clone ID: MRT4577_180326C.1
atgggtcttggggaaccttcagagcgggagcggctgctgtgttggtttcaccttccaaagttaaaacttgctatgcggcaaaactcgattttagttgcacaaataacattgccgagtacgaagccctgctttctgggtcttcggaagctaaaagcaatgggaatcagaagggccatacttaaaactgattcccaggtagtttcgggtcatattgacaagagttgcaaggctaaggatccgaagcttgaaaagtatctggatatggttcgaagagttgaagcttccttcgaaggattttctgtcaaaaatatccctcgaggacaaaatgagcatgctgatttgctagccaagtcagcatcacaggggctgcccttaccttcggatgtgttcttcgaaacaataaaagcaccttcggtggaacttcttgaaagagcagtcctcaatatatctcctgtttatagcgaagattggagaactgagatcatctcttaccttcagggtaaattcctttcagatgacgaaacttataacaggaggatagaggcaagagctcgtccatatgtcatgatagaaggggagttgtacaagcatggagtttgtgctccgctactcaagtgtttatctagaaccgaaggcatagagttgatgaaagaaatacatgcaggcctgtgtggatctcacattggatctaggccgttacttggaaaagttttccgtcaggggttttactggccgaaggcagcttcggatgcggcggaattagttcaaaagggaaagtggccagatcagttaaccaaagtggtgtggagccacaatacaacaacatcaaggtctacaggctttactccattcaagttattatttggtgacgaagcaataactccggaggaagctaaaaccggatcaataagagtagtagcttcggcagactcaggttccgaagctgcttattctgtggaaaaagatgctttagaagggatcaggctgcaggccgtggagaacatcaataaatatcaagccgaaacaatcaaatggcgagatagaaaggttcggctaaagaatattgagccaggacacttggtgcttcggagaatggccaacccggaaacagtgggcaagttgcagttgaaatgggatggacccttcttagtagcatcttcgtcaagacccggctcatacagattgaaggatatggacggcaacgacattcctacatcttggaatgcggatgagcttcggcggtattatgtgtaa

SEQ ID NO: 88078 - DNA, 585 bp, Zea mays
  Clone ID: MRT4577_180327C.1
aagcatcgttcatcctagccaggctcctaacttacttgtaccttacttagacaaggaagcaacggcagcagcaagaatagttgaggagaaggagaggaggagctgataaggcatggcgtccatgatgggaggagacttcgtggaggcctacgtgctcaggaacgcctacaaggagaagctgaggcgcatggaccaagccgaagctgcggcggcgcaaagagcaccaaggacgccgccggtgccgctggagagaagaagaaggctgctgctggcggcggtggtggtgcgagcagcaggggaggcttctttggcctcgtgaagaagaaggtgcaccccaaacccaaagcagcagccgcggccacttcctcttgattatactactgtattcgccatgccaccaagttgtaagccgcagctttcttctagctaggagcgtatgtgtgtgtatgtttgttctttcgattagcttctctgaggccaaagaaactttgtgttggaggagtgtgtaagtcactggctgtaatgtttgcaagttgttttgttcattggttcaaataaagttgacaaaaaaatgaatcacaatcc

SEQ ID NO: 88079 - DNA, 1221 bp, Zea mays
  Clone ID: MRT4577_180328C.1
atgaacgtatgctatcatcaaatttggatgaagaaggaggatgagccaaaaactagcttcataacccctagtggaacatattgttaccttcggatgtctgaggggctcaagaatgctggaggaagcttcagcagaatgacagcgaaggttcttcattctcagataggcagaaatgtgctaacttattttgatgatatcattgtaaaaagcacgaagcaagaaaatcacattgctgatctgcaggagaccttcgctaattttagacaggccagtttaaagttgaatccagaaaaatgtgtcttcggagtgaagaaagggaaatttcttggctgcctagtttcaacaaaagggattgaggctaatcctaataaaatcgaagctatccttcgaatagaaccaccaagtacaaagaagggggctcaaagattgacaggaagactgacatctctcaacagattcatatctagatcagcagagagaaatttactattcttcgaagtgctgaagtcagctgaagtttttcaatggggaccagtccagcagagagccttcaaagagctgaagcaatatttgatagacctaacaacactaactccaccaacgccaggggctcctctgttgttatatgtggcagcttcgcactcagcggtaagtgcagcacttgtccaagagaagcttgaaggccaagtcaaaaagcaagccccaatatactttgtatccgaagttcttagtttatcaaagaaaaattacacagaattggagaaggtgctgtatgctgttttgatggcctccaggaagcttcgacactattttcaagcatacaatataattgtcccttcttcacaaccattgaaggatattatgagaaatagagaagctactggaagggttggaaaatgggctgcggaactcaatgaattttgcattgattatgtgcatagatcttcgattcagtcccaagcgttggcagacttcattgctgactggactccaggggctcaggaagaagaaacgagtaaagatgccgaagtttggacagtattttgcgatggttcttggggaaccttcggagtaggagcagctgctgtgttggtcgcaccttccaaagttaaaacttgttatgcaacaaataacattgctgagtacgaagctttgctcttgggtcttcggaaattaaaggcaatgggaattagaagggcggttcttaaaactgattcccag

SEQ ID NO: 88080 - DNA, 876 bp, Zea mays
  Clone ID: MRT4577_180329C.1
ggattcctgaaaggtatattttaaaccgttggacaaaatatgccagaaaaggaacatatccatttccagttgatgaatttgcagaacaagatcgcacagaagttgcatttgtgtaccgtaatagggctatgtggtttgtttatgatctgctgactaagagcaaaagtcatcataatacaagaaaactaattctggatgcacttgaaaatggagaaaaatcactggaaagtatgtgtgacctcaaaagattgcatatgaataccttggggaaagagaaagatggaagcagggttgaaaagagaaagaaaaaatcaactaagcaagagaaacattcaagaaatgttaaacaagcggttttgccccagacagctgacccggtttttgttgatccaccaaatcaagatcaatattttgctgcagaagatattgcatcaaaccaatctgttggtagacctttcttctaccagggatatcccatgactgttgtttcaacaagccagattcaggggcatactaatatgcattctgagcctcagtgtgcatctcaggaatattctgcttatggcacagttcagccgccatcacaatttggtggtggaagaaatttctgaaaggtgtagtgtcattgacatgtgaatatctgaagctcatatcagttctactgattgttgtatgtgaatgacttgttcatttaggcagtagacacccaacctagcaacagaagaaacaggttgctctcttccattttgtgaatgtactgattgtaaatctgttgtccacttaactgtatggaatatggaagcatcatgttgtaggaaactaaataagaatttgtttttgaagtctgtaccatttatatggggggggggggaaaag

SEQ ID NO: 88081 - DNA, 203 bp, Zea mays
  Clone ID: MRT4577_18032C.1
acatgttacgatttttgccggggagcaatataggtattccaccgggtactttcacgtttatgttcgaacctagtgatccataaagatatgcgatcacgatgttcatcaactgcagaaatagacctttttatactgccaatgaaattaaatatccgaaggttattccattcaaaacaggagaatttgtctcattggggtcaact

SEQ ID NO: 88082 - DNA, 214 bp, Zea mays
  Clone ID: MRT4577_180330C.1
tttaacctagctagcctgcacgcactgacactgaccacgaccagcgctcagccttctgctccggaagctagctcaccggccagccaccccaccccgtccacccgacaatggcggccgccgtggccctcctcctgctctccgccctcggcggagcggcggcgcaggtgttccctccgtggaacggcacgttcccgatgggtcccgggttctttgg

SEQ ID NO: 88083 - DNA, 3309 bp, Zea mays
  Clone ID: MRT4577_180331C.1
atggcttcgttcaatattcaagctggagctgcttcggttccgaagctggtactcccgataacgggcggttcatgttcagaaccagccaacaagaaacagaagaaggaagcacagagaagggtacaacatgtcggggtgcaaggacccttcgtcaagtcaagatggtttcacattcctattaccttttcccaagaggaccttcaactcaaggattacccacacaatgatgctatggttatctcttgtgttatcaaaggatttctggtccacaatgttttggttgatacaggcagtgcagctgatatcatatttgctaaggcctttagacagatgcaaaagcccgaagataaaattcttgatgccacacatcccctctgcggcttcggaggaaggcagattgtagcacttggcaaaatctcaatgtcagtggccttcggattcatcaacaacacaaggactgagcaaataccttcggaccaagggcccattgctattcatggaagtcaagaagctgccagaaaggccgaaggaaattggacagactcaaaagcaatccataatatagatggaactaaagcttgtgagcagtacaagttcagaagggaaaaagctgcttcggctgaccagccaaaacccatgctcttgtgtgaggatatagcagagcagaaggtgctattggtatctcaattgtccgaagagcaggagaaaaccttgataaggtttttgttcaacaataaagatgtttttgcttggtcagctaatgatctttgcggagttaacagggatgttattgagcactcgctcaatgttgatccatccttcagacccaggaagcagaggctttggaagatgtctgatgataaggccgaaggtgctcggaatgaagtgaaacgactcctcagtgccggagttattagagaggtaaaatacccagagtggttggctaacactgttatggtgaagaaggccaatgggcttaagaatgctggaggaagcttcagcagaatgacagcaaaggttctccattctcagataggcaggaatgtactaacttatgttgatgatatcattgtaaagagcacgaagcaggataaccacattgctgatttacaagagacctttgctaattttagacaggctggtctaaagttgaatccagaaaaatgtgtcttcggagtaaagaaggggaaatttcttggttgcttagtttcaacaaagggaattgaggccaacccaagtaaaatcgaagctatacttcgaatggagccaccaagtacaaaaaagggggctcaaagattgataggaaggctggcatctctcaatagattcatatccagatcagcagaaagaaacttaccattcttcgaagtgctgaagtcagccgaagtctttcaatggggaccaatccagcagaatgcctttgaagagctgaaacagtatttgatagatctgacaacactaactccacctacgccaggggctcctttgttattatatgtggcagcttcacactcagcgtcccagtcgttagcagacttcattgctgactggacgccaggggctcaggaggaagaaacaaataaagacgccgaagcatggacagtgttttgcgatgggtcttggggaaccttcggagcgggagcggctgctgtgttggtttcaccttccaaagttaaaacttgttatgcggcaaaacttgattttagttgcacaaataacatcgccgagtatgaagctctgcttttgggtcttcggaaattaaaggcaatgggaatcagaagggccatccttaaaactgattcccaagttatttctggtcatattgacaaaagttacaaagcaagagacccgaagcttgaaaagtatctagatacagtccgaaggattgaggcttccttcgaaggtttctctgtcaaaaatattcctcgtggagaaaatgaatacgctgatctattggctaagtcagtagcccaggggctgcctgtaccttcggaagtattttttgaaacaataaaagcaccttcggtcgagcttcttgaaagagcaatccttaacatatcccatgtttatagtgaagattggagaactgagataatctctttccttcagggtaattttctttcagatgacgaagcttataacaggagaatagaagcaagagctcgaccatatgttataatagaaggggagttatacaagcgcggggtctgttccccattgctcaagtgcttatccagatccgaaggtatagaattaatgaaggacatacatgcaggtctgtgtggatctcacattggatctaggcctttgcttggaaaggtttttcgcctagtattttattggccaaaggcagcttcggacgcagcggatttagtccaaaagtgcgaaggttgtcagaaatgtgcaagagatcaaaaacaaccttcgtctttaactcagttaatacaacccacttggccgttgcaaaggtggggtctggatttgctaggtccattaccaccagcacaggggaacttaagatacgtggtggtagcagtggaatatttttccaaatggattgaggcgaagcccttagccacaataacttcgtttactattcaaaagtttttctggcaaaacattgtttgtcgcttcggagtgccgaaggctatcactgtggataatgggacacagtttgattctgaagccttcagagaattttgtaatcaaatcggcacgaagatccattttgcatcagtccgacacctagaatcaaatggacttgttgaaagagccaatgggatcataatgacaggaataatgaagtcaatcttcaatcagccgaggggaaagtggccagacgagttaatcaaagtggtgtggagtcataacacaaccatctcaagatcaacaggctttacacccttcaaactgttgtttggtgacgaagcaataaccccagaagaggctaaaacaggatcaataaggacagtagcttcggcagagggcgaacacgaagctgattgctccgtagaaaaagatgctattgaagggatcagactccaagctgtggaaaacatcaataaatatcaagctgaaacaataaaatggcgtgatagaaaggtcaagttgaagaacattgaaccaggacacctggtacttcgaagagtagctaaccctgaaacagtaggcaaattacagctgaagtgggaaggcccctttttggtagtatcttcgtcaagacctggttcctacaggttgaaggacttggacggcaatgacattcctagatcgtggaatgcggatgagcttcggagatattatgtttag

SEQ ID NO: 88084 - DNA, 3285 bp, Zea mays
  Clone ID: MRT4577_180332C.1
atggcttcgttcaacattcaaactggagctgcttcggctccgaagctggtactcccgataacaggcggttcatgctcagagccagccaacaagaagcagaagaaggaggcacagagaagggtacaacacgtcggggtgcagggacccttcatcaagtcaagatggtctcacattcctattaccttctcccaagaggatcttcaactcaaggattacccacaaaatgatgcaatggttatctcttgtgttatcaaaggatttctggtccacaatgttttggttgatacaggaagtgcagctgatatcatatttgctaaggccttcagacagatgcaagagcccgaagataaaattcttgatgccacacatcccctttgcggcttcggaggaaggcagattgtagcactcggcaaaatctcaatgccaataaccttcggatttatcaacaacacaaggactgaacaagttgtgtttgatattgttgacatggaatacccttacaatgcaatcattggtcgtggtactctcaaagccttcgaagcaattcttcatccagcttatctttgcatgaagataccttcggaccaagggcccattgctattcatggaagtcaggaagctgccagaagggccgaaggaaattggacagactcgaaagcaatccataacatagatggagctgaagcatctaatgatctttgcggagtaaacagggatgtcattgagcactcgctcaatgttgatccatccttcagaccaagaaagcaaaggcttcggaagatgtctgacgacaaggccgaaggggctcgcaacgaagtgaaaagacttctcagtgctggagttatcagagaggtaaaatatccagaatggctggctaacactgttatggtaaagaaggccaacggtaaatggagaatgtgtatcgattttactgatctcaacaaggcctgtccgaaggacgagtttccattgccaaggatagattccttagtcgatgcagcagcttcatcagagcttatgagtctgctggattgctattcaggctatcatcaaatctggatgaagaaggaggatgaaccaaaaaccagcttcataacccccagtggaacatattgttacctccggatgcctgagggacttaagaatgtcggaggaagttttagcagaatgacagcgaaggtcctccattctcagataggcaggaatgtgctaacttatgttgatgatatcattgtaaaaagcacgaagcaagataatcacattgctgatttacaggagaccttcgctaattttagacaggctggtttaaagctgaatctagaaaaatgtgtcttcggagtaaagaaggggaaatttcttggttgcctagtttcgacaaagggaattgaggctaatccaagcaaaatcgaagctatacttcgaatggaaccaccaagtacaaaaaagggggctcaaagattgacaggaaggctggcatctctcaacagattcatatccagatcagcagagagaaacttaccattcttcgaagtgttgaagtcagccgaagtctttcaatggggaccaatccagcagaaagccttcgaagagctgaagcaatatttgatagatctaacaacattaagtccaccaacgccaggggctcctttgttattatatgtggcagcttcgcactcagcggtaagtgcagcacttgtccaggagaagcttgaaggccaagtcaagaaacaggctccaatatatttcgtatccgaagttcttagtttatcaaagaaaaattatacagaattggagaaagtactgtatgctgttttgatggcctccaggaagcttcggcattattttcaagcttataacataattgttccttcttcacaacctttgaaggatattatgagaaatcgagaagctactggaaggattggaaaatgggctgcagagctcaatgaattttgtattgattatgttcatagatcttcgattcagtctcaagcgttggtagacttcattgctgactggacgccaggggctcaggaggaagaaacgaataaagatgccgaaacatggacagtgttttgcgatgggtcttggggaaccttcggagcaggagcagctgctgtgttggtttcaccttctaaagttaaaacctgttatgcggcaagactcaatttcagttgcacaaataatattgttgagtacgaagctttgcttttgggtcttcggaagttaaaggcaatgggaatcagaagggccattcttaaaactgattcccaagttatttctggttatgttgacaagagctataaagcaagagacccgaagcttgaaaaatatctagatacagtccgaaggattgaggcttccttcgaaggtttctctgtcaaaaatattcctcgtggagaaaatgaatatgctggtctattggccaagtcagcagcccaggggctgcctataccttcggaagtatttttcgaaacaataaaagcaccttcggtcgagcttcttgaaagagcaatccttaatatatcccctgtttatagcgaagattggagaactgagatcatctctttccttcagggtaattttctttcagacgacgaagcttataacaggagaatagaagcaagagctcgaccatatgtcataatagaaggggagttatacaagcgtggggtctgttccccattgctcaagtgtttatccagatccgaagtccgacacccagagtcaaatggacttgtcgaaagagctaatgggatcataatgacaggaataatgaagtcaatcttcaatcagcccaggggaaagtggccagacgagttaatcaaagtggtgtggagccataacacaaccatgtcaaggtcaacaggctttacgccctttaaactattgttcggtgacgaagcaataaccccggaagaggccaaagcaggatcaataaggacagtagcatcggcagaaggcgaagacaaagttgattgctctgtagaaaaagatgctattgaagggttcagacttcaagccgtggaaaacattaataagtatcaagccgaaacaataaaatggcgtgacagaaaagttaagctgaaaaacattgaaccaggacatttggtgcttcaaagagtagccaaccctgagacagtaggcaaattacagctgaagtgggaaggcccttttttggtagtatcttcgtcaagacccggttcctacagattgaaggatatggacggcaacgacattccaagatcatggaatgcagatgagcttcggcgatattatgtttag

SEQ ID NO: 88085 - DNA, 271 bp, Zea mays
  Clone ID: MRT4577_180333C.1
agataaccacgtccacttatatataatgtacaaacaccatggaacaaagcacccaacaaagctgccggagcctggggatttatgagcagactaaagagcgccgacatggtggaggagcccaacaaatagatacctaggagttccttggcctgcccgcgcaagtaggacaagcgccaacgagggaacgcaagctaacttagctacttgatgcttagcggggtggagaaggaaccaataattatccccagggtgcagctcccggtcccagtcc

SEQ ID NO: 88086 - DNA, 322 bp, Zea mays
  unsure (1)..(322): unsure at all n locations
  Clone ID: MRT4577_180334C.1
cagattcaataaagtttgaaacccacaactccnanggggggaggttctactatatttgtcagaccaacnccacactctacaccacatttactatccaaagatacccaaccatatggctccaaacagcacacctgatatcaaatcaattccaaaaagactatatcaaattccaagataaaaccccaaagtatcacatttcatagcaaccacccaaaaaacatatactaataccaccatacacaatacaatatcaatcaccttacagatcaaacagaccgcttcctatcttgtacaaactatcaaaaaatttaaatcacatata

SEQ ID NO: 88087 - DNA, 3390 bp, Zea mays
  Clone ID: MRT4577_180335C.1
atggcttcgttcaacgatcaagctggagctgcttcggctccgaagctggtactcccgataacaggcggttcatgctcagagccagccaacaagaagcagaagaaggaagcacagagaagggtacaacacattggggtgcaaggacccttcatcaagtcaagatggtctcacattccaattaccttctctcaagaggatctccaactcaaggattacccacacaatgatgccatggttatctcttgtgtgatcaaaggattcctggtccataatgttttggttgatacaggcagcgcagctgatatcatatttgctaaggccttcagacagatgcaagagcctgaggataaaattcatgatgccacacatcccctttgtggcttcggaggaaggcagatcgtagcacttggtaaaatcacaatgccaataaccttcggattcatcaacaacacaaggactgaacaagttgtatttgatattgttgatatggaatacccttacaatgcaatcattggtcgtgatggagctgaagcttgtgagcaatacaagttcagaagggaaaaagctgcttcggctgatcagccgaagcccatgctcttatgtcaggacatagcagagcagaaggtgctattgggatctcaactatccgaagagcaggagaaaaccttgataaggtttttgttcaacaacaaagatgtttttgcttggtcagctaatgatctttgcagagtaaacagggatgttattgagcactcgctcaatgttgatccatccttcagaccaagaaagcaaaggcttcggaagatgtctgatgacaaagccgaaggtgctcgcaacgaagtgaaaagactcttcagtgctggagttatcagagaggtaaaatatccagaatggttggctaacactgttatggtaaagaaggccaatggtaaatggagaatgtgcatcgattttactgatctcaataaggcctgtccaaaggacgaatttccattgccaaggatagattccttagtcgatacagcagcttcatcagagcttatgagtctgctggattgctattcaggctatcaccaaatctggatgaagaaggaggatgaaccgaaaaccagcttcataacccccagtggaacatattgttaccttcggatgcctgaggggctcaagaatgccggaggaagtttcagcagaatgacagcgaaggtcctccattctcagataggcaggaatgtgctaacttatgttgatgatatcattgtaaaaagcacgaagcaagataaccacattgctgatctgcaggagaccttcgctaattttagacaggctggcttaaagctgaatccagaaaaatgtgtcttcggagtaaagaaggggaaatttcttggttgcttagtttcaacaaagggaattgaggctaatccaagcaaaatcgaagctatacttcgaatggaaccaccaagtacaaagaagggggcccaaagattgacagaaaggctggcatttctcaacagattcatatctagatcagcagagagaaatttaccatttttcgtagtgctgaagtcagccgaagtttttcaatggggaccagttcagcagagagccttcgaagagctgaagcaatatttgatagatctaacaacattaactccgccaacgccaggggctcctttgttattatatgtggcagcttcgcactcagcgggaaccttcggagcaggagcggctgctgtgttggtttcaccttccaaagttaaaacttgttatgcggcaagacttgattttagttgcacaaataatatcgctgagtacgaagctctgttcttgggtcttcgaaagttaaagacaatgggaatcagaagggccattcttaaaactgactcccaagttatttctggtcatatcgacaagagctataaagcaagagacccgaagcttgaaaaatatttagatacagtccgaaggattgaggcttccttcgaaggattctctgtcaaaaatattcctcgtggagaaaatgaatacgctgatctattggccaagtcagcagcacaggggctgcctttaccttcggaagtatttttcgaaacaataaaagcaccttcggtcgagcttcttgaaagagcggttcttaacatatcccctgtctatagtgaagattggagaactgaaatcatctctttccttcagggtaattttctttcagatgacaaagcttataacaggaggatagaagcaagagctcgaccatatgtcataatagaaggggaactatacaagcgaggggtctgttccccgttgctcaagtgtttatccagatccgaaggcatagaattgatgaaggaaatacacgcaggtctgtgtggatctcacattagatctaggcctttgcttgggaaagtttttcgtcaacgattttattggccaaaggcagcttcggatgcagcggatttagtccaaaagtgcgaaggttgtcagaaatgtgcaagagatcaaaaacaaccttcgtctttaactcaattaatacaacctacttggttgttgcaaaggtggggccttgatttgctaggcccattaccaccagcacaggggaacttaagatatgtggtagtggcagtggaatatttttccaagtggattgaggcaaagcccttagccacaataacttcatttactattcaaaagtttttctggcaaaacattgtttgtcgcttcggagtgccgaaggccattactgtggacaatgggacacagtttgattccgaagccttcagagaattttgtgatcaaattggcacgaaaatccatttagcatcagtccgacatccagagtcaaatggacttgtcgaaagagctaatgggatcataatgacgggaataatgaagtcaatcttcaatcagcccaggggaaagtggccagacgagttaatcaaagtggtgtggagccataacacaaccatgtcaagatcaacaggttttacgcccttcaaactattgtttggtgacgaagcaataaccccggaggaggccaaagcaggatcaataagaacagtagcttcgacagaaggcgaagacgaagctgattgctctgtagaaaaggatgctatagaagggatcagacttcaagctgtggaaaacatcaataaatatcaagctgaaacaataaaatggcgtgacagaaaggtcaagctgaagaacattgaaccaggacacttggtacttcgaagagtagccaaccctgagacagtaggcaaattacagctgaagtggaaaggcccctttttggtagtatcttcgtcaagacctggttcctacagattgaaggatatggacggcaacgacattcctagatcatggaatgcggatgagcttcggcgatattatgtttag

SEQ ID NO: 88088 - DNA, 240 bp, Zea mays
  Clone ID: MRT4577_180336C.1
ccccccgcgcgcccgttcttcttttttcccgggcggcctgccctctcggttcatttgtgcaccccccgtgctgtggcgggccgcctgttcttctttcgccttggcctcctccgccgggacaccttggccccggggggccctggtcccccctgttgtccggccgcgaggctctcagggcctgcccgctcctccggcgcggctgcctggttcctggtgaccttgcgcgccgggtcgccggtg

SEQ ID NO: 88089 - DNA, 2577 bp, Zea mays
  Clone ID: MRT4577_180337C.1
atggcttcgttcaatattcaagctggagctgcttcggttccgaagctggtactcccgataacaggcggtccatgttcagaaccagccaacaagaagcagaagaaggaagcacagagaagggtacagcatgtcggggtgcaaggacccttcatcaagtcaagatggtctcacattcctattaccttctcccaagaggatcttcaactcaaggattacccacacaatgatgctatggttatctcttgtgttatcaaaggatttctggtccacaatgttttggttgatacaggcagtgcagctgacatcatatttgctaaagccttcagacagatgcaagagcccgaagataaaattcttgatgccacacatcccctctgtggcttcggaggaaggcagattgtagcactcggcaaaatctcaatgtcagtggccttcggattcatcaacaacacaagaactgaacaaattatgtttgatatcgttgacatggagtacccttacaatgcaatcattggtcgtggtactcttaatgccttcgaagcaattctgcatccagcttatctttgcatgaagataccttcggaccaagggcccattgctattcatggaagtcaagaatctgccagaaggaccgaaggaaattggacagactcaaaagcaatccataatatagatggaactgaagcttgtgagcaatacaagttcagaagggaaaaagctgcttcggctgaccagccgaaacccatgctcttatgtgaggatatagcagagcagaaggccgaaggtgctcgaaatgaagtgaaaagactcctcagtgccggagttattagagaggtaaaatatccagaatggttggctaacactgttatggtgaagaaggccaatggctatcatcaaatatggatgaagaaggaagatgaacaaaaaaccagcttcataacccctagtgggacatattgctaccttcagatgcctgaggggcttaaaaatgctggaggaagtttcagcagaatgacagcaaaggttctccattctcagataggcaggaatgtactaacttatgttgatgatatcattgtaaaaagtacgaagcaggataaccacattgctgatttacaggagaccttcgccaattttagacaggctggtctaaagctgaatccagaaaaatgtgtcttcggagtaaagaaggggaaatttctcggttgcttagtttcaacaaagggaattgaggccaacccaaagagaaacttaccattcttcgaagtgctgaagacagctgaagtctttcaatggggaccactccagcagaaggccttcgaagaactgaagcagtatttgatagatctaacaacattaactccacctacgccaggggctcctttgttattatatgtggcagcttcgcactcagtggtaagtgcagcacttgttcaggagaagcttgaaggccaggttaagaggcaggccccaatatattttgtatccgaggttcttagtttatcaaagaaaaattatacagagttggagaaggtactgtatgctgtcttgatggcctccagaaagcttcggcactattttcaagcttacaacataattgttccttcttcacaacctctgaaggatattatgaggaaccgagaagctactggaaggattggaaaatgggctgtagagctcaatgaattttgtattgattatgttcatagatcttcgattcagtcccaggcattagcagacttcattgctgattggacgccaggggctcaggaggaagaaacaagtaaagacgccgaagcatggacagtgttttgcgatgggtcttggggaaccttcggagcaggagcggctgctgtgttggtttcaccttccaaagttaaaacttgttatgcggcaagacttgattttagttgcacaaataacatcgccgagtatgaagctctgcttttgggtcttcggaaattaaaggcaatgggaatcagaagggccattcttaaaactgattctcaagttatttctggtcatattgacaaaagttacaaagcaagagacccgaagcttgaaaggtatctagatacagtccgaaggattgaggcttccttcgaagatttctctgtcaaaaatattcctcgtggagaaaatgaatacgctgatctattggctaagtcagcagcccagggctgcctataccttcggaacaataacccagaagaggctaaaacaggatcgataaggacagtagcttcggcagagggcgaaaacgaagctgattgctctgtggaaaaagatgctattgaagggattagacttcaagctgtggaaaacatcaataaataccaagctgaaacaataaaatggcgtgatagaaaggtcaagctaaagaatattgaaccaggacacttggtacttcgaagagtagctaaccctgaaacagtaagcaaattacagctgaagtgggaaggcccctttttggtagtatcttcgtcaagacctagttcctacagattgaaggatatggacggcaatgacattcctagatcgtggaatgcggatgagcttcggcgatattatgtttag

SEQ ID NO: 88090 - DNA, 214 bp, Zea mays
  Clone ID: MRT4577_180338C.1
cccacgcgttcggagtgatgacaggccatttaagtacgcgtttatgatatgaaagctgggggatactatacgaatgaggagtacaattctatacagaaggtatctcaggtggcaaggtaggacaatgtggacacagttaattttttatatgatctactacttatattaagagaagcagtaaatcttattctaaaggttttcgatgatgtatttg

SEQ ID NO: 88091 - DNA, 257 bp, Zea mays
  Clone ID: MRT4577_180339C.1
gtctaaccagctgcatcacctgaactggtggaaactatgaatcaccggcatttgtaccttcatcttataataacagacatatctgtactaccaccgtaaataaaactgggaatatacagaaagttgaactaacatagttgacacaagacaggaccgatacctgaccatcatccaataatcacgaatttttgaggtagtaatcaagtcgtctcgtataatgcaatgagacccgacttgctgctatgatgttaacaaaa

SEQ ID NO: 88092 - DNA, 284 bp, Zea mays
  Clone ID: MRT4577_18033C.1
gcgtacgtatgctcggaattcggctcgaggagatggccgcccgttgtttctcctccacgggcggcttccacgtcaagacgtgtttcccacgtgcgcgcgttaccgtgtactggtccgccaccggaggcgacggcaacgtcagcagtagcagtgtgtcgatcgaatactacgtgaagacgttctcggccgcgctggctctgacgtgggtgcttctattctgggtcgacacctgccatccccccgtgggcgtatcaatagagagctagtcgacccggcaagtaaga

SEQ ID NO: 88093 - DNA, 751 bp, Zea mays
  unsure (1)..(751): unsure at all n locations
  Clone ID: MRT4577_180340C.1
gccggccgggctgggagtagtcgggtgttgagtaataaccactgaatgacgagggagggaggaacccggacgcccaaaaaatccccccacccccagcgcggcaatgccgtcatgtgcccgcatctcctccgccgtctccaccgccgccgcatcctcctcctcgccgccgccgcatcctcctcgctgcagccgccgcatcctcgccgccgccacggcgcgcgtgcgggaggggacgctccgccctgaggaggcacacgacctgctcgacgagttgcagcgtcgaggcacgcccgttctcgatcgagatctgaacggcttcctcgcggcgctcgcgcgtgcgccgtcctccgccgcctgcgggagtggccctgccctcgccgtcgcgctcttcaaccgcgcggcgtctcgggctcaaggaccgcgggtgctgtcccccacatcctacacctacgccatcctcatggactgctgcacccgcgcgcaccgcccagagctagcgctggccttcttcggccagctcctcaggacaggcttgcgcgtcgatgccatcatcgctagccaccttctcaagggcttttgtgaagcgaagcggacagacgaggctttggacatccttctccacagaacgcctgagttgggctgtgtgcccgagtttttctcgtacacatacttctgaagagcctctgcaacaaggaaagagtgggcaggcagatgatttgctacggatgatggctgaaagnngaactgtctg

SEQ ID NO: 88094 - DNA, 809 bp, Zea mays
  unsure (1)..(809): unsure at all n locations
  Clone ID: MRT4577_180341C.1
ccggccggggcgacgactgtgtggagtaccgcccccgcccccgccccctcaccccccgacgccgacgccctaggcggctacgccaggtcccgagggacgggcccttcatcttcgtcagtctattcgccgggcgacgagcacccgccagtttggttggagcttggagtttagagggaagatttggtgatgagcagccgcagcctgccgccgaaggatcgcaggatgcgtactgaacgcacctcataccgtgatgcaccatatcggagggacagccgccatggtccaagcaggtttcgtaatgatttgtgcaacaattgtaagcgtcctgggcattttgctagagagtgtcctagcgtggctgtctgccatacctgcgggcttcctgggcacattgcagccgaatgttcttccaaaggtgtttgctggaactgcaaagagcctggccacatggctaacagctgcccaaatgaagggatatgccgtaactgtggcaagtccggtcacattgcaagagactgcaccgctccaccagtgccgccaggagaagtgatcctttgcagcaactgctacaaaccagggcattttcgtgaggaatgcaccaatgagaaggcctgcaataattgccggcagagcggccaccttgcccgtaactgcaccaatgatcctgtttgcaacctgtgcaatgttgctggccatctggcccgtcagtgccccaagtctgatacattgggtgagagggggtgggcctccttccttncgtggtgttggcgctcccttccatgatgttggcgctcccttccgtggtggct

SEQ ID NO: 88095 - DNA, 364 bp, Zea mays
  Clone ID: MRT4577_180342C.1
ccgggctactattatcgaagggtctgcggctggcgatggttctaccctgaaattatgctccgtttgcttccgatctaagaggattgagccaacttaatattaaataccaacttggaacaccatacaaaccttttgatcaacttatgggcgatataccagctagaagtgcccatgcgctaccgctaccggctcgacaaccgatgaccgatccaaagtcagccagtgattggttgttatcgtacagattttggagcccatatgaatgggaagagatactcttgacaaggaattgcacaactaccgaaaattggtgaaaatcgtctgagggctgagatagaaaaaattgtgcgaactttaacgcctg

SEQ ID NO: 88096 - DNA, 769 bp, Zea mays
  Clone ID: MRT4577_180343C.1
gttcccctgcccccctcgttctctctctcgttgcgacgactgtgtggagtaccgcccccgccccctcaccccccgacgccgacgccctaggcggctacgccaggtcccgagggacgggcccttcatcttcgtcagtctattcgccgggcgacgagcacccgccaggcacattgcagccgaatgttcttccaaaggtgtttgctggaactgcaaagagcctggccacatggctaacagctgcccaaatgaagggatatgccgtaactgtggcaagtccggtcacattgcaagagactgcaccgctccaccagtgccgccaggagaagtgatcctttgttttttctgctacaaaccagggcattttcgtgaggaatgcaccaatgagaaggcctgcaataattgccggcagagcggccaccttgcccgtaactgcaccaatgatcctgtttgcaacctgtgcaatgttgctggccatctggcccgtcagtgccccaagtctgatacattgggtgagaggggtgggcctcctcccttccgtggtgttggcgctcccttccatgatgttggcgctcccttccgtggtggcttcagtgacgtggtctgccgggcctgcaaccagattggtcatacgagtcgtgattgcatggctggtgccttcatgatctgccacaactgtggcggccgtggccacatggcttatgagtgtccctctgccagtctcatggaccggttcaccccctcgcccgtttctgaaggaaggaccatccaa

SEQ ID NO: 88097 - DNA, 360 bp, Zea mays
  Clone ID: MRT4577_180344C.1
tataaaaaacagtccagcctgcctgagcctggatcgtgtgtctgaggaactcctgatctcctcctgccccctgctctgatcactcgcgatggtaatgcaactcctacacccatacgctcctagctcgctctggcgcggcttccctctcctcctgtgacctgcgcatctgaagcatagatggcaagcacggaccctgctcagtgctcacctcgccgggcgtgctgctgctacagcagacgcggagtactactactactacgacaagactctgcgcgcgcacaagcccagaagagggcacaatcgatccggcgcacgacgacgacgaccaccaacagcaacaggagagaggaggagatcgat

SEQ ID NO: 88098 - DNA, 1339 bp, Zea mays
  Clone ID: MRT4577_180345C.1
gttttaccccgtccggccccgtccccctcgttcttttcccccttctctctcgctgcgacgactgggtggagtaccgcccccgccccctcaccctcaccccccgacgccgacgccctaggcggctacgccaggtcccgagggacgggcccttcatcttcgtcagtctattcgccgggcgacgagcacccgccagaaagaagatcagcggtttgttggagtatcgaaggtggtgatttcgtagcgtggtgttgcagtttggttggagcttggagtttagagggaagatttggtgatgagcagccgcagcctgccgccgaaggatcgcaggatgcgtactgaacgcacctcataccgtgatgcaccatatcggagggacagccgccatggtccaagcaggtttcgtaatgatttgtgcaacaattgtaagcgtcctgggcattttgctagagagtgtcctagcgtggctgtctgccatacctgcgggcttcctgggcacattgcagccgaatgttcttccaaaggtgtttgctggaactgcaaagagcctggccacatggctaacagctgcccaaatgaagggatatgccgtaactgtggcaagtccggtcacattgcaagagactgcaccgctccaccagtgccgccaggagaagtgatcctttgcagcaactgctacaaaccagggcattttcgtgaggaatgcaccaatgagaaggcctgcaataattgccggcagagcggccaccttgcccgtaactgcaccaatgatcctgtttgcaacctgtgcaatgttgctggccatctggcccgtcagtgccccaagtctgatacattgggtgagaggggtgggcctcctcccttccgtggtgttggcgctcccttccatgatgttggcgctcccttccgtggtggcttcagtgacgtggtctgccgggcctgcaaccagattggccatacgagtcgtgattgcatggctggtgccttcatgatctgccacaactgtggcggccgtggccacatggcttatgagtgtccctctgccagtctcatggaccggttcccccctcgccgtttctgaaggaaggacatccaagggctgttcagatggctgttgttttcagcccattttgtcaggagcacctgttttgctttgctttatgtatttctaaacccgaatggattctagatatttcagattcataactcgtcagcgctatttgtaattctggatatgttacccgactccgatgttcttgatgataatgtttgaagacggggatacttgcccttacgaactcaaaaaaaaaaaaaaaaaaaaaaaaaaaaaaaaaaagcggcc

SEQ ID NO: 88099 - DNA, 765 bp, Zea mays
  unsure (1)..(765): unsure at all n locations
  Clone ID: MRT4577_180346C.1
cccgtccccctcgttctctctctcgttgcgacgactgtgtggagtaccgcccccgccccctcaggccctcaccccccgacgccgacgccctaggcggctacgccaggtcccgagggacgggcccttcatcttcgtcagtctattcgccgggcgacgagcacccgccaggtttcgtaatgatttgtgcaacaattgtaagcgtcctgggcattttgctagagagtgtcctagcgtggctgtctgccatacctgcgggcttcctgggcacattgcagccgaatgttcttccaaaggtgtttgctggaactgcaaagagcctggccacatggctaacagctgcccaaatgaagggatatgccgtaactgtggcaagtccggtcacattgcaagagactgcaccgctccaccagtgccgccaggagaagtgatcctttgcagcaactgctacaaaccagggcattttcgtgaggaatgcaccaatgagaaggcctgcaataattgccggcagagcggccaccttgcccgtaactgcaccaatgatcctgtttgcaacctgtgcaatgttgctggccatctggcccgtcagtgccccaagtctgatacattgnngtgagaggggtgggcctcctnccttccgtggtgttggcgctcccttccatgatgttggcgctcccttccgtggtggcttcagtgacgtggtctgtcgggcctgcaaccagattggtcatacgagtcgtgattgcatggctggtgncttcatgatct

SEQ ID NO: 88100 - DNA, 495 bp, Zea mays
  Clone ID: MRT4577_180347C.1
atattgatcaaaaacaaaatggaatggatccggcccccattaacagggcacatccaatgaccaacgacacacgccattgggctgaacacaaatacaccgatcacatgggggcgcccacgtcatttattgcagggaccatctgaaggactagcatcaccccatcaggggcaaccactacacaccctcttagccgaatacgccggcgcaaaaaatacccccctgtccactaggagcggggaccaaccaatggacagtaccctaggcgccgacacatttccggaacaccttgaaccagtcaatgtccctggacgaaaccacgggcacaaacccaatggttcctgcccacaaggacgcccacccggccgaacaggtcttgaacgggcccctcaccggttacaatggcctgaccaaacaagcacgccaatggcaaacatgttaaggcgctcccctcttgaacagcatcaccttccatctcagacccgaccttccgggtcg

SEQ ID NO: 88101 - DNA, 1032 bp, Zea mays
  unsure (1)..(1032): unsure at all n locations
  Clone ID: MRT4577_180348C.1
ccgccagcgccaggcgcaaacgcgcgcccctcccatgtccatggcgtcgcctgtcctccaccgcctgatcctactctcggtctcgctgtcggtggcaatcgccgctgccgatgccagcgctgtgcccgtcgagtacctctacccgaccctgaatctcacctacatacactccatcgacaccgacggagtcttcctccgctcccccagcgccaacttctccgccgccatctgtacccccgccggagccggccagtcctcagacgactcccagtcccgcttcttcttctccgtcctgcacactgcctcacggaccccagtctggaccgccaccgccaccggctcaaccatgttcaactccatcgtcctgtccgtcgcccccaccgggctcgctctctacgacccttccgccgccaagcccgacgacccggcctggtccacgccgcgcctccgcgaacccgtcgtagcgctgcgcctcctcgacaccggcgagctcgcgctcatcgatagccgaaacgccacgctctggtcctccttcgaccgccccaccgacacgctgctcccgggacagccgctcctcctcgggagcccgctcacgtcctccgcgtccgaccgcgacctctcccccggagcttaccgccttgtcctcacacccaacgacgcgctcctccagtgggccaccaacgcctccactgccttcctcacctactggtccatgtcctccgaccccgccgccttgcaagactccaaccaagccgtcgccgccatggccgtcaactcctccggcctctacctcttcgccgccaacggcagggacaccgtttacaggctcctcttcccttcgccgncggcgtcaaagtccgagtcgcgcatcctcaagctctacccttccggcagnctgcgtgcggtcgccctcaccgncgccgncaccgtctncaccatctgggccgcgccagccaacgactgcgaccttccgctgccgtgcccgtccctcagcctctgcacatcggacgccaacggatccacctgcacctg

SEQ ID NO: 88102 - DNA, 218 bp, Zea mays
  Clone ID: MRT4577_180349C.1
taaggatagaaccatgccaacacggaaagctgacacccacgaaggaggtgaactgggcaaggaaactccccaaaagagatcgagttgaggggggtaacctcactaaaaaattaggcgggccaagataagattctcacaaaggctaggtggatctttggtgctagggaattaccttcggacaatgccccacacacgggatggctgcggaaacagttccg

SEQ ID NO: 88103 - DNA, 556 bp, Zea mays
  unsure (1)..(556): unsure at all n locations
  Clone ID: MRT4577_18034C.1
gcaggaattcggcacgagacaatgcacaagcactctagcaatggcttctgaggttgtccgcacctttagcgacgccgagctacnntgcaggcatcaagccgacactactggcggcctcagacctcatccttacctcacagccccatgtcacctgaaggtgcgtttttttttgtcttggtcatacccctagnnggcgatnnctaccgcctcatgnngcgggagcttgtccctcaagccgcctgagtctgtatcacgagcgcctgtacttcttccttcctccgtcttaagnccttttaaaaaaaacccccccgaaccccggggggaccttttttttaccccccttttcaccggtaccccgaccaccctttgaccnttggaccggaggaccataccgcaataaaggacaccgcggaccggactacaggaggcgcccggcctgggcattactccaaacctccggggacttccggaaaccccaagggggccaatgtcgaaaaggcccatccgggggaatgcggggggccaatggggaaaggtctaaaacgcgcgtttatat

SEQ ID NO: 88104 - DNA, 663 bp, Zea mays
  unsure (1)..(663): unsure at all n locations
  Clone ID: MRT4577_180350C.1
tcgaagccggccgggattcattcttgttgtttgaaaagaggtgacaccctcctccctctggactctggttgtggagagtaatgtattttattattactgtaattggatagtaagtactacactgatatgctggtctaatcgatgttgttgttttatatggataataataatgattagtcagtcaatggtgaaaaaaaaaaaaaaaaaaaaaaaaaaaaaaaaaaaaaaaaaaaaaaaaaaaaaaaaaaaaaaaaaaaaaaaaaaaaaaaaaaaaaaaacccttaaaagcctcccccttcttgggcttcaaccctcttcgccgcttaattccttttaaggccaaaaacccgcccgttaaaaaaaaaccccccccccccatgccccccgggaagttcgaatgaactaaccccgccctattcttaaggaaaaagggtttccccttcaccgccaaaaaaatccccaccatcggaaaggggccaaaaataaaggcaaagcctaatgggccggggtttttcttaaacttcctgaaaaacccaacggttaagaaccaaaccctccccgtggaatcgggggggggcgttgctcaagttgttgttgcccccccaccttggtggggttgaanaatttgttgcccctgttgaaaagaaaaaaaagaaaaacccc

SEQ ID NO: 88105 - DNA, 354 bp, Zea mays
  Clone ID: MRT4577_180351C.1
agaggtgaaatgcgaaaatagaactttagagttgaaatcagagatgcacaagagactgagactgcacatgtaaaagttgctcacgcacgcatttcataccacttgacggtgatgactgtagtgtaggagtacaagaggctgcagatccgatctgttgtggccacacgggcatcgcaagcgtgtgctgggcgcacgcgatccgatgcgacgaaaggaaacgggtgggtgggtgtagcgggggtaggtagctgatgacctctttacatacccagatagacgatgactggtgggtccctttttcattacccccacctccgtggcgaggctcccccacctactaataccttttctttt

SEQ ID NO: 88106 - DNA, 943 bp, Zea mays
  Clone ID: MRT4577_180352C.1
cccacgcgtccgcccacgcgtccggctgatcctctcccagatcaaccaccgcaacgtggtcaagctgcttggctgttgcctcgaggtcgaggtgcccatgctggtctacgagtacgtcccgaacggcagcctccacgcgtacatccacggcgatggcgacggcggcggcggcggtggcgaggccaagctgaatctgccacccggcgcgcgcctccgcatcgcggccgagtccgcggacgcgctcgcgtacatgcactcgtcggcgtcgccgccgatcctccaccgcgacgtcaagtccgcaaacatcctcctcgacggcgacctcgcggccaaggtgtccgacttcggcgcgtcgaggctggccccggcgggcgaggaggcggtggccacgctggtccagggcaccctcgggtacctggacccggagtacctgctgacgagccagctcaccagcaagagcgaccaggggcgggcctggctcaattcaatgcttcgcggtggtcgtgctggagctcctcacggggaggaaggcgttcgtcccggtggaggacgaggaagaggaagaggagggcggcctcgcgttctgcttcgtcacggcggcgcaggcgggacggcaccgggagatcatggaccagcgggtcatcgaggaggtcggagcggaggtgctggacgaggcctcggagctgctgatgcggtgcctcagcattatcggcgatgagaggccaaccatgaaggaagtcgccgacaaactccaaaagctcagacgccacgcttgcagcagcagcagattgtaatttaacttttgtatttaaatattccacatataacgacagctatgcaaccagattttactaggtgcaaactaggctgctagaccatatatataatcatagtttgtctatgattttcttaataaagctgcaccgaccgagagtttaaatat

SEQ ID NO: 88107 - DNA, 261 bp, Zea mays
  Clone ID: MRT4577_180353C.1
gaaaagacccttaccgtatcacttaaggtttgccagtatccgcgataacatggaaccgaccgactatcaccaggcccaaaatttttaaccaccacaaaagaaccaccccaccacgcagaagggggattttgactcactttaccaaccgacaacgataacttttgggggcgagtgggccagccagcaactgctgcacgctctttactgacaacaaagccctccacacccaccaccctcggacctttaggccacgggaccgcc

SEQ ID NO: 88108 - DNA, 732 bp, Zea mays
  unsure (1)..(732): unsure at all n locations
  Clone ID: MRT4577_180354C.1
cgcgatccttgaccagctcgggnagttggtcgaggtcgacgtccctcgtgccttgtttcaagagcaaggccagcagctttatggagccaagcttctgcagcttcaggcggaaaggaagctggataaagaccagctagcttcgttatcaaccaagaggtcagtgcaggcgtacctagaagatgagaaggagaacattacaagaatcattaaacagatgctggccgtcggcgagattttcaaatccgagaacttacagtactcgactgatcagctcgtcaaggaagttgagaactccatagccgagttcaaacactacaaccaagactatgatgaggacagcatcaggcagcaggtccaggatgtcctagaggcggcgaaggtgcttgaatggctcaaggagaactgcacggtcgagtatatcaggcgatgagtcccacgatgctgggtcaaggaaggctgctcctctgagcagcgagaaagatggtggctggtgtggcggtaggcagttttgcgagtggccttggtccttgccaatgtcaaacagcatgtgcttgtgaccagcatgttttcggtgtggctaacaaacatttggaactttagttataaatgggcacaagtgcttgtgaccagcatgttttcggtagagatgatcacattgcattagggcctgtttgtttgggattataatctctcaacattatataatccaacatattataatttgaactttat

SEQ ID NO: 88109 - DNA, 182 bp, Zea mays
  unsure (1)..(182): unsure at all n locations
  Clone ID: MRT4577_180355C.1
ggggggcccccggggggaatcaacaacactcaccgcccgaagaggacgcnggagaggcgccctcagcgacggaccgggaccaaggncacnggaaagcgacgccngcgcaggggagagccccgnccggcccggaccctgncgcaccacnannccccggggggcgcgggggacacttttttttt

SEQ ID NO: 88110 - DNA, 672 bp, Zea mays
  Clone ID: MRT4577_180356C.1
agcagctttatggagccaagcttctgcagcttcaggcggaaaggaagctggataaagaccagctagcttcgttatcaaccaagaggtcagtgcaggcgtacctagaagatgagaaggagaacattacaagaatcattaaacagatgctggccgttggcgatattttcaaatccgagaacttacagtactcgactgatcagctcgtcaaggaagttgagaactccatagcggagttcaaacactacaaccaagactatgatgaggagaacatcaggcagcaggtccaggatgtcctagaggcggcgaaggtgcttgaatggctcaaggagaactgcacggtcgagtatatcaggcgatgagtcccatgctgctgggtcaaggaaggctgctcctctgagcgcgagaaagatggtggctggtgtggcggtgggcagttttgcgagtggccttggttgcccatgccaaccagcccagagcagtgcagtgattaagaggtgtggctaacaaacatttgtctattgactcggttgatgatataaattcggatttggagctttagcaactagcatgcttttcggtagagacaaccacatcgcattagagggcgtgtttgtttgggtttataatctccccagattatataatccaatatatttataatttgaactttac

SEQ ID NO: 88111 - DNA, 553 bp, Zea mays
  Clone ID: MRT4577_180357C.1
cgcctgcgtgtaccgggctgctattacacggccgacctacgcgttcggtgcgaatggagactagcggctcgtggcagatcggcctgtacccgagggttctgtctctgtgggggccggtaagctaaggtgctgatgctctggggggtcagcaatctgaataccgtcgcgatgagcgcgttcctggtgggatccgtggacaagcgcgagaagagccaaccgatgctctagagcccgttgctgtattgctctctcaatccgagagacttggaggctgatagtaaggtacacggttaattgtatgacaccctggcttgacttgctaaatgcatgtgaagatcatctacttgagcatcattggactatgagatcaatactttcttacactcaggttaatcatatttgcctgacgaccttaactattgttttgttgaaagcaccattgttaaatactggatgctagggactgatgatgcacctctgtattgacagtgtaaactcacaatcttgtgaactgcctatatggacggataaactgttaatgaaacacattctg

SEQ ID NO: 88112 - DNA, 395 bp, Zea mays
  unsure (1)..(395): unsure at all n locations
  Clone ID: MRT4577_180358C.1
attatatncgaaggttttttttttttttttttttttttcggcagggttgcccggaataaacttaagttgggtggtggagaccaaaatgtggtcagattacagacgtcccagtcaattaccatttccgtggggacaaatgaagttttaaacccgtttgagggagggttttcagcaacgaaggccacaattaaaggcccgtttaataggggcttttttatttttgcctaacaggctagggtgacccctgactttaccggaaacccaatgcaattgatttgacttccttaaaaaaacatttttgggtttttttggccaccattccaatctgttaaaaatgcatgtgcctgtaaaaatcaggacagtttgcccccccctttgctttttttttccaaaaa

SEQ ID NO: 88113 - DNA, 280 bp, Zea mays
  unsure (1)..(280): unsure at all n locations
  Clone ID: MRT4577_180359C.1
ccccccctttcatttcacatacaaccccaatatccatatcaactcaatctattttttggcaacaaactcttttttttttttcaactttnataccaaccacccaactttaacttcccaccacccaacttttactatctcttaatataacatcaaacatcatccacttcttccctcactcacatatttaattatacctcctttttatatactatttccatctttcacctcttcactcatccctttatcacactctccaacttatctctcttttctctcaaac

SEQ ID NO: 88114 - DNA, 778 bp, Zea mays
  Clone ID: MRT4577_18035C.1
tgaggggactggtatccctcctgatattggggacctcgaggcaggccgggtacaaaagatctgctccttagctgcagaattcaaatctggaaaacttccaagtgaagatgaggtagcaaagtggagtgggcaagaatgggaactttacttagaaaatctaccagcagatgttgaagcctcacaggtcactgctctcgacgagcggtacaagctatctgaaagccgtgactacgaggtcaaagtggcgttcctccagctggcgatccccaccgggtgcaagtgctacttcaacgaggttgagaaatgcttgaagcaggtgggaaggatgaagtacctccgcccgctctacagctcgctggccaagtgctccagcgaggagaagatgctggcccagaggatattctcggaggctcaagagttctaccacccaatagctcgaagtgttgcggaggccattttgtcgaagcatagctaagcaagccaagactcttgcttagcgattcacggttgatctggtgactgctgctcagtttgcttctttcgcgtaaaattatcgtctgctctggaaaagaaacttgaggcttgtattgcatctttgataacataatattataatatatgtagagactcagaaaccgtagtacctgaggtatgtatgttctgggtttgcaaggccactcttaacatgcagcttgacattgaactgagcatgatcattgtgtactgcgtttcaacctgcaagggccagaaactgaaaaaaaaaaaaaaaaaagcgggc

SEQ ID NO: 88115 - DNA, 718 bp, Zea mays
  Clone ID: MRT4577_180360C.1
aattcggcacgagggggctctggggaggaggaggagggtagctaggtagtagctgcctataggcctcggcccccattcatggccattaccacgatgtgtcaccccaccacaccgccctctccgatgctgcctccctcatgataaccctctccctggtggttgttctttgccttgttgccgtgcagctcggcacgaggccctcctcattaatcacttgctagctccctgcctccctcccggctcccgctcccccttctcgtgcttcgcgcccccgcagcagccatggcggggatcgacctcaacgacaccgtggaggaggacgaggaggaggcggagcccggcaacgcctgctcccagcagagccggaccagctccgcggccacgttcccgccgccgccgccgaaccagccgaggccgagcgccgcggtgtgcctcgagctgtggcacgcctgcgccggccccgtcgcgccgctgccgaggaaagggagcgtcgtggtgtacctcccgcagggacacatcgagcacctcggcgacgccgcggccgccggcggaggcgcgccgccgcccgtcgccctgccgccccacgtcttctgccgcgtcgtcgacgtcactctccatgcggacgcgtccacggacgaggtgtacgcccagctcgccctcgtcgccgagaacgaggatgtcgcgaggcggctgcgcggacggtcggaggacggcagcg

SEQ ID NO: 88116 - DNA, 286 bp, Zea mays
  Clone ID: MRT4577_180361C.1
ttctcctacccctcctgttctttttctttttcattaagttctccaatattcggtttcgtgaattatcaaatcgagatggcgcccatcaaattttcaatacctttacttctttctcttccttttcttttccacttactaccacttccttcacaacaccttcaacatttactactaattcctctattccaatatcatcctttatctatatactcatattttcctcttcttctacttcttcaccttctccactttatatactattccttaactccattcatttcattaa

SEQ ID NO: 88117 - DNA, 420 bp, Zea mays
  Clone ID: MRT4577_180362C.1
aaaattctgaacaacgggtcatgcatgggtcactcgggattgtttttggggggggcactttgctcaaattacatgcgtggttgtatacctggaccaaaattagcttcgggtccaaaacgggggaaaccagttttttttccctggtcttaaatatccaatttaaccccaagggccgggggggaaaaacacccttttttttccgctccccaaaaaagcaagccccacctttagcccttgggggaacccagctccggatcgacaacctaacctttaaaggaaggggttttgcccataggggggggggggccctttttttggatccttttcctcgggaggggggcggggatccacgggagggcggcctcgttgatcttgaccatgaggaaaaaaaggatgcggaaaaaaaaaaacatgctgaaa

SEQ ID NO: 88118 - DNA, 333 bp, Zea mays
  Clone ID: MRT4577_180363C.1
acagcgccaaaagaggatcttttttaaaaggggggcgtggagaaacaagattcaaaccccctctggcctatcttgtttatataccaggggaacaagggccccctcgggggaactccaaactacaaaatggttttggtccacaataacaaccttttattcctgagggagggggggggtttaaaaaactccgggggggggggccatgacggggggggggccccccccaatacccatttccaagtttggaaatgaagggtggttggaaaattgatcagaaaaaccaaaccccgggggattaagaaccttttttttaggtgcacccggcctgggggg

SEQ ID NO: 88119 - DNA, 306 bp, Zea mays
  Clone ID: MRT4577_180364C.1
taggaaatgtcctagtgaacgtgcaatagccactgcgcgagtcggtgtcggggctggtgtcggacgaatacggggaggaggcacctgctcctacgtcctctactgagaatggggtggcgcggaggtgaaggcatgaagggagagagaaaagaagtagaattacgaatgaggtggtgacaactgaggcgaggaccatcattatcgtgtggatgtatagatgaccaaatgcccgtgcgctgctacgacaaagttatatttaatacgtataaaaaataaatttaatatcaaagtgaacatacgttttat

SEQ ID NO: 88120 - DNA, 578 bp, Zea mays
  Clone ID: MRT4577_180365C.1
gcccctcctcgagttttttttttttttttttttttttttttttttttttttttttttttttttttttttttttttttttttttgggaaaggtaaccccgggtggttttttttcttgggttaaaaaaaaattgggagccaaacctggaccaaacaataccgggttttttcccgcgggtctttcccacttttaaaaaccaaacaaagggggggctaggggcccccaaaaaccaacaaaccaaagccccctttgcccaaaaaattaatattgcctttgcccccggcccgggaacctaaggcaacccccaaaactttttcgttgatccccaaaagtttttggccctttccgggatcggggcccccctgaaaaaggggtttttaaaacaaccccaatcctttgttccacccccagaccccccccaattggggggggggggggtcgttaccccccggccccacccttttgcgggactccccctccaacaaaaacccttgggggacaaacttttgaaccgggggaaaaaccccccgaaccccggggatggcccccggaaccacccccgggggggggagccccccc

SEQ ID NO: 88121 - DNA, 2174 bp, Zea mays
  Clone ID: MRT4577_180366C.1
tatcgggaggagccaggagcacacgcccaatgcggcagccatcccaccacctatcgcgtgggcttcactcaaacggcttctgcagcatcctataaaacctcctcaccaacctccgatggcggaaattcttgccctcccacaccgaccccctcccccacggcccgccttcccccgggagcacgagaccctcgttccctgcgccaccgactgagccaaggccgcgccttgccgtttccgacctaggtcgcgagatctcggaggagcggagccccgccgtgccgccgcctgctacaggggggcacgcagggaccgcacggtgcgatggtggacacgggcggggggaggctctaccagcgccgtggcgcggtcgctttcgtcgcggccaacaaggcgctgctcgccgctgcgtgggtcgtcgggttcgcgctcgtgttcctatggcagagcgcctccatgtccttcggcagcgccggcggcggagggtacctcaggctcctgtcggcgccgcctccgccgccgcgccccgcgccgcggcttcgccccacggcgtacaacatcacggacttcggcgccgtcggggacggccgggcggtcaacaccgcggcgttcgagcgtgctgtcgaggccatcgcggcgctcgcggagcgaggcggcgggcagctcaatgtgccacccgggcgctggctcacggcacccttcaacctcaccagccacatgacgctgtttcttgccgatggcgcggaaatccttggcattacggatgagaagtactggccattgttgccagcattaccgtcatatgggtatgggcgggagcgcaaaggaccacgatttgggagtctcattcatggacagaatttgaaagatgtagtcattacaggacataatgggagcataaatggccagggtgaagtttggtggatgaagcatcgcagaagaattctgaataacacaaggcctcctcttgtgcagctgatgtggtccaaggacattattgttgcgaatataacactgaggaactcacctttctggcacttgcatccttatgattgcacaaatgtgactgtttcgaatgttactatcatgtctcctgtttctggtgctccaaacacagatggcatagatccagattcttgtcaggatgtgcttattgagaattgctacatatcggttggcgatgatgcaatagctataaagagtggttgggatcagtatggtattgcatacggtcgcccatcttctaacatttcaatccgcaatgtaaccgcccgttctcttgtgagtgctggaatttcaataggcagtgagatgtctggcggagttgcaaatgttactgtggagaatgtgcgcatctgggaatcaaggagaggtgtgaggataaagactgccacaggaagaggcggctacatccgtaacatctcataccgcaacataactttcgacaatgtccgtgctgggattgtgataaaggttgactacaacgagcacgctgatgatggatacgaccggactgccttcccagacatcacaagcatatcattcaagggaatccatgggcagggtgttcgggtgcctgtccgagctcatggcagcgacgtcatccccatcaaggacatcagcttccaggacatgtcggtaggcatcagctacaagaagaagcacatcttccagtgctcctacctcgaggggcgtgtcatcaggcctgtgttcccgaaaccatgtgagaacctggacgtctatgatgagcaagggcagcttgtgaagcgggcagtggccctaaacagcacagaacttgactacgatatatgaggtgcacatatcataccacagctttgatagttgtagtggaaattggtgctctctaccctcagaaatcaattttctccgattgtccatggctttttgggtctagaattgtagatagagaggagattctcctcttgataggtttgctgcttacagtggctgaatgtatctcaccggcgatttactgatttgtccatgaacatttgtaatcgccagaaccttcctggcgacaaatgtatgctgtcaatatattgtacacctgaagattgtattggagtatacacagtacatgatctctaaatatctgccagcagatttttctaaaacagaaaaaaaaaaaaaaaaaaaaaaaaaaaaaaaaagcggcc

SEQ ID NO: 88122 - DNA, 353 bp, Zea mays
  Clone ID: MRT4577_180367C.1
ataacctttttttctaaacatacaaaatgagtgacatatcaatacattgcttttataaactttgaaatataatcacaagaaaattggcccaagcggtgattgaggctttcaaacatacaaactttacagcatttaggaacacaaaatcaacgctgaaagatggagtttttccaaattacaaacgttatgttaaatgcaatactgtcaagattaaacaactatttacgcaaagggcgacacaaacaaaagtaaaggcatatactctgtatatggccattatataaaataaataaggtgcttaatttcaagaatacactggaacctgtttactctaaaaaagggtacatgagggg

SEQ ID NO: 88123 - DNA, 1167 bp, Zea mays
  Clone ID: MRT4577_180368C.1
aacttaacccaaaaacctaaatcgctagtgacccgcgcgtctctcttctttcctgcatagccgcgcgccgccaccaacccgctcctccaccgcgccgccaccaacccgcgccccgcgcgccaccgctcctccaccacgcgcctgccgtcaccgctccaccgcgcgcgccgccaacccccgctcctccaccgcgcgcgcccactgtagacatcggcaacaacaggttctacggtgacatccctcgctggatcgggaccttcgttccggcgctgaagatccttaggctcagctcgaacaacttcagcggccaaatccctccagagctatcgcagctctcgtagctccagctgctggacctagcccacaacggactgacggggctgatcccgagagagctgggagacctggcttccatgaagcaccccaagatcaactccaacacaggatcgctggacgggtccatctaccaggatcggatcgacatcatctggaaggggcaggagctcacgttccagaggatactcgagctgatgacgggcatcgatctggaaggggcaggagctcacgttctagaggatactcgagctgatgaggattccggctctcatcaagtgactcctccccctcacgatgactttgcggatagatgtctcaatactagtgggggagctacgaataacaatccgatgttctgatcgagagcgatggagctaatgtttgaacttgtgtgtttgaacttgtgaactaaaaatgtgaactatggatgtgaacttatgtgaatttgtgaacttatgtatttgaacttatgtatttgaacttatgtatttggacttgtgtgaatttgtgatatgaatatatatccatgtgtttgaaatcaaaaaaaaaaaaaaaaaaaaaaaaaaaaaaaaaaaaaaaaaaaaaaaaaaaaaaaaaaaaaaaaagaaaaaaaaataaaaaaaaccaaaaatacaaaaaaaaaacaataataaaataatacacccttaaataaaatcaacctaacttcaattttaaagcaccgaactttttagaaaaacccttagctgtaaaaaacttaaagttactgaacttaattcccttttacacaattggggttttaccagaatggggccataccgaaaagccttcccaaaatcgcccttaccaaaa

SEQ ID NO: 88124 - DNA, 160 bp, Zea mays
  Clone ID: MRT4577_180369C.1
gggcgaaacgagccaaggccgacgaacgcccaggccaggccgacggagccaacagcgacgcacgagcaggcccacgcgacctttttgaggggatgtacgaaagcatggcagggcggcgcggccaaaaaaacattctcgaggggggggagggggggggcca

SEQ ID NO: 88125 - DNA, 2257 bp, Zea mays
  Clone ID: MRT4577_18036C.1
cttttttttttttttttttttttttttttttgagtctctacatataccgttgcaacgcacggggcactcatctagttataatattatgttatcaaagatgcaatacaagcctcaagtttttcctaagtttcttttccagagcagacgataattttacgcgaaagaagcaaactgagcagcagtcaccagatcaaccgtgaatcgctaagcaagagtcttggcttgcttagctatgcttcgacaaaatggcctccgcaacacttcgagctattgggtggtagaactcttgagcctccgagaatatcctctgggccagcatcttctcctcgctggagcacttggccagcgagctgtagagcgggcggaggtacttcatccttcccacctgcttcaagcatttctcaacctcgttgaagtagcacttgcacccggtggggatcgccagctggaggaacgccactttgacctcgtagtcacggctttcagatagcttgtaccgctcgtcgagagcagtgacctgtgaggcttcaacatctgctggtagattttctaagtaaagttcccattcttgcccactccactttgccacctcatcttcacttggaagttttccagatttgaattctgcagctaaggagcagatctttttgtaagtagctgaatctggttccatggcatcaggagggataccagtcccctcaacccacaggtgaaggtcaattttgttttctatcccaggtacattggttttgaggaattcaagaaatgtctctgtatctatcgattggaacttgaaggttgcaatgtacttctttaaaaactcgtcgaaagcaggcctgccaatctcacgctcaattctccaaaggaactggaaacctttctcatagggcacttcagagtaaacatcatcagggtcaatccctgccatcttcggcttcaacttggtgaactccatgttatccttaaacctctccatcatcctgttcaatcccctccatccaatccccatgtttaaggctgcccgctcctccccttgcacaacctcaacaatcctcctctcagcatatgttgtgaatccctcatttagccagaaatcttcattggttttgttagtaatcagattgccagtccagctatgtgcgagctcatgggccacaacctgagcccctgcagcatcccctttgatgaccgtgggagtgaggaacaccatcctggggttctccatacctccataggggaagctcggtggcagcacgagcagatcgaatctctcccattcatacggcccaaagagcccctccccaaccttgaccatctcctccacccccgcgaactccctggccgcctcgtccaacaccgtgtcccctccctccgcgtacacccgcgtcctcgggccgaggtccctgaacccgatgctgccggcggcgaacgcgaagaggtagggcggcacggactggtccatctggaactcctcgacgatgcggccgggcgcgcaccagagcccgtcgtcgcacgccccgcggtggtcggagggcagcgggtcccggcgcgcgacgtggcgcgcggcggcgacggcggagagctgctcggggacgttgaggaggagcgagaaggtgatgcgcgcggcgggggtgtcgtggcaggggaagacggagcgggcgtggatggactggcactgcgagaagacgaagggctgcgcggaggcggtctgcggcggggccagccactgcagcgcggaggcggcgggggaggttgagaaggtgagccggaaggaggcggtgtcgcggggcagggcgagggtcagcgccgtgccgaggaccgggtcgggcgccgcggcgagggagaaggggatgggctccggcgggtcggcgtcggtggaggcggagtggacggcgagagcgcgggtgtcgaggaggaggtcgccggagtgcggcgcggagagggtgagcaccgcggaggcgtgtatggtggaggcggcgaagtcgaggtagaaggcgagcgccgcgcgcgagaccaccgggtgcgcgccgtcggtgtaggagtggggatcgaccggcgccatggctgctcgctcggtcgctcctgccgcggcgaacgagacggggctggacactggagggtttggttcgaaatcgagccgaggtgtttcggtaccgtgccggtggatcgccgaggccgaggcgtccaggttgagcagacaaagcttttgagctcttctctaaggacttggaaaacggccgcctcgagcgccgcacag

SEQ ID NO: 88126 - DNA, 1094 bp, Zea mays
  Clone ID: MRT4577_180370C.1
cattgggtacctcgaggccggccgggatcgaactgaaaactaacaacaaaagatccccgcaccactaggctcaaacccatagctagctagcctagccatggcagagcacgcacgagggtcccaaatccttctcatgtacctctgccttctgctactatcctccttggcgcacctggtgacgagcatggaccttgacagctacgacgactacgacaacttctccgatgagttggtggccccggcagactacgacaacgtcgacgacggtagcttctccgacgaggcggcagaggtaccagcacggcgccgcctgtacgacatcagcctcaacgcctcctcctccaacaggtccggcgcagccttctgcaggctgctgttcctgcagatactggacctgtccaacaacaagctcacgggagagctgccggactgcctgtgggagatgcaggcgctgcagttcatggacctgtcgaacaactccttctcgggcaagatccccgaagccccaccgtcccacaactgttcgctagcatcactccacctcgccggcaacagcttcaccggagagttcccgaccgtcgtcgggggttgccagcagctggccaccgtagacatcggcaacaacaggttctacggcgacatccctcgctggatcgggaccttcgttccggcgctgaagatccttaggctcagctcgaacaacttcagcggccagatcccctccggagctgtcgcagctctcgcagctccagctgctggacctggcccacaacggactgacggggctgatcccgagagagctgggagacctggcttccatgaagcaccccaagatcaactccagcacaggatcgctggacgggtccatctaccaggatcggatcgacatcatctggaaggggcaggatttcacgttccagaggatactggagctgatgacgggcatcgatctgtcgggcaactccctctcgcattgcatccctgacgagctcaccaatctccaaggcctccggtttctgaacctgtcgagaaaccgtctgtcgtgtggaattcctagcagcatcggaatcaaaaaaaaaaaaaaaaaagcggcc

SEQ ID NO: 88127 - DNA, 323 bp, Zea mays
  Clone ID: MRT4577_180371C.1
aaaattgaaaagggacaagatgggcattttttataacaggattcaggtttttgtgtcatagcccgttaacggaataacaatatttttctcatagattcaaagcggaaaaatacaactgaatttgctgacagggctccttggttgaggtttaaaaactggggacacctgaaagatggggacctaagccttttttttagatgactttttgggggggtttttgtgggggttaaacttatcagatttcgaggacatgcctttctttttccttctctgcttattctttttcaccttgaacacttgaattggcttgcccaccaaaaggg

SEQ ID NO: 88128 - DNA, 159 bp, Zea mays
  Clone ID: MRT4577_180372C.1
gtccgcatcccggtcgccccgcgtccgcccacctccggctgacatgcaaagagttcttgatgcacatgttcttgggagccgtacattaaagaagtagctactcaaagagaatgaaatcacaggtcaaaaagctcggattcgtgctcattccatcgggtg

SEQ ID NO: 88129 - DNA, 303 bp, Zea mays
  Clone ID: MRT4577_180373C.1
tacaacctgcaaaccacggcgctgctccgtaataccaacaagaagcatagtgccagtcgaagtcattaaagagcttccaacggagctcaaaacgttgccgattaattcgggatggacacactaataagggaccgggaccaggacggggaccagctttttcgtaacaaacgacgacgggaggaaaagaattttactggttggaagaacttgggatcctttagtaaaaagctaacccgggcttgtggtagattcacggctgcactttgttgcggcggcggcggcaacatcccacggtcagaacct

SEQ ID NO: 88130 - DNA, 669 bp, Zea mays
  Clone ID: MRT4577_180374C.1
cggaattcccgggtcgacccacgcgtccgcgcgcgtttcgttcgaacgatcgatgcgccccggagcacacggcacgcacccgcgccgcgagagaagaggaaaccaagcgatgccgtcggcccgtgacactaacatggacttgatggaagtcctctcgccgccggccgccgcacgggatcatcagaagagccaggtgcacgccgccgcgcgtgcgctaccgcaccaaagcgccagcgttgtcgtggacggacgcatgccgccgccggccgccgtcgcaagcctgacgttacaagttcccggaggagctcacgatgtcacttctctggctactagtccaaggaccatggccgtgcctggaacgactgaacagctgacgattttctactccgggtctatggtgaagttcgacaacgtcccaagggagaaggctgaggaggttatattcttcgctgcaaagaagtctccagacgcaggacaccagcatgttccccagcagcagcagcctgcatatccaaacaaaaagaagaggatattctgttatcaggctcctgagagagatgctgatggtttgttcatccacgagaacaaagccgatgcttgttcacagcgacagcatcggagcccagaggacgggtacgccaccatcaaggagacgaatccatgctcgcg

SEQ ID NO: 88131 - DNA, 216 bp, Zea mays
  Clone ID: MRT4577_180375C.1
ggaccaattttccaccaaggttacggggttctataggtttccttttttcccccgaccttttaacaaccggggttttgggatggggaaaccccattttttaacccttccggatcccacagggaatcggaggttggattttacctttattaaccttggttcttccacaattattaggcctattacaggaggtacctttggggcaattattggcaccaa

SEQ ID NO: 88132 - DNA, 187 bp, Zea mays
  Clone ID: MRT4577_180376C.1
aaagaatcttccggttagtcccaccatagggatatggcttgtataagaaaaaaaaatgctttgagggcacaaacgccaactttgggagattttaaacaagcatataaaacacacatacaagtgaagggggccaataaaaaggtatttaggggattggaaagcaacttggcacgaggcctaaaacaaa

SEQ ID NO: 88133 - DNA, 340 bp, Zea mays
  Clone ID: MRT4577_180377C.1
gttagatgcgagggcgccctttttttttttttttttttttttttttttttttttttttttttttttttttttttttttaaagggggcgggcccatccaactaagttttttttttaatcccccaaccccgagagggttaggatttccaacattcaacactttttacagaaggacaaactttttggacaaccattcttttgcgggttagtttaaacaaacgcaagcccaaactgggacaaaaactaacagctttgatcttacttgatgaacaagttttttgggcagatgggctgcttatagctgatttgcctcaacaaaatactagtgctgtaaaagttggg

SEQ ID NO: 88134 - DNA, 536 bp, Zea mays
  Clone ID: MRT4577_180378C.1
agagacggctaagactgtctttactatagatggtgagcctcattcctatatttacatatggacgaggtccattaatcctgacagattaacggggatacgagaatccttctattgacccctaggacttgagcctagtatgctaccaaactactatactgctctatgcagagtccgaaaactgtgtgatcgaatgcatgaggcggagaactggcactctccatgtttatcactatatatacggatacacttgtttatgcttaatgcatcggtgtgcgggaacgaacccctacctgcccgctcggacggttggaaggtctagtcccagcacactgactgtcgttgacatttgtacctcactccgaacaagcaatggtgaaatcatggggctccttgatggctgtgtggaccacttaaccactaagaatgctcttcagcttgaatggcgccagagatctccggtttctagatgatgcctatagactgagcagatcgagattctcctgagttgctatctatgccacttacttagttaccta

SEQ ID NO: 88135 - DNA, 868 bp, Zea mays
  unsure (1)..(868): unsure at all n locations
  Clone ID: MRT4577_180379C.1
attccaacgcacgcagcgcaggacacgcccactttccacgcccccgtctccgcctccctcgccagcgagctccgctccgctccgcttcctcctccggcccccgccgccgcctcctcgctccccaagaccaatggctgacggcgaggacatccagccacttgtgtgtgacaatggcactggaatggtcaaggctggttttgctggtgatgatgccccaagagcagttttccctagtatagttggccgccctcggcacacaggtgtcatggttggaatgggccaaaaagatgcctatgtgggtgatgaagcgcagtcaaaaaggggtatcctgaccttgaaataccctattgagcatggcattgtgagcaactgggatgacatggagaaaatctggcatcacaccttctacaatgagctgcgtgttgcccctgaagaacatccagttttgctgacagaagctcctctgaacccaaaggcaaacagagagaagatgacccaaatcatgttcgagacattcaatgccccagcgatgtatgtggctattcaagctgttctttctctatatgccagtggtcgtactacaggtattgtgcttgattctggtgatggtgtgagccatactgtgccgatctatgagggatatgcacttcctcatgctattctccggctggatcttgcgggccgtgatctgaccgactccctgatgaagatcctcacagaaaggggttattccttcactacaaccgcagagcgggaaatcgtaagagatataaaagagaagctcgcctatgtcgcccttgactatgagcaggagctggagaccncaagagcagctcatccgtcgagagagctagaactgcctgacggc

SEQ ID NO: 88136 - DNA, 339 bp, Zea mays
  Clone ID: MRT4577_18037C.1
accaccgaaattcatggttggatttcttgatcagtttcttggccagcaaaattccaaccttggtgggattgcatttgaagcacaaagccaacgatttgcatatgcatgtacttaccaaaatttaaaggccagccaatccaaccaaacttaaaaacaccccttatatccatttctttacatattggagacacccaattaagaatgtgccaaacacggattgaaacattttttggataacatgtgtggagactctgtactcttcgatagccatataggatattggcactcttgttgtggatatagattttcaagctccatacattgcttcgacagtgactg

SEQ ID NO: 88137 - DNA, 636 bp, Zea mays
  Clone ID: MRT4577_180380C.1
cattgggtacctcgaggccggccgggacagaggaagccttgtggaggacccgctcggcatctccggcagtttcgcagacaccaaaacctctctctctgactgcgaataagagctctaccctatcatctccctgcactggggggagatcctggatgtcccccttattgtgagcaaataattggtcgggatggactccggtgactacaagcatagatcggctcgaacggcacctactggctctgcgtcgaccactgcatgcagtggatgtagtgatgctagaaaatacaaagatctagactgtactccgatgaaaagagtgaagtgaccaacatggtcatgcgcgagtggacgactgaagctcgaggaagcacacggaaacgtacgtgagtgcagaatgcgtgcttacagcggttataccacacacaacttgcatgagcatacatacaagtcttgtgacagcacaagaaattgcatgccaaaactcacgacctgatcaagaggagtatagacggacccgagctgaggaaggctctcatcgctttactaatgcgggtgatcgtcatctgatagctatacacgttatgacatgaaatgagtggattatatgccactgggacatgctccaatagctggagg

SEQ ID NO: 88138 - DNA, 226 bp, Zea mays
  Clone ID: MRT4577_180381C.1
gcttcctcaagctcatcaagagtggactttgaagctggtgcatggcatcaatcacagggaccaacaatcacattcacgaacaatcacattcgcgacagcatacggcctgcacagcagtaactgggatctgccatgctacatctctgtcacatctatagagactggcgtattacctggacgctgaatccaacggtgcctgcttgtgacaagtggtacactggatgcc

SEQ ID NO: 88139 - DNA, 495 bp, Zea mays
  unsure (1)..(495): unsure at all n locations
  Clone ID: MRT4577_180382C.1
tcgagcggccgcccgggcaggtacaaagcttttntttttttttttttttttttttttttttttttttttttttttttctttttttttttttttttttttttttttttttttttttttttttttttttttaaaaattttcctacaacccaaccaccctaaaggggaaagggagaaaactggcaaactttataaatggttacaatttcagacaaaatcttggccaaaataataaaaaaaatgttccctgggtaaaaagggttgacgttaaaaattccaaaaaaaaaacgaccaatgaacaaaaaaaaaaaaaaaaagggggcctaacgagtgaactaaataaaaaaaaaaaaaacggggaaaaggcccgtttttaaaaaaggaaaacccgcgtgccagctggtttaattaattttccaaacccctgggaaagggggtttggtaattgggcacttttacgctttctttcttttttccccggtgtcccgggttttccgg

SEQ ID NO: 88140 - DNA, 1252 bp, Zea mays
  Clone ID: MRT4577_180383C.1
attcggctcgagtggaaacccagtatgcattgggcaaaaccaactgaatatttctcagtattgtcagtcaggaacatatgttgcacgtggaggttcagcagataacagtacagtttgtccaccatgctctagcgactttccttttgaaagaataccgatgtcaccaataccatgctcatgtgtcgttccagtttatgtgggttaccggcttaagagtcctgggttctcaaatttcattccatacgaatcccagttccagcagtacttaacatctgggctttcactgtcatcgtaccaattagaagtttctacttttatgtgggaagaaggcccaaggctgaagatggacctgaaaatatttccaaataacactccctttttcactgtaagtgaggtgttcaggcttaatggtatgttcacagcttggcagattgcagactctgatatatttggcccatatgaacttatcagcttcaaccaagggtggtacaacacaataataccacagggtacaaagtctggtctgagtacaggtgccattgttggggtggtcatggcggcatttgttgcagctgccattctttcatccctcgttactatcatcatattgcggagacgctcaagacagtcttcttcaaataaacgcaccgcgaaaagaatttcaatgaaaattgctggtgtaaaagacttcacttttgatgaattgtcacattgtacacatgactttaatgattcaacactaattggccaaggagggtatggcaaggtatacagaggtgtgttggctgatggaatagtagtagcaataaagcgagcacagcaagggtctcttcaaggttctaaggaattcttcacagagatagagttgctatcgaggctgcatcaccgtaatctagtctctttgctcggttattgtgatgaagatgatgaacagatgctggtttacgagtatatgcccaatggaaatctgcgtgatcatctttcagctagagctaaggtgcctctagatttccccatgaggctacggatcgcgctgggatcgtcacgtggtatcctgtatttgcacacggaagcagatcctccaatataccatcgtgacatcaaagccagcaatattctactggactcgaagtttgtcgcaaaggttgctgatttcggtctctcacgccttgctccgctgccaaaaacagaggggagtgcccctggtcatgtcttcacagaccgcaaaggcaccccctgttatcttgaccca

SEQ ID NO: 88141 - DNA, 226 bp, Zea mays
  Clone ID: MRT4577_180384C.1
ggacgcgtggcgtcgacatgccgctctggtagttgccagtatcccaactgccgaaaagtcaaggggctattccgtcatgggatgcagtgcaaaacgcgtgcttcaggagggtgtgtcctttgcaagaaaatgtggtacatgcttcaactccatgcccgagcttgcaaggattcagactgcaatgtgccgcggtgcagggatctgaaggagcaccttagaaggttgc

SEQ ID NO: 88142 - DNA, 592 bp, Zea mays
  Clone ID: MRT4577_180385C.1
agcgttcgccgcccctttctcaggccttctctggggcctaccatgggcctgaacattgtgctgtggctgctgacatgtaccccagcgctccaccgtcggctgcacgcggcggcggcggaaaactacagtggaagctacatccggcgctagctcctaccgtggtgcgtaccctgcacacgatacgccacgcggtgggcggccatctagcaagcgtgcgagcgaacttttcaggcaactatacattttaagtatgcatccaactctgcatcatactacatgggagagaagatggtaatggagtgtgtgtgtatgtatgggtatgcccagcgcgtgcgcgcgaggctctgggcaaatgacagatcatatgcactatcatgtattcacaatatatactacaacacattatgagagaaatgattattgaagtgcgcatagtggtgcatgcactgatccatgtgcgaagcgacagggcacggcccagtttctttgggagcttatgcgctccaacatgcactgcaaccgtaaaggaaaggcatgaggagcgacaggtgcaaggaggaactatcgagaagaactctgcattcggcactgg

SEQ ID NO: 88143 - DNA, 625 bp, Zea mays
  Clone ID: MRT4577_180386C.1
gattttcttcactgcgttggccattggccttatccctggccgcactccatcgtcttcctccctccgcgcgcgaggccatcccggagctccctcctcccggtcccgctctggctcctcttgtccgccgcccagcctacatcttcaagccgccgtgcccctgccccatcttcctggccgcgccctctccctgctagcgcgcgcagccgcgctcctcgctcggccgccctactgctgctcgcccatggaagtcgcgcgccctggagctcccacgcgcgtcgtcgtcctcaagcttatctcccatggcgccctccctgctacagcttgccccatctccctcacaccgtcttccccagccgcgcccatgctgagatcctcccagcatcgctcgcccaaatccgtggagcactagacgtccggccgtcacatctctggccgcgctctggatttcctctctttgcctcggtgtccatgtacgaacgcatcgactctcctatacctgaattgacccttcgtcgactcggcacgcccgccatccgttgatcaagcggggcctcgccacgctcgcattccttggagttgtattcgcctccgcgcgacgacggctgcgagatgagtttgctttaac

SEQ ID NO: 88144 - DNA, 279 bp, Zea mays
  Clone ID: MRT4577_180387C.1
gggaaaccacagcgccttttcttttatttaaaacggggggccaggtttgtccctgtaaaaaaaaaacttagcattgggggggggcccaaaagaattttttttttcccccctttttttggtggaccacccagccttaataggaaaccctaaaggccaggcagtttcaaagaaagtttttcgggggttaacgttgcccaccagggggagctcctggggcctttcccaacaaaagccttttattagaaaagtattcgggggggacggggccatgccaagggg

SEQ ID NO: 88145 - DNA, 178 bp, Zea mays
  Clone ID: MRT4577_180388C.1
gactaactataaggaaagctggcacgctctgcagagttccgatcctgtatagccggcgcgactccacgcgtccgctgaaggttcatgacacgcgacgacagtccggagtggagcacgaggcacgcgccggcaggctgctctccagctcaggatgttctgtgactgcctggtacgacgg

SEQ ID NO: 88146 - DNA, 364 bp, Zea mays
  Clone ID: MRT4577_180389C.1
gcgtgcgcgggcccggaatgaagagcttggtcgacgagctttcgtgtcagaggccggccgccctctcctgctcggggtcttttaacatagccagctgtgcatcttcacacgatacccatgggaaccacaatcagaaagaggacaaagtgcgtgtgtgacggaagtgttatacgcaaacctaaatgacacggtgccaactgagttagcggtggactgatactacgagcaggacgagctgggaccacaccaacgcgcggtgaccaggacactggcggcgcgcacgcccaacgtgctcaggacgggggggcgcaggatcaggtagttcacgtgtgtggggcaggacacgttgaacttacgagggaac

SEQ ID NO: 88147 - DNA, 713 bp, Zea mays
  Clone ID: MRT4577_18038C.1
ctggtatccctcctgatgccatggaaccagattcagctacttacaaaaagatctgctccttagctgcagaattcaaatctggaaaacttccaagtgaagatgaggtagcaaagtggagtgggcaagaatgggaactttacttagaaaatctaccagcagatgttgaagcctcacaggtcactgctctcgacgagcggtacaagctatctgaaagccgtgactacgaggtcaaagtggcgttcctccagctggcgatccccaccgggtgcaagtgctacttcaacgaggttgagaaatgcttgaagcaggtgggaaggatgaagtacctccgcccgctctacagctcgctggccaagtgctccagcgaggagaagatgctggcccagaggatattctcggaggctcaagagttctaccacccaatagctcgaagtgttgcggaggccattttgtcgaagcatagctaagcaagccaagactcttgcttggcgattcacggttgatctggtgactgctgctcagtttgcttctttcgcgtaaaattatcgtctgctctggaaaagaaacttaggaaaaagaggcttgtattgcatctttgataacataatattatattatatgtagagactcagaaaccgtagtacctgaggtatgtaagtcctgggtttgcaaggccaaaaaaaaaaaaaaaaaactcgaaaaggggccggtac

SEQ ID NO: 88148 - DNA, 839 bp, Zea mays
  Clone ID: MRT4577_180390C.1
ttcttccagtttcagcttcgagaaagctcgtcgccgctcgccgccacgccgggaaggaatcgccccaaaaagcccgcgcacaccggtgggtcagcgcacgaggagcgggagcagccaccactcgccggcgatggagagggtcgtggtggtctccgaggacgccgcagcctcggtctcctccgccccgtcctcctccttcgcggaaaccagggtcatctgtcgcgtatgtcagaagcagttcgcgcagtacacttgtccacgctgcaactcccgctactgttcacttacgtgctacaaggggcatagtgtgcaatgcactgagtcgtttatgcgtgagaatgttacggaggagcttaagcagattcagcctgaagatgaatcaaaaaggaagatgctcgatatactcagacggttccacttggaagaagaaatggagtctgatggtgaagatgagtcaatgctgtcagaggagcttattcagaaagccatctctggtgacgaaatcaagcttgaggacctctctgatgatgaaatcaaacgatttcgtcaagctctggcctctggtgaactcagcaagatgattgagccatggacaccatggtggaaaaatccttctgctaaatcgatctctcttagtcatgatgggagccagcttattagacaaataagtacagatgatactactttatcagatccaatgactgcgtcagagtctatcatcaatgaaataccagaagggccagaatctcctctcccatcactcaaacagctaaccagggcagagccatctcctccgctcactggtcacttggttgatattctctacagttactgcttta

SEQ ID NO: 88149 - DNA, 316 bp, Zea mays
  Clone ID: MRT4577_180391C.1
aatgaaaaaaatctagccgagaacaattgaccaatgtccaagatattgactgcgatttaccgtataacaccccatctgaaaaagcacagatggaatgaaaagcacacttagggcaacatattaagaccggagttaatactacatacgaggataaaccacctaagggggcactctcttgtgccacttaaaggacagggccacttgtttactagaaatgatggcaaagcggctcttatttaggccaaatactacattacggcatcactgacctacgaagccatgggaagctgacggttccttgctagacatgcctttg

SEQ ID NO: 88150 - DNA, 333 bp, Zea mays
  Clone ID: MRT4577_180392C.1
cgacccacgcgttcgtagccgttgttctcactatcgctctcggcctacggcggcacaacatccgaaacggtgtatactgaactgctaacggaggcagcggaagctatggatatgtaactgaaggagcactacactagggggaacttcctatgagaacgaacgggcatccgtctgaatgtcagagatgggtattacaaacacaaggcgggacacgtactccagggggagcataccgagacagaggtagttagacatattactatgaaggcggtcaatgcctggatagatggggggtgtgaggaatacgactgtcactcgaacacaatgtattgg

SEQ ID NO: 88151 - DNA, 263 bp, Zea mays
  Clone ID: MRT4577_180393C.1
caaaatagttctgtatgtagggatagtgtaaaaattttggtacatgatgaatcattgaaagttattgagaataaattgtgaattgttctgttctattgaataaacataattgttggttagatgctgaaggagaagtataaaaattatccagtatactaatgctacgctgcaaaaggtaagcgctaaatttaaaatatattttcttttgttcctccattttgcataagtaacaggtttatatcgctagttggtggtgctgatgt

SEQ ID NO: 88152 - DNA, 466 bp, Zea mays
  unsure (1)..(466): unsure at all n locations
  Clone ID: MRT4577_180394C.1
ctgtggggggggggggccgttttcattccttctttcngtgcaaatcttttttttctagatacatccatacctttttttttttctgcgacttctaaacttcaatttgggggggggggctccctctgttncacacgttctcactttgattcgggatttcctgttctctagaagccttttgggttgttaaggctaccatcttgtgcgtcccttttggttccgctcancctcgccgcctgctccaactccgatcggggctgttcttctctgctccccctggtgttctgtctcgatcggtccccctcttgtgagtcctgctccccccgctttccccggggttgcttccttccccacgggttgactcccttgcggtgctctggtgccccttggtccctcttccttttctgttcccttggtcttccatctccttaccctttctctcccttttcccgattccctttatcctttc

SEQ ID NO: 88153 - DNA, 697 bp, Zea mays
  unsure (1)..(697): unsure at all n locations
  Clone ID: MRT4577_180395C.1
gtacgccgtgaactccgtccgtggcatgcaggacatccccggccactactccggcgacccgtccgcccgccccataagacctccgcatgctgcaagcaccacgccgcgtacgacgtggacaactggcacaaccagacgcggttcacgcacgacgcgcgcgtctcggagcgcgacatggccgagaccttcctccggcccttcgagatgtgcgtccgcgagggcgacgtcagcagcgtcatgtgctcctacaaccgcgtgaacggcgtccccgcctgcgccgacgcgcggctcctgtccgggaccgtccgcggcgagtggcacctcaacggctacatcgtgtccgactgcgacgcggtccgcgtcatgacggacaacgccacctggctcaacttcaccgccgcggagtccagcgccgcctcgctcagggccgggatggacctcgactgcgccgagagctggatcgagcaggagggcaggccgctcagggactacctcagcgagtacggcatggccgccgtcgcgcanggcaagatgcgtgagtncgacatcgacaacgcgctcaccaccctgacatgacgctcatgaggctcggctactttgacaacatcccaaggtacgcctcccctcacgagacgggcgtatgcaccggcgagcacaagagcctcgccctcgacggggcgaagcaaggcattgtgct

SEQ ID NO: 88154 - DNA, 453 bp, Zea mays
  unsure (1)..(453): unsure at all n locations
  Clone ID: MRT4577_180396C.1
cttggatatgtccccacgggggggttagcatcgtcccaacccgacgtgaaatgctttcatttaaccaattgtccgcactgaaccccgatggttatttgcagtagcaaatactactaccatttaacccgctagcctgcaggaatgcctttgtcttgcttctctgacacagcggggggtggggggcgcttttttttctttgtagggcggctgacccgggtggggtggaggggccagccagcgcgaggctgtgtccaacctggatggtgaaacaactgtgggtcttaccgacttcacctggtgccggggaggacccccttgctgntgccgcctggcacgatggcacgcgtcgagatgccgggcgtggtgtcgccgacggtcttgccgagcatgatgtgcctcatgatgatgccacaatgtgcctgcgacgccgtttcgcgtcttatgctgcgtccc

SEQ ID NO: 88155 - DNA, 289 bp, Zea mays
  Clone ID: MRT4577_180397C.1
aaacgatttcctgtagaagtagctttaatggtttttgctctagaataccgtaggtctatccttagagcactcacgccatgctttcttccctgggttttaaacttcatataactttcagaaattggagagcaaaaattttgcttgtcactgcacatcaatataaaaaagcttatttaacttatcaaaacgtatttattgccaaactatgcttttttttgttaattttgttcatatttatcgggatgacaaatccatagaatatattcttttatgttaaattatgatcttc

SEQ ID NO: 88156 - DNA, 303 bp, Zea mays
  Clone ID: MRT4577_180398C.1
cgatgatctcagattccttgatgggcgggagaagagatagctctcctccagggacttgatcttcatgtccttgaccaggcggcccagcttggtgatgggcatccactccttatcctcggccttgcctctgcaagctccgtggccttggtcccggctccggtgctgtccacggccgcgaccccagccccagatgccactgctgaaacctccgtggacggttactgtggttgcccatcccagggcctctgacacccccctccttggaaacccggttgaacggggttaatcggcaatccggggttt

SEQ ID NO: 88157 - DNA, 617 bp, Zea mays
  Clone ID: MRT4577_180399C.1
cgtcagggaggccaataagacttccgctgccgccatggtgaagacgacgacgactacgaccaataaggaggagctggagagcccgtcctacaggtagcagcgtcaagagcctcttctcggcaggaacagccacgctcggccgcgggcgccggacaccggcaacaggagcaagagggggttgggctgctccgcgccggccatctgcaagctcaaggacgacagcgtgcccgcgccgcccaaggaaaccacgggcacggcgtcggcaggcgagccctgcaagcgccgcgcgtccgtgagcgggagcagcgatcggtgcgtgaagaagccccagtgtggcgctggcagcaacaagcagctgcagcgtggcgggtcgtcgtcgtcgtcgggcgggtcgtcgatcagggccggcatgcagctgaggcggctttcggggtgctacgagtgccacatggtggtggcgggcagcgcctccatgagggccaccaccatctgcccctgcccggactgcggcgaggtgttcgtcaggcaggagagcctccagctccaccagtccatcaggcacgcagtgtccgagcttggcactgatgacacgagccgcaacatcatcgagatcatct

SEQ ID NO: 88158 - DNA, 531 bp, Zea mays
  Clone ID: MRT4577_18039C.1
ggtgagttttttttttttttttttgttttttttttttttttttttttttttttttttttttttttttttttttttttttttttccggggaacaaaaaaggggagccggggggaaaaaaaaacccccaaaaaaaaaagggttggggcccttttttggaaaagggcccccccaaaaaagggggggggggggggaaaaaaaaccttccccgggggaaaccccgggggggggttcaaccccggggggggccggagccgggtaatttttataaacccaggggttttgggggccggaaaattttcttcaccctttttttttttttccctcccccctggggggcccccttggggggccccatccctccccggggggagagggcttaaacgggccgcaccccccccggggggggatttttcattttaaggggtttttgcccgaaatttttgtttttagagggggtcttgggcccgccccggtttttggttgggggcccccttttccaaccaacccttttctggggcctaaaccgggggg

SEQ ID NO: 88159 - DNA, 123 bp, Zea mays
  unsure (1)..(123): unsure at all n locations
  Clone ID: MRT4577_1803C.1
gggggggacagccccaaagaacaancatattatttcagaaacaccctagacaaaacgctaaccatgagcattaacaaaatactgagaatgattagcaacactgctgggcgaccactaatagcc

SEQ ID NO: 88160 - DNA, 1125 bp, Zea mays
  Clone ID: MRT4577_180400C.1
ttgggtacctcgaggccggccggatctctcttaatagccatgtcgtctcactaacttccaacctcttaattgcaatctatccatatcatctccgtttaatttcattccagattctaagcaatccctgaagcaacacgcggggtatcttctagtaatcacatatgtatatgtctgcgcaggtacttggagttggcaatggagacaatcacatgagaatcatccaggaggacatcattgagacagtcaacaaccatcccagtgctgggtggacagcctcacgtaatccttacttttcaaactataccattgcgcaatttaagcacatacttggagtgaaaccagcaccacagaatgcactaagcaatgttcctgtcaaaacttattcaagatcactggaacttccaaaagagtttgacgctagatctgcatggtcccgttgcagcacaattgggaacatacttgatcaaggtcactgtggctcttgttgggcttttggtgctgtggagtgcctccaggaccgtttttgcattcacctcaacatgagcattttactttcagtcaatgacctactggcatgctgcggttttatgtgcggcgatgggtgtgatggaggctatcctatagaggcatggcgctactttgttcaaaatggtgttgttacggatgagtgtgatccatacttcgacccggtcggttgcagcatcctggatgcgaacctgcttatcctacaccaaagtgtgaaaagaaatgcaaggagcagaaccaagtttggcaggagaagaagcatttcagcattgatgcgtacagaataaattcagatccacatgacataatggcagaggtctacaaaaatggtcctgtagaagttgctttcacagtttacgaggatttcgcacactacaaatctggagtgtacaagcacatccccggtggcattatgggcggccatgccgtcaagttgattggatggggaaccagtgatgctggagaggattactggcttctggcaaatcagtggaatagaggctggggcgatgatggatactccaaaggtcgttatgttgctgatgccacatcactttggtcaagtggcataatattaataagaaccaccatttcgattcg

SEQ ID NO: 88161 - DNA, 274 bp, Zea mays
  Clone ID: MRT4577_180401C.1
aacacgagtccgcggacggtgggcgacgctggtcgagagcgcgtgagctctacgccgtgttgcaatggacacagcggatacgccgcaagttcctggaacgccagtgtatgggttcggtggagtcggtgcttccagaagtgagatcctggaagctggatgtacatctgcgtagtgcaatggtcctgccgcgaggtggccgtcgtactggaagcaggtgatcaaggtcgacgactaccagaagatccggttcgtgaatcgcgtcgggtcgtccatg

SEQ ID NO: 88162 - DNA, 1617 bp, Zea mays
  Clone ID: MRT4577_180402C.1
cgcgtgggcggaccatgggcggacgcgtgggcggacgcgtgggcgaagaagaggagagcgaagcaagcaggcttcgagaacaagaccggtcgtcccgtccgcgcttgtgtactgtactcgggcctggagcttgttctgatccgatcctgccttcctgctcggcgcccgcccgccccacttattcgattccatctcgtgttcctctgtgctgctgcagactgcagggggagggggaggaccaagcgaaagggggaactagagcaagatgggcggcgaactgctgcttgcgctcctcctcgtctctgctgctgccgcccctcaggtacttggagttggcaatggagacaatcacatgagaatcatccaggaggacatcattgagacagtcaacaaccatcccagtgctgggtggacagcctcacgtaatccttacttttcaaactataccattgcgcaatttaagcacatacttggagtgaaaccagcaccacagaatgcactaagcaatgttcctgtcaaaacttattcaagatcactggaacttccaaaagagtttgacgctagatctgcatggtcccgttgcagcacaattgggaacatacttgatcaaggtcactgtggctcttgttgggcttttggtgctgtggagtgcctccaggaccgtttttgcattcacctcaacatgagcattttactttcagtcaatgacctactggcatgctgcggttttatgtgcggcgatgggtgtgatggaggctatcctatagaggcatggcgctactttgttcaaaatggtgttgttacggatgagtgtgatccatacttcgacccggtcggttgcaagcatcctggatgcgaacctgcttatcctacaccaaagtgtgaaaagaaatgcaaggagcagaaccaagtttggcaggaaaagaagcatttcagcattgatgcgtacagaataaattcagatccacatgacataatggcagaggtctacaaaaatggtcctgtagaagttgctttcacagtttacgaggatttcgcacactacaaatctggagtgtacaagcacatcaccggtggcattatgggtggccatgccgtcaagttgattggatggggaaccagtgatgctggagaggattactggcttctggcaaatcagtggaatagaggctggggcgatgatggatacttcaagatcataaggggcaaaaatgaatgtggcatcgaggagggcgttgttgctggaatgccatcgacaaagaatatggttccaaacttcggcggtgccgttggaagagctatagtttaattggttacgtttgcatggcctcaaatgctgttggaattaactaaagtaattttaaaatgcaattgttaaatggccacgatggtgtatgtattttgtacactagctcattccaaaggtcgttatgttgctgatgccacatcactttggtcaagtggaataatattaataagaactagaatttcgattcgaatgttacggtttcaagtccgaccagatctgtgctctgatgatctccggccaccaagcctggttaaaaaatctgttgtaaaatgaaatcaagttgaaggggcgtacactgcaacgtctgg

SEQ ID NO: 88163 - DNA, 128 bp, Zea mays
  Clone ID: MRT4577_180403C.1
gggacccaacttcgaaaggaaaaatccgggctcaggggccacgacaggagattctccgacccttacacaacatttttccgggttctaggtacaaggcagttcttttacaggggggacgcaaactacaa

SEQ ID NO: 88164 - DNA, 457 bp, Zea mays
  unsure (1)..(457): unsure at all n locations
  Clone ID: MRT4577_180404C.1
aaaaccccgggccgaccaacccttccgaaaaaaaaaaaaaataaaaaaaaaattttttttaaaaaaaaaaaaaaaaaaaanggcggcccggtttaaaaaaccaaagttgccgtccccaaccttccaacttaatacttttttaatatttcaacctaaatcaaattaattgcccttcttttaacaccttcttacctttaaaacccctgccttacccaaactaaatccctttccacaaaatccccttttccccagtttccttataaccaaaaagcccccaaccaatcccctttccaaacatttccccaccctaattgccaaatggaccccccccttaaccgccccattaaccccgccgttttttttgtttcctcccactttacccttatcatttccaattcccttacccccccttccttttctttttttcccttcctttttacccactttcccctttttt

SEQ ID NO: 88165 - DNA, 119 bp, Zea mays
  Clone ID: MRT4577_180405C.1
attcggctcgaggcatcactcaccgacgttctgcagctggcaaccagaggcacggccgggcaaggcatgaaaaactgtcatgcgcccatgtcggaggagtcagtggagaacgcggcatc

SEQ ID NO: 88166 - DNA, 279 bp, Zea mays
  Clone ID: MRT4577_180406C.1
atacttcatagtctttttcatagcatcaattttaaaaacggggcaggggcaccggttcaactggaatgccctaaaaacataagtgcacaaagcatatcaaatttgctccaaaatatgttgtctggcattgggcttacatactttggaaaaaacccgcacaagacgtttcaaagtgatgtctcaacgcctatttccagtctttggtagtgggcttggcttcttattttcaaccatgttgtgcgtcctatgggggtacagtgtctctctcaggaacagggg

SEQ ID NO: 88167 - DNA, 216 bp, Zea mays
  Clone ID: MRT4577_180407C.1
gtgctgactaactataagcatgatcttgttaatgcatttttgatgggaagaaaaggtacatgtttacaaagaggttttatgaaaagaataaaaattgacttcttgcttgtacatataggagcaatactattatattatgtagtccgttaacactacttaaaagtttagggttttctcttgggtgtagagtggcccagaattgcattctgaatgaat

SEQ ID NO: 88168 - DNA, 366 bp, Zea mays
  unsure (1)..(366): unsure at all n locations
  Clone ID: MRT4577_180408C.1
cccaaaaaaccccgggtggggcggcgctggcggcggtgttgggggaggcggtgttggagcatgtgttcatggtgtgcgctcctgaatcgggccggtcggcgtgtttttgctgctaacgtggcagaatcgtcatctttttttttttttgncgcgagcaccacactgtatcttgtgggggaggggaattttttttcgcgggagcggttccttaagatctccgagaaaaccttttccacaggctcctccatcattgctgcccgtgagacggcggggngtgattccccgagttttttgactactacatccttaccgtcgagctccatgccttcagctagtgagctgccattttaggaccatggtgttcta

SEQ ID NO: 88169 - DNA, 180 bp, Zea mays
  Clone ID: MRT4577_180409C.1
ggggagccaccgtaaacccgggccttacaaaatggttaaacgggatcctaaaataattaaaaccctgctgctccccacactaaaaaacttcgggcccccccagcctttttacctgggataacataccttcaccaaaacccccgcatattggtgctaagaggggggttataaccccccacc

SEQ ID NO: 88170 - DNA, 500 bp, Zea mays
  Clone ID: MRT4577_18040C.1
agacactgatcggacgtggaagttcacataccttgttgttgatatcgtgtcaccaccacatgcaaaaacacaactgatgttagaatcttacttaccagcataaggatgcaggaaacagaggcagttagcagtgccatgacatctccgagattttggcacaaatgggaagctctgatagaagtggctaaactggggatttgtgaacaagtctaggcaagttgggaatttaggaacaagattgtcataatgtactaccatcaaaccagttttgtggagtaataaacggttcttacattactagaaacatatctggaaatgtttcgatgtttcttttagttacggggaaaaccccctgcatgcctggatgagggtattttttgttagttctcatgagtaccttgtatcgcccaaatacgtgggctaatccagcaagtcatcttttgtaaaatcatagcaacccttggctgttaattcattttgtctggatttggtttccaatt

SEQ ID NO: 88171 - DNA, 368 bp, Zea mays
  Clone ID: MRT4577_180410C.1
agggttcattcttatggttttttctttttatacaaaaaacgcccctggcaactttttatattgcaacaaggcccaaatgtttttttttcaccgggggagaggtctccaaaagaaacagggactcattttggtgcaaggcctgtggctcctggagggaattccccaaggtctagggggggtgcacataaaaccgtaaggcctggacaaaactcaggatgattaacctgttggggccaaatggttagtaaaaaaacctaggctggtcttaatggacagaaacatgacctttaaaaaaatgtggattctatacaacccatctagaacaaagagatccttttttttttatcgcggagtaggagaacctgctt

SEQ ID NO: 88172 - DNA, 198 bp, Zea mays
  Clone ID: MRT4577_180411C.1
ctataggtaaagctggaacgcctgccggaaccgggcccgaattaaataccgggtttaccaggttaatatgttgcgggcggcctttttttttttttttgggggacgaacaaacataatatttagattaagttatagggaatgcatgccaggaagttatgcattgatttactaagatgtgtactaaacaaaaaatgaaaa

SEQ ID NO: 88173 - DNA, 158 bp, Zea mays
  unsure (1)..(158): unsure at all n locations
  Clone ID: MRT4577_180412C.1
ccccggaantgagctggtccttcgcttgcangcccggcgccgccccggcgttgatgcgtccggcagcttcgtcccccagtctctcttcacgggccaaacccggccctcgatctacgcaccaagcgtggccaagacgcactcgcgcgcacgacgcagca

SEQ ID NO: 88174 - DNA, 237 bp, Zea mays
  Clone ID: MRT4577_180413C.1
cggatttgtatcctcgccagtcgactggccagggagcctataaccaatttatgtaggacgccaagccgaccacgactactctgccgtcctctcaaacatcgtctaggaccttctcccatcatcatccccctccatctcttctgcctcctcccacataaccctaccgcaagcccaacccctgccacattccgatacccatacacaacagcagctgctgctggccctggccactaagct

SEQ ID NO: 88175 - DNA, 530 bp, Zea mays
  Clone ID: MRT4577_180414C.1
agggcttcaccgtgcctccgccccggtgcccccggcctccaccgcgcgtctacgctcctgcctcccccctcactacacgttcacctcccctgcgacccgccccgctcgcccccaccgcggccgatgttgcgtgccatcaacgcctacgtccccttcctcagagacagtggtcgccttgcccatccctgcaaggtacatgaccccatccactcttcctctgccccatcacccccaatcccagcccccctcctgaatctcatcgcagatctatagatcaagcaaggagatacgcagatcaaccggctggtgaaggatccgtgcgatggcagaccgggcgcggcctgcagcggagacggggaggagccccttcactgctgtgcctgccggcgttgctttgttctgcccgtgcggtggcccgcgtccgcacgagatctagaccagacgccgaggccacgacgctttgcctgtctggtcttcgacccctgattggctgcaactccacctttacctgcttggtgatagacaaaggt

SEQ ID NO: 88176 - DNA, 407 bp, Zea mays
  Clone ID: MRT4577_180415C.1
gaccatgtatacaatgcatatctcgttagggctcttgtcttctcacacacttatgcttgggtggatacaagtttggcgccctctggggcgttcttgttgccgggtccgtaccagtcggcaaagccaaagtcggttccccaagctggggtgttgactctctgctgcttgccagcggcggcgagtccgtcaagagctttgacgtcctcgctgtcaagcttgatgaccttcaagttggactcgattcgagatggagtgacactctttggcagaacaatgacacctcggttgacctggtacgagatcaggacggtggcgggctcgacgtcgtgctttttggcaattctgacgacttcctcgtctttactcaatggcgaaccggtcgagccgagcggggagtaggcctggag

SEQ ID NO: 88177 - DNA, 298 bp, Zea mays
  unsure (1)..(298): unsure at all n locations
  Clone ID: MRT4577_180416C.1
ccgccagtgtgctggnattcgctccttagcagtggtaacaacgcagagtacttttttttttttttttttttttttttttttttttttttttttttttttttaaaacaaaatttgatatacctttaaattctgaaggggtttacaaaggatttttgggcagaaacagcaaaattagggggaaaaataaaattcataggggggggggaaaggctgtctttaaaatctcccccaaagccccgtttactctgcgcggttaaccctgataaagggaaaattctggatccctccctgccatcgc

SEQ ID NO: 88178 - DNA, 1666 bp, Zea mays
  Clone ID: MRT4577_180417C.1
ccggccgggctctgaccactgacgcgtggcccattcttcccttcatcaaccacgcggcgccggagcgagcctcctctagtctagcgccgcctagggtttctcctccgccgtgtcgtcaccgtccacgcgccattgcaccatctcgatcgcgcgtcctccctgccatcttgcagctttcactgattcaggaccaggtacccgtcactattatgctcccgccgagcgatgcgtagaagtcgccgctcgcaggtctcgctcttccctacttttcccgccggcccgctgttccaggcaatggccaaacttccggtacttgcacgcagttccatcaggtcgaagcctaacgaaaacatgaggctcgttgtagtaacgatcgttggtgcggtctttggattccttatcggaatctcgttcccgacagttaacataacaaaacttcactttccatctagcatcgtctcctacatagaggacaagaactctggcatctcagctcaagctatacttaaccatgcttggactgcggccaggaacgcaaggggaaatggctcccaaccaatctcacttgacaacttcaaggtctatgtaccaacaaaccccaggggtgcagagagcctagcgccaggtattgttgtgccagagtctgattttcatcagcacaggttatgggggaacccagatgaggacttacccttcaagccaaagtaccttgttacttttactgttggcatttcacagaaagataacataaacagggctgtcaagaagttttcgaaggattttgcaatcctgttgtttcactatgatggccgggtgactgaatgggatgaatttgagtggtcaaagcgagctatccatgtaagcgtccggaaacaagcaaagtggtggtatgctaaaagattcttgcaccctgatatcgtggcagcctatgagtacatatttatctgggatgaggaccttggagctgatcattttaatggagaggagtacattaaacttgtgaagaaatatagactagaaatctcacaacctggtctagagccagataggggattgacatggcagatgaccaagagaagaggtgatcgtcaagttcacatggttacagaggagagagaaggctggtgctctgatcctcatgtccccccgtgcgctgggtttgttgaaataatggctccagttttctccagagatgcgtggagatgtgtctggcatatgattcagaatgacttagttcatggatggggtctcgatttcgctctccggaaatgtgtggagcctgctcacgagaaaatcggtgtcgttgattcccaatggattgtacaccaagtgattccttctctcgggaaccaggggcagtcggagaatgggagggcgccatgggaaggggtaagagagcgttgccggaaagagtgggggcttttccagacaagaatggcagaagctgagaaagcatattacgagatgatggggattacacctccgaatgtaacatttgtctcctaggataaaagtttcaacccacatttttttttcctttgtgtccagcagtggctcttcgaatagagttagctattgatgaatggcacaagtagatcatacgtgacgatatatatacatatagatcctttgatccttcgaaaaaaaaaaaaaaaaaagcggccaa

SEQ ID NO: 88179 - DNA, 886 bp, Zea mays
  Clone ID: MRT4577_180418C.1
aacagggttacagaggagagagaaggctggtgctctgatcctcatgtccccccgtgcgctgggtttgttgaaataatggctccagttttctccagagatgcgtggagatgtgtctggcatatgattcaggtataacacagtttcagtgtctgcacttggcttggtttggttgatatcttgtcgttcttgcagaatgacttagttcatggatggggtctcgatttcgctctccggaaatgtgtggagcctgctcacgagaaaatcggtgtcgttgattcccaatggattgtacaccaagtgattccttctctcgggaaccaggtaaggaagaaaaaaaagaaacaaatgtgtacaatcagattctactgtagcgccttaatagcatcttcaaaatgcacaggggcagtcggagaatgggagggcgccatgggaaggggtaagagagcgttgccggaaagagtgggggcttttccagacaagaatggcagaagctgagaaagcatattacgagatgatggggattacacctccgaatgtaacatttgtctcctaggataaaagtttcaacccacatttttttttcctttgtgtccagcagtggctcttcgaatagagttagctattgatgaatggcacaagtagatcatacgtgacgatatatatacatatagatcctttgatccttcttcctgtgtatttatcgcgggctgttctcactagggttctggtgaaatgcgaatgatatgtctgttcagtttagagcttatattctctaaacatgaacattcaaaatcgacagcattgtgcgcacacgaaaattctgcagaaaacatttcagacggacaaggatggccaaagtatggcacttcattgtatatatgtaggt

SEQ ID NO: 88180 - DNA, 503 bp, Zea mays
  Clone ID: MRT4577_180419C.1
cctgccgggagatttaccaacttttgtgtttctcgcgccgccgtcgtcgtcgccgtgacgtaaggaagaggaggagcacggagcacgacacgatgggccactccatactgtgaggcactcacaccctacgaactacggccctggctggcgcatctgccgggtctgagcgaaccctcacgggatgatcatggatagacgggatcatgtgctgtaggcagtgctgccgcagcaacgccaaggacattggttctatcaaggaccgctgaagaggcacactgcgctgctgcggagaacttactacatcatagaaatggggccttcattaaaaggcctaatttatgcgctttagctttttgttcataacttgagactgatgtggtaaactagactcgttaaagttttgatggctactttgagcttgatggaccagctataatcaaaagattgaaattttctcactcatgatgctatgatctaaaaaaaaaaaaaaaaaagcggcccta

SEQ ID NO: 88181 - DNA, 306 bp, Zea mays
  unsure (1)..(306): unsure at all n locations
  Clone ID: MRT4577_18041C.1
ttggggggattggattatccctaagggtcaaggtactgttctatgggttcaaaccgggccatattggtttgctcgcgctattcggcctgtgtccaattttaatgagaagggtctgcattttatatgagtgtgtttatttgcatttgggaaatgtgcggggaaaagggaaattcctcgctccatntttttttttgtgtgtacttttgtgatgcgcgctctagaggctcacacagttgaaacaaaaaaacctgctgatatacccttttttggtggggctggagaacatcaagatgattttgttcctga

SEQ ID NO: 88182 - DNA, 961 bp, Zea mays
  Clone ID: MRT4577_180420C.1
cattgggtacctcgagaccggccggggccacaagtgcattccggccccgtgagtaatcgtaacagaggatcgctagctagtgctaccctgtacggcgcagccgcgcaggcgcagccatgagcaacagcggcaggtggcggaggaggacgaggtccgtagccccttcgccggccacctcttctccgtcgtctcctggcctccgagaagcgcagccgttccggcttccccagtggaagttctcccaggtcctcggcgaactgccgcccgcggccgaagcccgccgcgacggcgctccccgtccgcaggacgacgacgatgcggacgaaatctcggctatcgagttcgacggccgcggcgagtacttggccggcggcgacaacgccgggcgcgtcatcctcttccggaggactgacgacgacggcgacggcgacgacgcgcggcctcgcgcggagcttgagcgcacggaccgtgccgaagcgccgccgccgaggtacagctacgcgacggagttccagagccacgaacgggaggttcgacgtgctggacagcttggacatcagcgagaggattaagaaggtgaggtggtgcgcgcggcccaacagctccctgctcatgctcgccgcgaacgaccgcacggtcaagctctggaagggcaggtctccgaacacaaggcggaggcgccgaagaaagggaacggtcggccgagttggggcaccacgccgaggggttgttcgtctgcagagcctgacgaacgtcctgaaaaggtagcaggcggtgtcggagatggctactctgcgaaatgccggagagtcttcggccgcgctcacgagttcaacatccactccgtctcgaccaactgtgacgggggagacgctggtgtccgcggacgacgtgcggatcaacctgtggcacgcgggagtgacgcgccagtgcttaacatcgggggcatgaagcccgcggg

SEQ ID NO: 88183 - DNA, 346 bp, Zea mays
  Clone ID: MRT4577_180421C.1
cccacgcgtccgcccacgcgtccgcccacgcgtccgcggactcgtgggttttttctttttcgttttcgtttgattgctttttatgctgtttatgttttttttggtggtaaatatattttcattcaaatgggaaatagtgagttccagtcgtgacaggccaaaattggatcccgtggcattcggccatagtatgataacctttaactcacgattattacgggtcctgaggaggatacaaaagggcttcggatgtacaatcagagcttgtgtgactggacagtttgcaacatggggtgaacaattcaccatattttatccaagttcaattccgagattatgggtcaaa

SEQ ID NO: 88184 - DNA, 370 bp, Zea mays
  Clone ID: MRT4577_180422C.1
caaggcgctcgaccaggcgtgggccatcagcaaggccgacacggcgccgtactggcacaaggagctgaagtacacgtacgacacgagcgaggcgctgtttggcgcgggggcgcaatagagtaagacagggaaaccaagaacagaagatgtacactcaaaggaaaccagaacctgacccccggctcgaaccggacagtgactgcaccaaacaagagaagaaagaccccaaagcaccgtcatactcgaatcgctccgagtcccaagtctatgtctaagtctatcattgtgagcaaacaaagaaaaccagatcattatatcctaccccccgtcctgttacacactccttaaccgtcgtgttggccgtgacttg

SEQ ID NO: 88185 - DNA, 219 bp, Zea mays
  unsure (1)..(219): unsure at all n locations
  Clone ID: MRT4577_180423C.1
aggtaacagacccaccaattactaagacatcatncagaaccaactgaccaaaaccaagcattgacacctaactaaaacaaggcggccaaccaaagaaaggtgaaagcaaaactctgaccaaaccacacacgcgaaaggaaccaaaaaaaactggacctgcaagagccctcccaaccaacactacacaaaaaaccttggcaagacaagggaaaaacagca

SEQ ID NO: 88186 - DNA, 315 bp, Zea mays
  Clone ID: MRT4577_180424C.1
gccacagcgtacggccacgcgtgcgtccactcgtacgaccacgcgtgcggccacgcatacgcatttgttcaggtgaagctggtagccgtgcaacttggagtaccaggacgagttggtgctgtggacggagagcggcgacgtgggcaagggcttcagatgcatgcgcatggtgaacaacatacgactgaacttcgacgccttatacggctacaagggccacagcgggttgctcgacggcaccaccgtggtgctgtgggagtgtgccaaaggcgacaaccagagctggaagatcctggcatggggcgacgaggacta

SEQ ID NO: 88187 - DNA, 280 bp, Zea mays
  Clone ID: MRT4577_180425C.1
acgcggccttagcgtgaaacaacagacgatgttcaagcaaaaaaaaaaattaaaagacacatttcaaaaataagtttgtgatttaaaaaaaaaaaaaaaaaaaaaaaaggtttgcccctgggccgggccccccctaggggcgatttttgcggctttccctcagcgcgggcggccgctccagcctgcttttggggggcccaattggccctttcggggggcggtttccatttccctggcccccgttttccaccgctcggggggggaaacccctcccgccccc

SEQ ID NO: 88188 - DNA, 709 bp, Zea mays
  Clone ID: MRT4577_180426C.1
atactgaccccacataggttcatatcgtcttctgcgtgtacgtagttgtttcttcttcaattctctttgtagaggttcttgggcagctcagacaccagctcgtcgtcgagctccccgaggcttgccgccgcgctgctgcagcatggcgactgcagtgccaaggacgatggtgtggtgggatgacagcggtgagagggagggaggatctggagagaagcacaaggaccaagaagaggagagtgcgatggcatatatatttttctatgttcctgtagcgtggctaggaagaatcgtcagtcatcgccccttttaacttttccaaatgcagagaaactctgttcctttaaattgaacctcttctctacgttctgtgtagtgaaactctcatctaactgagctttgttccttcgtttgatttcacatctttttttgattcacctgatgcacaagtgtcagcgtcagacgtggacatctagctaagatctgttcttaggccatgctattattttgacagcaagatcctatggccgaaattgtgagactgaccagttgcaatgtcaatgagttagagtatttaagggcagaagatatgaaggaacaaccctatgaggcaaaacgtgagttgacaaaagaccccgaactctactgcactgattctgtgtcacccttgctgggcttagcacaggttatggccaacaggtaagcattt

SEQ ID NO: 88189 - DNA, 644 bp, Zea mays
  Clone ID: MRT4577_180427C.1
acacagccttgtaatctgcgattgcattgaccacacaggcacaccggagacagcgagaggtacccgaccacttggaaccgcctagcgaccgccatatgctgtggacatgattaccgagacaaggcacggccagaactagagctaaaagcaatacagaccttgcagagaagagagtgtgagcccaccagaaaatatgcattgatccctacaaggcaggatataccttctttccagccgtgacaggcccgttcactcctcgctccactgcagatccactggcgatcttatactatgttggacctgctcctttgctggatatggactggctgattgctacagcctatggccctacttgctatactagggattacctgttctcactgtagaatgcctttgccagattctgtcactaagattactctatcttagagccagcgcacgaagtgtggtaagcgctcacccaaccaacattcaccaagattactcgcgccaatgcttgcctgaaatcacatgcccttcttgtgcacctgtcctcgcttccagactgcactccctgtagactcgagatagatagagccttgtacgatgaacctctactcggaattgacttccagctgttgcatgtctgtggtcatcatgtactg

SEQ ID NO: 88190 - DNA, 328 bp, Zea mays
  Clone ID: MRT4577_180428C.1
tctagatcgcgaggccgccctttttttttttttttttttttttttttttttttttttttttgttttttgttaaaaacaggagcaaaataagacaattattttttattacaagaagaataattgttgttattcccttcttatttccacacccgcgttggaacagtaggagcctaaacagttgccttggggggcagggcgatgatattaagtaattaatgagataccggatacgcaagggccattccattgggcatgacggggggggggaacattaacttgctcatgttacgcaactttcttggggagcccatgatgagggtaatgagga

SEQ ID NO: 88191 - DNA, 397 bp, Zea mays
  Clone ID: MRT4577_180429C.1
gcgtcgcatcggcggcggcaagggcaataatgccccgcgactgcgacagggcttgcgccttcgcggcgggcgacggcagtgccggcgccgtggacgaggacgacgagcaggccaagaccgccgacgtgttcggcgggcggaccggcggcggcggcctcttcggcggcgtccacggcccgctgggcggcggcgtcgctgggttcggcccgttcggcggggccgtcgccggcgcgggcccgttcggcgggttcggaagcggcggcggcctcggtggcggaagaggagcaggtggcgccggcgtcccgtgaggcgtgagcaacgctgtgcttgtgcatggccatggatgcatgcgtgcgtgcgcgtgtaataatgtgtctgtgcggtacgactgtacgta

SEQ ID NO: 88192 - DNA, 597 bp, Zea mays
  Clone ID: MRT4577_18042C.1
gacaaaagtaccagtagacttgctgctcactggtcactgccatagacttgaaccagacaatgtcacaatgtaaaacaagtgcacaggcacaacacactagcagaagcgtacaacacactataaaatagtaccatatttaaagtcttaaaccacttgagtcagacacaaacataacaagtgagccagacacaaacgaagtcacaatctacattttttattaaattgtagatgttccaagatcaatagagttgctttcgattctgattgtcacatttgtctttgaacttgcagcttgtttcactttcccgaattcttcaaacaattcttcttccaacttggttagttcttcaatattctctgtaatgtcaactggtattgtccatcttagccaatcctgtgtacaaactagagcttctagcatgaatggagtaagagagctgcaaaagtcatctaaaatgcgtccacctgtgctaaaagctgactctgaagctacacttgagattggtatagcatgcacatcacgagctaagcgagatagaatcggaaacctttgctcagatgccttccaccacactagaagggcaggcttcattttct

SEQ ID NO: 88193 - DNA, 269 bp, Zea mays
  Clone ID: MRT4577_180430C.1
gagtacttggattgtgcgatgctttatacatttgtttgttctagcagagtttgagtttatatttctattcttatgtagggcgtcacgagtgtcgtcaattgttacatccttacatccttgtgttcacaatatgatccatcaactctttcttctgcggtctcttatccctgtgttctcatgtccatgtttcctgcttcttgttgcagttaaagcctgaggaggttgctggtatcataaaggactttgatgaacctggtactcttgcacca

SEQ ID NO: 88194 - DNA, 215 bp, Zea mays
  unsure (1)..(215): unsure at all n locations
  Clone ID: MRT4577_180431C.1
catcctttctccttcaacaccaacaagcnactaacagtgggtttttatagaaagcgaggcaaaaaaaaaaataaaacatctaaaatatactccatcatcttccttttattaaccctaccattaaatccatatatactaattatatatccttcacttctcttatacccctcttttacatcactaaccactcaaactatttttccacttaaacatac

SEQ ID NO: 88195 - DNA, 334 bp, Zea mays
  Clone ID: MRT4577_180432C.1
agcagtggtaacaacgcagagtacgcgggattttctattgtattgtacgcagcgatcgagaccctgttatactatggctctgaaattctgtacctgtgtattatgtgatgttaactgccgtacctgtccataatataggtctcatgtactttgttgaagtctttgttggaatatacatgacagaattctctcattgccttgcctgtgtataaggacgaattccatctatctgactgaacggtgctagaggatccatgattctttccattcaccactgattaatggcgatggctagtcccttgcataaaggatgatgtgcttactatttcttaca

SEQ ID NO: 88196 - DNA, 712 bp, Zea mays
  Clone ID: MRT4577_180433C.1
gatttcccaacacagctcgctcaccacatcttacagccatcggaatcaacagcagcagcggagcgatttcatcgactaacaaatcagcggacatggggatgccggcggtgaggaggagggagagggacgcggaggcggagctcaacctgccccccggcttccgcttccaccccaccgacgacgagctggtggagcactacctgtgccgcaaggcggccgggcagcgcctcccggtccccatcatcgccgaggtcgacctctaccgcttcgacccgtgggcgctccccgaccgcgccctcttcggcacccgcgagtggtacatcttcaccccgcgcgaccgcaagtaccccaacgggtcgcgccccaaccgcgccgccggcaacggctactggaaggccaccggcgccgacaagcccgtcgcgccccgcggagggcgcaccatggggatcaagaaggcgctggtgttttatgccgggaaggcgcctaagggggttaagaccgactggatcatgcatgagtaccgcctcgccgacgccggccgcgccgccgccagcaagaagggctcgctcaggctggacgactgggtgctctgccggctctacaacaagaagaacgagtgagagaagatgcagctccagcagcagggcggagaggagatgatggcggaacccaagcggagaacacgcgaccgacatggtggtcacctcgcagt

SEQ ID NO: 88197 - DNA, 549 bp, Zea mays
  unsure (1)..(549): unsure at all n locations
  Clone ID: MRT4577_180434C.1
tggggaccctccgggctgggcgggatccctttctcttctccattccttccttcactcccccgcccagcgccaccatggggggcggcgggggggggtccctccgcgccctcgctgccgcgccgcgccccaagggcagccccgccacttcctgccccttcttcgtgcgccttgcgccggggctgccccgacgcctgcgccgcctccgctccgctcgccgcctgccgcgcgccccgcggggggcctccgactccgccttcgaggcctccgggggagtgaactacgcggagcccgacgactcggagaaggataaggaggtgggaggtggcggatcgggtgacgacgagggggcgggtgaggtggtggatgaccattccgtanaggtctcagggcgggtcnaggacgaggtggaggaggagggcngggagtaccttnagccgcccgaggaggccaagggctacggcggaaacctgccctacgacggggacagggagcgcctcgctcagctcttcgaccagggccgggtgcgacgagggcgcagagggcatttac

SEQ ID NO: 88198 - DNA, 536 bp, Zea mays
  Clone ID: MRT4577_180435C.1
aaatcccgccctgctatccgtgtatgcgaatcaacaaatgttgggatcagaagtatcacaacactataggctgtaactggacccgacattacttaattttccagtgcatcggggcaaggttaacatatacattcacgtggacacgacccgatattcgccctatccaataggtgtccctcaagccaacgcccatgcagacacctacacattaattctatgcggacgcctagcacactttgacataagtgagctacctcttataacactctggacgaccacaaccgccaacaaaggccatcatgtgatggtcaaacacactgacctatgacttgatctttataaaaggtgtcctctaccatacccttagggaaaacccttttgaccataccagctttaccatgaacagagaaatccgggctcactaaaaaacttttattctgacaccctatgaatcttgtcgagcaccatgcctgacttgaccatggtgggacgacatgccacacagcaatactggtgcatacatacatgtcactcat

SEQ ID NO: 88199 - DNA, 351 bp, Zea mays
  unsure (1)..(351): unsure at all n locations
  Clone ID: MRT4577_180436C.1
gcaaagcggcacagcgnagcgagactccaagaacagaacagcaacaaagggggcacgaacagaacagcgggcaagggggcgncagctgccagcgcccccgcgcnccagcagcccccagcgcccgcgcggcgcaggggcccggcccgcgcgcggggcggcagggcgacgacggcgggcgccggcgggcgacgccccngcgcggagccggcggggcagccccagngcaacccgcnggcggcggcgccccacnacgccgggnnggggcagacgagcgccangnaccagccgcnccggcaacagngcngccagcagcagangagganganggacgngcagnccgncgcgcagcag

SEQ ID NO: 88200 - DNA, 403 bp, Zea mays
  Clone ID: MRT4577_180437C.1
ccgaaggaccggaaatggaaaaaaaaatttccgggggccaaatgggaaacttttttgggaaaaaggcaaaacccccccccctaaccgaaaacaccccccctttttgctacaaaaagggggcccaaaaagggcacccaaaaaaaaactttttaagtcccaacgggttaagccccccggggcctcaaaaaaaaatcctcttttgcccaaggtaggggccccccgttcctattaaaaacccaaaaaacccgggccagggccccctttccttttaaaaggttccaaagcttgggtttttaagggccacagggggaaatataccatttccggaaccaatcccccccataaaattacccaggacgggaaaggccccaatgcctccccccccaaattccgggggaggggg

SEQ ID NO: 88201 - DNA, 895 bp, Zea mays
  Clone ID: MRT4577_180438C.1
ccctgcgtgctccatcgcgccgccacccagagtccttccccagcgccgccctctccctgtcggcgccctgctggccggcgctccctccagcccctccccatggccgagcgcatctccatggtggtcaggagcttgtcccatggctgagctccctctccatggtcgcgctcctcccctgctccatccatggctgccgtcgagtctccctggacgggctcaagtgccatacgccgtcggctctagtctccagctcgcctaggtcggtgttcctctccctctcctaatctccatggccgctggcgctcttgctcgggtccatggtcgcgaaattcggcacgaggcggtggtggcggaagcgaaggcccacgccgtcgccgtgctcacgagccagcgggaaaaggcacggcagaggacgatggcaactgtccagcgcacacttcaggcaatggatgaggacaacatcagagatgagtctagaactggaaggctcgtcgtcttggcggcgctggccgccggtgccatcagcatcggcaagcgcatgcccctgctggcgccatctcccccgtcatcttggcggcgctggccgccggtagggctggaaaaaaagctcgaggctcgcgagccggctcgggctcgctcactaacgagccgagccggctcggtgaggctcgcgagccggctcgaggctcggtccaaactattacaggatgatgggatgcttgtgatatcgacagttcctggttctcccccaacgctgcgcatcaaggctgttgcattagaaaacttctgtccaagagcattttcattgctgtcgatcgccggactatctgggttttgctagatataaagttgctgaccctcgaatggaattcaaatacattgattagtgttgctg

SEQ ID NO: 88202 - DNA, 410 bp, Zea mays
  Clone ID: MRT4577_180439C.1
tgttttttttttgacaatgaacacaattatcccttgtcgattgaacaatagtttacatcatggtacaaacggaaaaccagcgtgcgctcacatgcatacggacacctaaaggtcaccggcggggcctacctaacttgccggggaccactttggtggcacacgcccaaacgttgttgttgacaggaccggcggtgtggtccaaacggttctaaagagggccctccccggggactatggcctggacgaagaatgcgaacatggagaacatggcgaggcggccgctcttgagctcctcgaccttgacctcggcgaatgcctcaggcgccgcagcgaggccaagcgggtcgaagctgccaccggggtagagcggatcgacgacctcgtcgagcgggccgacagcgatgcagtag

SEQ ID NO: 88203 - DNA, 1153 bp, Zea mays
  Clone ID: MRT4577_18043C.1
cggcgagcggggcttcctggaagctgccctcgcgcccgccgagcagcaaccaaccagcaaccgaggtagggggggcggcctgtagtgtagcgccccccgactcccgagcagcaaccaaccagcaaccgagccagccatgtcgcccacccctgcgccggccgcccgcgccggcgaggagctgccgtccactgaggtggtggtggtccggcacggcgagaccgcgtggaacgcctcccgcgtcgtccagggccaaatggacccggagctgaacgaggccggcaggcggcaagccgtcgtggtggcccgccggctgtcgagagaagccaagcccgccgccgtgtactcgtctgatctgcggcgagccgccgagaccgccgagaccatcgcgagggcctgtggcgtatcaaacgtggtgctgacggaggcgctccgcgagaggcacatggggtacctgcagggcctcaggtgggacgacgcggtggacaagagcccggactccttgcacatcgtcaaggtcatcgagggctctgaccccgacagcagaaaccaggagctgcccggcggtggagagagcctgaaccagctgaacgagcgttgcgtctgcttcgtgaacaagatcgcgcaagaacacgccggggagcgggtggtggtggtctcccacggcgcagcgatactggagctctgccggcacaccgacccgccgggcagctgcgtccgcaggcacgtccccaacacctcgctcagcgtcttccgcgtctccgccgccaccgggcagtgggcgctcgagaggtgcggggacgtcggccatctcaagggacacggagacggagacggcttcctggagggctcgttcgggggcgacggggcctcggcgtaaacgtacgtacaggccgatcagccgagagctcgcaccagtcttcctttggatcgaaccattctttggttccgatgctgtttggagcttgtattccattgtttttcaaaaagagaaccaaccattggagtttgaaacgttgatcaatttgtggtttacagccttttgctgtagcgccatgcatggcgtttgacaaaactgcggtatctctgagaaaactgtcttcaaacagcgtgatgcatagctctatcaatctgtcattgcctactgtttgcccct

SEQ ID NO: 88204 - DNA, 220 bp, Zea mays
  unsure (1)..(220): unsure at all n locations
  Clone ID: MRT4577_180440C.1
cagcaaacagcacctggctccgttcaccgccttcccttctctggtccnnttccggcctcgcgcggtcgctcgctgtcntaacacaactcgtaaaccgccncccccttcgctctacgccaggtgcctaggtctagcttcgtcgtcccttcgcaacgcgagcacccacccatgcagatctacccagagtcactagaggctttgtactgtctatatgcactta

SEQ ID NO: 88205 - DNA, 383 bp, Zea mays
  Clone ID: MRT4577_180441C.1
ggccggcccgcctgcaggagccgggccggaatatattgccgggacgactttcctactagtcggcggccgccctaatggtttgagccccaatgttcaggccaaggatacggctcccatcttactgcataaaagacaacctaagcgaaatcacctgacgccaggcctacacaggttggtgtatgcaacgtctgtcaatcgccgatgcacaccgaggacgtagcatctaggcaccagaatgcctgctatgatcctgtacaaggagaacgctcaaaccctctatcgccctgacactgctgaatgaatgaatcctacgaggaccacaaacacatgctcagggctaggccagccgaaagcaatcaggatcgagcgccagggtaccaacc

SEQ ID NO: 88206 - DNA, 868 bp, Zea mays
  Clone ID: MRT4577_180442C.1
cattgggtacctcgaggccggccggggagaaatagaaagctcaaagccggctaccggccagccagattgcagagctgagcagctgacgacataactcacccacatggtcattcactcatcgtgcctcctctagtattgtagcacgtactaactaccccctgcccagcgtcgcgtgtgctgcacaacacgcactcgctcggctccaccgctgtgaccaggctacctctaccctcatgccgacgctgtctccgctccgaccatgcttctccgactctaacaagcgctcgatgcagaccaccgtccggatctgcctcgctactcatacgactcacagccgtgtagcgtgaatcacgcccatgtggccgcctcgtcgacgcgtcgacgcgtgcccggcagatctcgtagagcgctgcacggccatcgtcgtcctgccgcggcaagacatgcccgtgcctcgccaaagtcatcgcctagtcgtcgccatcaagcagggagccccaccgtgcacgttgtcgtgcgtccgtgcttcatcatcgtcgagctcgtcgtcagtcccggtcctatgattttgagggcccccggcaaattgatcgtgctccgtggaatcctgcagggttggatcggcgagatgacgaacgacgatcacgtggaggatgtggtctcatagacgctcggggacgtgagcgtgacgactaggcagtgggcaacgcgtgccacattgtccgtgtgcaccgggcgtcagtgtgcccagccttctcgccctattggctacctatattattttactactagcatataacccgtgctaacgctacattcctgtgaaaaggaggaaaggggtggaccatgacggtggtggcccaagggg

SEQ ID NO: 88207 - DNA, 206 bp, Zea mays
  Clone ID: MRT4577_180443C.1
gtaagctcgtaattcggctcgaggtgattcacggaactttgttggggccgggggacagacagctagacggggggattttatcggaactttctgtcttctttctcagaaactaaggggcactttagggcattgcgaatcactttccctacgttagctgacgggtattcatctgtacactatacacgagccactgccacacatgctgt

SEQ ID NO: 88208 - DNA, 915 bp, Zea mays
  Clone ID: MRT4577_180444C.1
cgtatctgtgaaaacactttcttgctttctaggatttacctccatcagttaaaaaaaatagatactttatacacctcttcctagaattttaaggaattttctttgttacatcgaattctgtcaacgcggcttgcgtaaactggtcgctttgctgtaacgaagtataaccatatacatattaaccacaacagaacagcaattccgtagtcgcattgctctgtctccggtatgtatactgggataatatgtacagggcattcttgcgatgctgtttacacacaatcctagacagaccttcgtgccattccaatttccagcaaaaactcaaggtcatgctagaaaaactcaaggtcagagtttcagctgccccatatctctcgtgtcacttccagtgccctcgtcgtacgcatgcgtgtggtctggatccctcctcagggtgaagcttgcttcctcggcttcggggcagcccggcctctcggtaaggaactgctcccagaacttgtcgttcaccaccacctggggacctgtatgttcttcagggggagcttggctgccccgatgcggcctacccgttgcatctgctgcggccccagcgtgacctgaagcctccttctggttctgggtagcatcatggcatctgtcaggcatgccgtcgtccttctccatggtgggtgtggtcacctccggtgggccatccttctcatccacagtgttcacgtttgcatcggggatttggcttctgaccacatccattggacatgatgcaaggctgaggttgaggtggcatggcaagaacccgtcgtcatttgcagctgttgtaaagctcacactcttcgagggacagatggatgttccagtgtcagaagctccatcatctgtcgacgcggccgcgaactcggcttgcctgttctcttg

SEQ ID NO: 88209 - DNA, 289 bp, Zea mays
  unsure (1)..(289): unsure at all n locations
  Clone ID: MRT4577_180445C.1
gcatatcatttcgtaccanacaagcaatgaatcctacgangggtcatnncagtcttcttaatgatttcgggcnanggatgtggtttcagttgnagagaacntannnntnaanncgctncatccggcaggtggttcccggtggagatgacaacgatntggagctgaacgcggagtcccacttcctgagcttngtgcagcggttcgggcaagtntacaaggacgcngacgagcacgcgttacnggctgtncgttttcaangccaacctgcgcngngcggannggcancagc

SEQ ID NO: 88210 - DNA, 555 bp, Zea mays
  Clone ID: MRT4577_180446C.1
tcgtgcggccgcccgggcaggtaagctttttttttttttttttttttttttttattttttttttttttttttttttttttttttttttttttttttttttttttttttttttttttttttttttttttttttttttttttttttttcaaaaaaccaaatgggccccctttttcttgggggggcctttgccttaaccaaaaatattttttttttgggccgccagcttatacccactttaagaggaggggccccccctttgctttttcctggtgggggggccggggccccttgcaaaattgggggcccaaggggccccttccttttagcctgataggggggggggggcttgcctcccttcttggcgcaaaaaagggtgcttccttttttccaacaaaaagggagctaaccccggaacccttttacggctacaaggattggtgtctttttgtgcaacatgatttggcggggccagggggccccttccgaaaaaaaggaaaaagtggggccctctttaagattggttattaattgggattcaataataaagatttttgg

SEQ ID NO: 88211 - DNA, 208 bp, Zea mays
  Clone ID: MRT4577_180447C.1
cacggaggtacccctactttaaagattgcatgatgcggcatagacctaacacatgatttgagcctggtggacctaaggaaatcagacgctagcattacgctggctgcgaagagacagacctactcaatatgtcatcggcattcatagattctgacctaacgttcactttgagcatgatcatatatgaggtgacagcccctgatagcct

SEQ ID NO: 88212 - DNA, 382 bp, Zea mays
  Clone ID: MRT4577_180448C.1
ggaacaagcctagttatttcattgggagggtcactggtaatacaaataaaccaaatcccctagggataaatcccttttttttggaaaaaaaaaatcaaaacagggccgaaagaaaattgatttttctgattccaccacgggaatttattacaaggggccgggggggaaaacaccggggggggggggggtttacaggacaaactggttgcggaaaaagtaaaacgtttccaaaaaagacaggttaggcttctgcaccccccttaaattggcaaccgggcggatgggggcccccatggccccctgcaaatcacaaccccccgccgggtttttcatgaaggccctcaaggaactaaacagggggcccaaggtgaccccccccggg

SEQ ID NO: 88213 - DNA, 760 bp, Zea mays
  Clone ID: MRT4577_180449C.1
cattgggtacctcgaagccggccgggaaaaaaattccaaaaaaaaaaaaaaaaaaaaaaaaaaaaaaaaaaaaaaaaaaaaaaaaaaaaaaaaaaaaaaaaaaaaaaaaaaaaaaaaaaaaaaaaaaaaaccctttttgaaaacccggttcaaattcgaattcgtaactccaccctcgtcgggccgccgccgccgccgccgcttgccgggtccccggcaagcctcggggccggggggtttgttacccacagggaaaaaaccagaagtctgggggacccctcccccagaaggggaagttaaagtcccccgttccctcaagcccaacctatggaggaggcttttcccaaaaaagtatgtatcggctcaggccgcccacacccaaaaagaaacggttgcttgttctgaaagctcgaagaaaaagttgttgaaacaaaacttggagtcaacccgggacgtccaagaagttgaaaaaatggaaaagttgctcgggaagcgcctgctcctcaaggaaatacctgaagggcccttccacttgaaaaaaaaacaaaagtccctgggaaaagggaaggccgttataaattcagccaaaaaacttgaagccaagctgttggaattgcaatgttaaaaacttggaacttacattttgggaaagggctgagctgaaatctttaagggtttatcaaggaaaaagggttgaacgttgctgttctgatttcggggccaaaggttactcaggccaataaaggactttgttggaact

SEQ ID NO: 88214 - DNA, 560 bp, Zea mays
  Clone ID: MRT4577_18044C.1
atccagccccactgacgtaacatgatattatttccgacaaacacacaagcatatatacatacacgccgacatacgcatgatgacttcctctatgcctcagcgggcaggcggtgccgacgtcaccggagagatgatgaaggcgcttgacggcctgcgctagagcctcgccatgcggcacgagaccgaggactactaggactgcacatgccctgacgcctacaacatcgcgaaacacgacctgatcgacgtgcacaactccgacgcgagcatctacgacaggctcacccgcctccacttccacgactgcttccaccagggctgaaatgactcgatgctccagcacgccgttacgatggtggccaactccactgagaagctgacaccgaccaacaacaactcggaccgagaggacacgacggcggaataggtgaaagccgcaatggagaactgctggccctgcgttgtctcgtgattcgacatcctcagactcggcgcatagatcactgtgagaaatgtactgtatgaaccaagtgggcatggcttgctgtgagattaaagag

SEQ ID NO: 88215 - DNA, 436 bp, Zea mays
  Clone ID: MRT4577_180450C.1
tttttttttttttttttttttttttttttggttttttttttttttttttgtttttttttttttttttttttttttttttttttaacccaaaaattttttttcccacaagtttaacggggggggtcataaggggaaaaaaagatataaaattttaaaaaaaaaggaggaaaaggggttgttttatttaaaaaccccccctaaatggcccaacacacaggaaaaccttaaattcccaaaggcacccccttggcgggggcccatgcccatgataacgatacatgaaaaaagtgttccaaacaggaaaaaacttcgagggccaaaaaagcccaagcaagttttattgggtgaacaccattggaggggggcctaaaatttccaggtgccgaaaatcaaaaaaaattggggataaagacactgtccatggaaactttttttc

SEQ ID NO: 88216 - DNA, 390 bp, Zea mays
  Clone ID: MRT4577_180451C.1
ttttattttttttttcttgataatttggatgtgatcttgtttttatcgcgcgtgacaaattacagtaattcaatcatgttattttaatgaattaaattaaaggtaaggtttaatggctgtttcctcctcgttaaaagtaattctgagctcacaggatcgatttaacattgtttagcctactggagcaaaattcctgatgcaggaaatgtgtcaggctctgccaaagtgatcggaatagaacctatgctaaccttcctataagcagttacctgtgggaattatgcaaaaaatcaatctcaactcaggttgaaagactcctttacgcatactgtattagttactaaagtatctgatatctacagatgtatattaaaataggatattcactct

SEQ ID NO: 88217 - DNA, 473 bp, Zea mays
  unsure (1)..(473): unsure at all n locations
  Clone ID: MRT4577_180452C.1
gtaaccctaaccccacacccactcataaaccctccgcctcctcgcctccctcccttccatccaatcctcggaacgagcgcgcgggcgaggaggacccccgacggaggatggcggcggcggctagggttttccgcgggtccctcttcctgatgtccccggcggcgggcgccaaggcgtcggcagccaagaagaccgggatcacgaagccgatgccggtctccgatgagttccgcaggttcgccggcggcgcgcccgaggtcgcacgctccgaggccatcaagctcatctgggcccacatcaaggcccacggcctccagaacccagccaagaaaacggagatcaactgcgacgccacgctcaaaagcttgtttggcgggagggacaaggttgggatgctggagnatcacaggctactgaacgctcacttcccgagaactagcaagcagcagtccgtggtgccagtgatcgcgctt

SEQ ID NO: 88218 - DNA, 1002 bp, Zea mays
  unsure (1)..(1002): unsure at all n locations
  Clone ID: MRT4577_180453C.1
gtagtagtgagtgtagatgattgcggacagatgagtacaagtgtacaacctagcccaaccattcctaaaatactccactactcctagtacgtccaaagtcttttcacagagctgtagcggtgcgaagacttttatgtggtgtgatgacttttaggaggtctttccaagcaatttactttttttttgaagaacagccgccatagcccatagtctgtaacgactagtcttcccgactgcagagccgcaccaacagccctcctttcatcttcatcgttgccgtcatctcgtacgccggcggcgcctccatgttagccaccggcgccaccacgtccaacctaaacctccggagcacggccgcggcgaccgtcttcatctgcacgtacgccatctccttcccgaggcacacccgcggcccagcgtggaacaccgggaaccgcgcggcgtcgaccggcacgaactcgccgccctcgcctagccaccgctccggcacgaactccaagcagtccttgccccacagcttctccatccggcccatcgcgtacgccgagtagttggcgtaccaaccggctcgcagagccgcgccgctcggcagcacgtcgtcgcgcaccgcgacccgcccgttgaacggcaccggcgggtacagccgcatcgcctcggtgatcgcggcgtgcaggtagtgcatccccttcacgtcgccgccgtcaccgcagcacgacgcggcctcctcgtgggcgcgccgctcgcaccgcgggttggcggcgaggagccagaagaaccaggtcagcgccgacgacgtcgtgtccttcccggcgagtacgaaggtgacgaccacgtcccgcaggaaccggagcttggccgctggcgtggggaacatggcgccgagctcgctgtcgctgccgccgncgtcgtccatggccgccatgaaccgcgacagcaggtccgcgggccccgtcgtcgaagctgttcctccgacgcgccacccttggattcgacgacgggaca

SEQ ID NO: 88219 - DNA, 978 bp, Zea mays
  Clone ID: MRT4577_180454C.1
gccggccggtccgggaatacaaatttctcctcctcatcagtccccactctgactctctccagtctggggctctgggcccaaatacaaaagggtttgtgggaaagccgctcgaatccgtaaccctaaccccacacccactcataaaccctccgcctcctcgcctccctcccttccatccaatcctcggaacgagcgcgcgggcgaggaggacccccgacggaggatggcggcggcggctagggttttacgcgggtccctcttcctgatgtccccggcggcgggcgccaaggcgtcggcagccaagaaggcgggcgcggcggcggcggcggcggcggtggccaagaagaccgaggcggccactacgaagccgagactgccgaccgggatcacgaagccgatgccggtctccgatgagttccgcaggttcgccggcggcgcgcccgaggtcgcacgctccgaggccatcaagctcatctgggcccacatcaaggcccacggcctccagaacccagccaagaaaacggagatcaactgcgacgccacgctcaaaagcttgtttggcgggagggacaaggttgggatgctggagatcaacaggctactgaacgctcacttcccgaagaagtagcaagcagcagtccgtggtgccagtgatcgcgctttggtaaaaggactttcttgtggctgccctcttttgtggtccatgttaagtcccaagtctcccccttggtggttacgccccaaacccgtgtgatgccattaagacttacagactttgttcgaaaaaagggtttttgggcgtgatgcatgtaaaaaggcccccccccccccccgtttttcttgtgatcctgtgaggacccccttgtgggaaatatttaagtctgctaatggcaaatctttttagtcttttaaaaaaaaaaaaaaaaaaaaaaaaaaaaaaaaaaaaaaaaaaaaaaaaaaaaaaaaaacccccccccc

SEQ ID NO: 88220 - DNA, 188 bp, Zea mays
  Clone ID: MRT4577_180455C.1
tcatttgtccatcctgagatgcagaacccattctcgagggccatctacagtgtatatattatgctagataacagattaataccaaaggttttagaggtgtcatactgttcaaactgttgtagggcatgcaagaataacactcatgcactggtaggaagccaggataccattagatggcctttgataat

SEQ ID NO: 88221 - DNA, 327 bp, Zea mays
  Clone ID: MRT4577_180456C.1
agaaaaaagaatgtatctcaactgatagatactgtgggggcgcgatgaaactgatggaaaacaccgcctagctcctctcctagaattacaggatggctggacagagaacaacagatagcacggtacgggcaattggactgccgaactcagttacatgatcaggcaagcaaccgcgctgacgaggcagttgatttgccatctccgggtgaagcacgcgcacagcacctgctgcattgctcccaggacgactccgagcccattgggcaagtatatgaagaaagcacgcctgagaagcccgtacactgtgaatgatgcgcttatcaggaa

SEQ ID NO: 88222 - DNA, 188 bp, Zea mays
  Clone ID: MRT4577_180457C.1
ctgtatttccgggttctccccttccttcttcccttttttcagaaaaaaccccccccgtaaaaagggggggccggagccaactcaaaagaagccggagccgtgccaaagagggacccagggtggcgggggctccacgggctaaccatgtcgaaggggcaccctattcaccgtgcatgcaggcccaggag

SEQ ID NO: 88223 - DNA, 616 bp, Zea mays
  unsure (1)..(616): unsure at all n locations
  Clone ID: MRT4577_180458C.1
tcagccgtagctcgtcgtcgtccgggaaggcgccgtcgggcgagcaccggaggtacgccggatccaagcggagctacgacttcgaccacgagaggaggggcggtggcggcgacgtcgacgaatgcgattggggcagggagggggccgcggtggccaggccctcaccgcgccggaggtcgccagaacggaagcgctcgtcgagccacgatggccgtgctggcagcgggagcgggagccagagccggaggattagcaggtcaccggggcggcgagcggacgtcgttcccgccccggggagctccgcgaccggcgagcgaggcgcgaggcagcagccgggcaagatggtgtcggtcccggccagggagaaggggcgcgcgccgtcgcccgtgaaggctgcttcgtctggcaagaggtacccatcaccaaggtcaaactcgcccgcgagggcagcggcctcgggtaatgagaatgccggggtgcagtcgacgcacggtccctcgctgagccgcagcacctctaggaaggccgagcagtcgccgttccgtcgcaaccccatggcggaactcgacgagaacacgctnncgcaccaccaccaccataacagcaacggcaggcc

SEQ ID NO: 88224 - DNA, 307 bp, Zea mays
  Clone ID: MRT4577_180459C.1
tttctatttttttttttttttttaaagaccgacataggaggtctccaagagctaggggagattcccaagaagcccgaacagtgcacggacgacacacaagccttaaaagtgatggagggaaccaaaacagaaagccctcggtcgggttcttaggactatacactccaccgggtgggaagatatctacttaataacaggtacctgggggcaatatataccggggggtatcatccttccggtctgagatacaggatatacagggggattctagaacccacgggggaaaagtcagaactccaaacccccc

SEQ ID NO: 88225 - DNA, 791 bp, Zea mays
  unsure (1)..(791): unsure at all n locations
  Clone ID: MRT4577_18045C.1
attgggaccctcgaggccggccgggcccgagctgcaaccaaccagcaaccgagccagccatgtcgcccacccctgcgccggccgcccgcgccggcgaggagctgccgtccactgaggtggtggtggtccggcacggcgagaccgcgtggaacgcctcccgcgtcgtccagggccaaatggacccggagctgaacgaggccggcaggcggcaagccgtcgtggtggcccgccggctgtcgagagaagccaagcccgccgccgtgtactcgtctgatctgcggcgagccgccgagaccgccgagaccatcgcgagggcctgtggcgtatcaaacgtggtgctgacggaggcgctccgcgagaggcacatggggtacctgcagggcctcaggtgggacgacgcggtggacaagagcccggactccttgcacatcgtcaaggtcatcgagggctctgaccccggcagctgcgtccgcaggcacgtccccaacacctcgctcagcgtcttccgcgtctccgccgccaccgggcagtgggcgctcgagaggtgcggggacgtcggccatctcaagggagacggagacggagacagcttcctggagggctcgttcgggggcgacggggcctcggcgtaaacgtacgtacaggccgatcagccgagagctcgcaccagtcttcctttggatcgaaccattctttggttccgatgctgtttggagcttgtattccattgtttttcaaaaagagaacaaccattgnagtttgaaacgttgatcaatttgtngtttacagcc

SEQ ID NO: 88226 - DNA, 196 bp, Zea mays
  Clone ID: MRT4577_180460C.1
acgtcggcctcctcgccgtcgcctactccgtgagtagctagctaagcactagcagcagcagtcgtattagacagatgaatcgaaagcaacgtacgacgatgaattaatgtactaacaatatatgcgtgcgtgcatatatgtgtggtatgcagggtctggtggtgacgggcgtgtcgttctacctgcaggcgtggtg

SEQ ID NO: 88227 - DNA, 379 bp, Zea mays
  Clone ID: MRT4577_180461C.1
tattttacagaatacaaaatacgtgagtgggagttggaagaatctatacttccggccctcaaacacgctctgtagttatgcccgtctgataacggactgctttattttttcgccacaggtggattactcattgagaacatttctagtgcacatggacatgtggcgctaaactcgtccatccaacacactcagcaggttcacaggggctatagccggtatcatgagaattcaccttgttgaggatgttactgattcccttgcaaagagattcttaagactcgtcgttcgctacccctacattactgcatctgtacaagctttaagaactaatattccctaattcaaagcttttggtcattctgtcagaacaacatttttt

SEQ ID NO: 88228 - DNA, 260 bp, Zea mays
  unsure (1)..(260): unsure at all n locations
  Clone ID: MRT4577_180462C.1
tctgattttttagcccgcacccaccnnctacgaatggttctaacgccgaaagagcggtgtccccccttctcccttaaccctccaacatccttctcttcaatgcgtacgctctcgacaatagcgtccacctccttttctccttctcttccacgcaagatagatcaaactccctttctactaaagccattattctttctaccttcttacgtatctttctttccttcaaaggaccattcccaactttcaacatcttctactgc

SEQ ID NO: 88229 - DNA, 344 bp, Zea mays
  Clone ID: MRT4577_180463C.1
ttttgactgaactgcacgggaccgggtgactgttgtcgttttcagttgtccatggccaggcccatataaattttgattgtaaaccaaaaacaatcggggggaacctaaggggtcattacttatgcgacgaagagagcgggcctaagtccttcgtcgacggtaccacgtttggggcggacccacctacaataacggcccctggtggggacaaacacggcgcatcattacgctcgatgagacaaacatgccgggaaccacggccagggcactccagaaaaagacccactgctatttatctgtatccagtggccgaggggcgggccaccacaccacaggagatgtca

SEQ ID NO: 88230 - DNA, 244 bp, Zea mays
  Clone ID: MRT4577_180464C.1
cggtaccggaaattccctgggtcgtacccacgccgtccgtaaaaaaaaaaaaaaaaaaaaaaaaaaaaaaaaaaaaaaaaaaaaaaaaaaaaaaaaaaaaaaaaaaaaaaaaaaaaaagggcggccaaatataaaagaaccaaagcttacgtgcgctttgcttgccgagggtcttaccttcctcctttgcgggtgccctgaatttcattttacttggcccgtcggttttacaccttttgggggg

SEQ ID NO: 88231 - DNA, 555 bp, Zea mays
  Clone ID: MRT4577_180465C.1
cctcgaggccgggcgggacagcaaatcgccatggcatccagtaaggacgcagtggtcgctgctatcttcatccaggccttgctcctcatggtatcgtcctattgtgcggaggcaaagatatgcacgaagcctaatccattttacctgaccttatgccaaagcgacaaggcctgcggagactcgtgcattcactttggcatcggcaccagcgggttctgcaaaggcagacgaccacccaccagagtctgcacgtgtaacttcgaatgtccagggcaagagcgaagcaacacgtttacatgatggggatgagccgctatatctagcttaattattagcatgcccaaactgaatatccaataatttgagtgtttctgtagttgattgttcggcaaactgtttgtttcaaaacggactagcagcaaggaccagagctgcatgtgtaacatttgttttcaaagttaatatatgtgtccaatcttgtctttcgagatgcatatgcatttctacttccctggaaaaaaaaaaaaaaagaaaaaaaaaaaaaaaaaagcggcc

SEQ ID NO: 88232 - DNA, 1121 bp, Zea mays
  Clone ID: MRT4577_180466C.1
ggtaatagttgttgttggtttttttttttttttttttttttttgaacaaatgaataaataccattacattcatgaatagatatcgtactagacaggattctgatgatatccatcacatgaaacacaacaatgccatcacaagtcagataacacctggactctgagaacagcctaccaaacaaacggctgtctcaagcattcaaactttcttgactaccaccacaagtaaacataaaacctagcgaatgtcaggctcgccttccattacattatactaaacaaacacccactgcgggtgcgggtgggcgaagcgcgacccctccgaactgctcactggaatacttcttgtatacagacctcagcttgctgtcagcggcggacgagtgtgcgctgaccagcatcttcgtgcactcgattagctctgcctctgaccctctgaagcccgtgtggtgcttgagggtgtcggtccagaggggagccctcttgagagtgagcctggctgcgtagacaaccgaagcagcgaccagcgaaggcagccgcgtcaccaagccgtactgcatcagcgccagttcagcgaagaagaagaccatattctccatctctttctcaactttgttgcccaaggctgccgccttcagaaaacgaacaaggaacatgtatactgtagggacagtgaggttccactccaggctattcaggattcccttctccatcgaaaggatctgctccctgctgtatgcactgtctgatataagaatgaaatcgttcacctgaaaaaaaaaaaaggcacacgtgaatgaatttagagaaacttggaaagtaagactaggaaagagattgggagctttatgtgcacctctggggcccaaatctcctcgtacttgcaggcgatcagcatagctgaaacaccgaccagctgcagctcccttcgcaggactggttgcagcgagaggtactgatcgatgatgtacatggtcaagtagagagtttccggcatcagctcgaactttattttttttcccacttccccactaccctttcaagtttcctagaaattacccaccattgccattataatctaccgaatcgttttttcccggccggcctcgaggtacccaatg

SEQ ID NO: 88233 - DNA, 1801 bp, Zea mays
  Clone ID: MRT4577_180467C.1
gaataaataccatttatattcatgaatagatatcgtactagacaggattctgatgatatccatcacatgaaacacaacatgccatcacaagtcacataacacctggactctgagaacagcctaccaaacaaacggctgtctcaagcattcaaactttcttgactacccccacaagcaaacataaaacctagcgaatgtcaggctcgccttccattacattatactaacaaacactagcacgaagttatcttcgtttacttgatctccactgcggctgcgggtgggcgaagcgcgacccctccgaactgctcgctggaatacttcttgtatacagccctcagcttgctgtcagcggcggacgacgagtgtgcgctgaccagcatcttcgtgcactcgattagctctgcctctgactctctgaagcccgtgtggtgcttgagggtgtcggtccagaggggagccctcttgagagtgagcctggctgcgtagacaaccgaagcagcgaccagcgaaggcagccgcgtcaccaagccgtactgcatcagcgccagttcagcgaagaagaagaccatattctccatctctttctcaactttgttgcccaaggttgccgccttcagaaaacgaacaaggaacatgtatactgtagggacagtgaggttccactccaggctattcaggattcccttctccatcgaaaggatctgctccctgctgtatgcactgtctgatataagaatgaaatcgttcacctctggggcccaaatctcctcgtacttgcaggcgatcagcatagctgaaacaccgaccagctgcagctcccttcgcaggactggttgcagcgagaggtactgatcgatgatgtacatggtcaagtagagagtttccggcatcagctcgaacttgtggtgtacttcaattatccaaccagccaggatagccctcatcttagggttgatctcgacttgggtgtctatataatcacatggccgtctgtcatgctgagcaatcttgtagaacgtgtagatgtcctcaatgtattccacaactgcgagctcattgttgacgtccaacttgtcgatgtcttcgatcactactacttgccgtctcttatcagtgattccacaggcagcctttgagcgagccgagagcacagatgaaagggtgttgatgaccttcttcctcgagcggacggagctagcgctgctctccaactgcgtcctgctctgttcagagtcggagctgagtactatgacatcctcaggaggcggctgcttggcaggagccttcctttcctgcctcggcgcatgcctcgcgggtaggattgcggcattcttgattgcggcattcgcctgcacgttcttcacgagctgagcgccgaagcttcgcgtgatggggcgattgatctgctgaggcttcccttcggctgggcggacgctcttgattgcggccttcgcttgcgctttcttgacgagttgagcgccgaagcttctagtgatggggcggttgacctgctcctgcgggttccctgtggctgggcggacgctgacgaggttgccgatatcgccgagagggggtcgccggttcagagcgtcaggtcgggcgggcacggccttggtctttccaagagcgggaacaccggctcggttgtgatggtgaagctgcggagcggcggcgttgtggttgcgcgaggccatctcttggtcctcgtcctggtcggcctggccgaagaggcccgagagcacggaggcgaagaaagactggaggcgcgcagcccgcgacccccggacgtgtggacgga

SEQ ID NO: 88234 - DNA, 212 bp, Zea mays
  unsure (1)..(212): unsure at all n locations
  Clone ID: MRT4577_180469C.1
agccccagcacagcgaaacaaaacaaggggagcacaccacaaccacaagcaagccaccaaagaaanccgagncaaacaaccagaacacaagggagcaaaaccgccagggaacacnacaaaggnnacaagaaacaacccccaanaccacggaggggacacccagngccacgcacgccnngccgcgggagaaaaggcaccaagaacaaacaaca

SEQ ID NO: 88235 - DNA, 585 bp, Zea mays
  unsure (1)..(585): unsure at all n locations
  Clone ID: MRT4577_18046C.1
agcttcctgtgacgaagtggccccccggggggggggggggggaaccccacacatatactcttctgacctgcggcgagccgccgagaccgccgagaacatcgcgagggcctgtggcgtatcaaacgtaaagagcgttctcttcttgctgctcctgtgactgtggtcttntccctcntaggaggggggggggtgtctttcaancatccntcccntnccccntnttctcaagtggtgctaactgaggcgctccncgagaggcacatggggtacctgcagggcctcaggtgggacgacgcggtggacaagagcccggactccttgcacatcgtcaaggtcatcgagggctctgaccccgacagcagaaaccaggagctgcccgtgagtacacgcccgtccagagagctctgctctgtgcactctcggtttgattatctgaacttttttcagggcggtggagagagcctgaaccagctgaacgagcgttgcgtctgcttcgtgaacaagatcgcgcaagaacactcctgggagcgggtggtggtggtctcccacggggcagcgatactggagctctgccggcacaccgac

SEQ ID NO: 88236 - DNA, 428 bp, Zea mays
  Clone ID: MRT4577_180470C.1
cctggccgggcttgtaaattcggtgagctaggctagaagccgggtgctcagcagactcatcgagacctctgaactgcgtgcgtttgcttaatgtgtggtgtgctttcacggcagcaggggcttgagggtatacctgcaggatgaatatggaacgtccatggacgccctagattacatggtctccaggtgaatcttgttctatgtttggattctactaaaattaactgttagaaacccgttgcaacagactcgccttcttcctcgcttcttcatcccgctcgccatcgcctgcccttcgctcggtacatttgccgaggctgtaggactcgccatatccccctcttgccctcccgccgccttccattcccgcgcttccccgctcgctctcctggcctcgcgccgtttcggcgcccttccagtcctcgcgc

SEQ ID NO: 88237 - DNA, 652 bp, Zea mays
  Clone ID: MRT4577_180471C.1
ccggccgggaataatacgttcaatatgccacttgcaagatagtctctgctagatatctaagaggaggatgcgtctgggacgtacagagatcgagagtgttgcctggcggtgtcggcgtcgctgccaaggattacacggatactcccccggggccgctgatcgacgtggttgatctggggtactggtggctgtaccgcgccgtgatcgtccgagctcatcaccacgctgatgttcctgtacatcacatatgggcaccgcgatcgggtacaaacaccagacgtaagcatctacgtcggctgccgacgtggcatgactggtggtggcacgtgctgaacatcaactgtgtcttctgagatatgatattcgttgtacgtatactgcagcgactgtatcatgtgaaagccacatcaacaatcgacggcgacttctacctcttcctggcgtgaaatgtctccctgatgcttgagctgctctacatcgtgttcctattgcgtagcagacatctgcggaggctgaattccagaagttgtacaaacatgctactgctactgctacggttgcgctaaatgctcactctgctgcgaatacttctgcggtattcggcactaaagctatagctgctgcagctgatggttcatctaatacttcttct

SEQ ID NO: 88238 - DNA, 259 bp, Zea mays
  Clone ID: MRT4577_180472C.1
cggctcgagggctgaaggaggccctatacctgcaggagcagtagtattcgttcctggcgaacgctctctgatgattcttcgaatattgccccggtatacttgctagttcactctagtgagactggcgagtgtccagtggacagtgtgttatctatgggagcgtctctatacccggtcaagatggccaacgtcttctggaggcagcggtcgattgtttacttgaaacattttctgatgtaacgggcaaacccttcgttct

SEQ ID NO: 88239 - DNA, 188 bp, Zea mays
  unsure (1)..(188): unsure at all n locations
  Clone ID: MRT4577_180473C.1
cgnccggcgcgngcggcacggcctgtccaagatctaagagcgcacatacccatgcggggaagggacaccctctcctagatatgcagatatgcccgcacatggcgtttctgagtagcagccaacatatctaccatgtatagcagcttctcctagcaaatcatactagcacgccaggagactccatgcca

SEQ ID NO: 88240 - DNA, 116 bp, Zea mays
  Clone ID: MRT4577_180474C.1
gttcatagctttacctcagggaaggtgagcacgtgatcccagggcatatgcaagtgtaatagctacaaagcgtgcaagacgtcttacagatccatcatctaacggacgaatgggct

SEQ ID NO: 88241 - DNA, 299 bp, Zea mays
  Clone ID: MRT4577_180475C.1
aaagggaaacaacactttttttttaggggggccaaaagaaaaggttaattgggggggcgccgggtaaaaaaatttttgggcatcgatcattttaggccccacaaaacaaacgaatttttggggaaagcaaccgcccccagttgggttaaagggcccccacccccccctccgaagggccctggaggggaaatttccgggggaaaagcaaaaaaaggccggctagggaacggggtgggaaattgcaacccccgttaaaccccccatatgtttctccttaaaaggatttccggggatttggg

SEQ ID NO: 88242 - DNA, 467 bp, Zea mays
  unsure (1)..(467): unsure at all n locations
  Clone ID: MRT4577_180476C.1
cggaatttttggggagaccgaaaagtctcgccatgcgtccgcccacgcgtccgcccaagcgtccgcccacgcgtgagaggacgagcgggcgatcaacaggcggcgccaccttcggagagaagcgaggcggggagcgaagcgagctagacgtganctatatctcttccttttggaaggagatggaagnaaanganaaggggatgtaaggataaaaagcccccngagggggggaagagaagggcccaatatcgtggacaagaccctncaatgtagaattcccggggatgaggttgtccgatgagacgaggggacggcacgaggggcgggagaagaaaagcgagaagaagaagcgaagagggtagaaggatggagagatggcaggaccaggagaataagaaggaggagcggagcagncatcgtgcatgggggtggggaggacaggaagaaggggccctagaggaggagac

SEQ ID NO: 88243 - DNA, 280 bp, Zea mays
  Clone ID: MRT4577_180477C.1
gccacctgtggtcagcagcagctgccgtgttgctagaataaagttggtggcgatcgatcgatcgatctgtggtgatgggtgtccctccctgtgtgtttgtgtttagttccagtcgtttgtgaggaagtcagttatgtttgagtgagagggggtacttcgctcttcggtgaactctgtacttgtcatgaggagagttttcatacccagagtgtagaactctgtactgtactcggatccttcctttttcatccaagtggattttattttatcaaccgtatct

SEQ ID NO: 88244 - DNA, 688 bp, Zea mays
  Clone ID: MRT4577_180478C.1
cgccacagcaacagcgtcaaggacgaggaagggtacccggccttcgcgctcgtcaacagggtcaccggcgaggccatcaagcactcccagggcgagggccacccggtcaagctggtgccctacaaccccagctaccaggacgagtcggtgctgtggacggagagccgcgacgtcggccacggcttccgctgcgtccgcatggtgaacaacatctacctcaacttcgacgccttccacggcgacaaggaccacggcggcgtgcgcgacggcaccaacatcgtgctctggaagtggtgcgagggcgacaaccagcgctggaagatcgtcccctggtaaatgtgctgttctgtggctgcattggtcatcaccatgatctggagttgggaaggcatagccacctgtggtcagcagctgctgccgtgttgctagaataaagttggtggcgatcgatggatcgatctttggtgatgggttgtccctctctgtgtgtttgtgtttagttccagtcgtctgtgaggaagtcagttatgtttgagtgagaggggtacttcgctcttcggtgaacactgtacttgtcatgaggagagttttcatacccggagtgtaggaactctgtactgtactcggatccttcctttttcatccaagtgggttttattttatcaaccgtatctatactcgtggtttt

SEQ ID NO: 88245 - DNA, 254 bp, Zea mays
  Clone ID: MRT4577_180479C.1
aaccccggtctacccagcgtccgtcaaggggaagtgatgaccggtgacaacaaaaaacttgttatttagcgttcagtttgtgtggtttacacatttatgttcggtattgtttctgcatttgaataaagtcttgttatttatgatgttgcagctttcgcaaatccagctgaggctctgaccttatctataagctgtgaaaatgtccatactttgttcctgttcagatcgaattttgaggattcatagcccttttt

SEQ ID NO: 88246 - DNA, 459 bp, Zea mays
  Clone ID: MRT4577_18047C.1
ggggcatattcaaccatgcttaagttagatgaaatctcatgattggccacgcttgcccttgcccccacggagctcattattcgacacaaccttttcaaactcaaacagaagctacatcgaaaatacaataatggaaggggcccaaaaatgatgtttcaacatcatggaaggataccttaggggacaccctgtaattcctgaaaagtctgaaggagaaaacaaaaagcacagcatacagaaaagggggtaaaacaagaacaacatgacagattaacagctgcaatccaagactcaaaaaaaaaaagggctctacgggattcatgttttccaaaaagctcattctttaccccaatttggttcacgtttgaaaatcaagaccctcaaatcaagtttgatggggtgggtaacataaaaataaacccccaatgcaagaaactaacaatatcacaattcaacatg

SEQ ID NO: 88247 - DNA, 266 bp, Zea mays
  Clone ID: MRT4577_180480C.1
acaactgcatccatgtaggtcacactcctgtcatggactcgttaaagaatggtgctcctgacaaatggagactagggaaggctcatggaacagctgtgggtctcccatctgatgatgacatgggcaacagagaagttggtcacaatgcactgggtgctgagcgttccgtcgtccaaggagctaagcttgttgatcaagctcttgcctcaggaaagatttatgatggagatgggttcaactacatcaaagaatcttttgaaaatggc

SEQ ID NO: 88248 - DNA, 1552 bp, Zea mays
  Clone ID: MRT4577_180481C.1
caaatccccctgtcccgctaggattcccccgaaaccctcccccaaaaccccagagcggagaagagcgcaagatgttcggcttcgggcaccacggccaccacggccagaacccgccggcgcacggcggcgtgcaccagcccaccttcaagatcttctgcaaggccgacgaggggtactgcctcaccgtccgcgacggcaacgtggtgctggcccccgccaacccgcgcgacgagcaccagcactggtacaaggacatgcgcttcagcacccaggtcaaggacgaggagggcaaccctgcgttcgccctcgtcaacaaggccactgggctcgccatcaagcactccctcggccagtcccacccggtacctgtttgtactcctgatcttctatccatcggccaggacgagggagggcttgatttgatttcattttggttattgtatccatttgttcaggtgaagctggtgccgttcaacccggagtaccaggacgagtcggtgctgtggacggagagcggcgacgtgggcaagggcttccgctgcatccgcatggtgaacaacatccgcctcaacttcgacgccttccacggcgacaagggccacggcggcgtgcacgacggcaccaccgtggtgctgtgggagtgggccaagggcgacaaccagagctggaagatcctgccctggggcgacgaggcctacgccgggggcggcagcagcgccgccaacgcgccccgcttcggcggcggcgagcccaccgtccgcatctactgcaaggccgacgaagggttcagcgccacggtccgcaacggcgccgtgtgcctcgcgcccaccaacccgcgcgacgagtaccagcactggatcaaggacatgcgccacagcaacagcgtcaaggacgaggaagggtacccggccttcgcgctcgtcaacagggtcaccggcgaggccatcaagcactcccaggggcgagggccacccggtcaagctggtgccctacaaccccggctaccaggacgagtcggtgctgtggacggagagccgcgacgtcggccacggcttccgctgcgtccgcatggtcaacaacatctacctcaacttcgacgccttccacggcgacaaggaccacggcggcgtgcgcgacggcaccaacatcgtgctctggaagtggtgcgagggcgacaaccagcgctggaagatcgtcccctggtaaatgtgctgttctgtggctgcattggtcatcaccatgatctggagctttgaaggcatagccacctgtggtcagcagctgctgccgtgttgctagaataaagttggtggctatcgatcgatctgtggtgatgagtgtccctctctgtgtgtttgtgtttagttccagtcgtttgtgaggaagtcagttatgtttgagtgagaggggtacttagctcttcggtgaactctgtacttgtcatgaggagagttttcattcccggagtgtagaactctgtactgtactcggatccttcctttttttatccaagtgggttttccttttaaaaaaaaaaaaaaaaaaaaatatt

SEQ ID NO: 88249 - DNA, 1568 bp, Zea mays
  Clone ID: MRT4577_180482C.1
gcgttctgcaatccccctgtcccgctaggattcccccgaaaccctcccccaaaaccccagagcggagaagagcgcaagatgttcggcttcgggcaccacggccaccacggccagaacccgccggcgcacggcggcgtgcaccagcccaccttcaagatcttctgcaaggccgacgaggggtactgcctcaccgtccgcgacggcaacgtggtgctggcccccgccaacccgcgcgacgagcaccagcactggtacaaggacatgcgcttcagcacccaggtcaaggacgaggagggcaaccctgcgttcgccctcgtcaacaaggccactgggctcgccatcaagcactccctcggccagtcccacccggtacctgtttgtactcctgttcttctatccatcggccaggacgagggagggcttgatttcattttggttcttgtatccatttgttcaggtgaagctggtgccgttcaacccggagtaccaggacgagtcggtgctgtggacggagagcggcgacgtgggcaagggcttccgctgcatccgcatggtgaacaacatccgcctcaacttcgacgccttccacggcgacaagggccacggcggcgtgcacgacggcaccaccgtggtgctgtgggagtgggccaagggagacaaccagagctggaagatcctgccctggggcgacgaagcctacgccgcgggaggcagcagcgccgccaacgcgccccgcttcggcggcggcggcgagcccaccgtccgcatctactgcaaggccgacgaggggttcagcgccacggtccgcaacggcgccgtgtgcctcgcgcccaccaacccgcgcgacgagtaccagcactggatcaaggacatgcgccacagcaacagcgtcaaggacgaggaagggtacccggccttcgcgctcgtcaacagggtcaccggcgaggccatcaagcactcccagggcgagggccacccggtcaagctggtgccctacaaccccggctaccaggacgagtcggtgctgtggacggagagccgcgacgtcggccacggcttccgctgcgtccgcatggtcaacaacatctacctcaacttcgacgccttccacggcgacaaggaccacggcggcgtgcgcgacggcaccaacatcgtgctctggaagtggtgcgagggcgacaaccagcgctggaagatcgtcccctggtaaatgtgctgttctgtggctgcactggtcatcaccatgatctggagctttgaaggcatagccacctgtggtcagcagctgctgccgtgttgctagaataaagttggtggcgatcgatcgatcgatctttggtgatgggtgtccctccctgtgtgtttgtgtttagttccagtcgtttgtgaggaagtcagttatgtttgagtgagaggggtacttcgctcttcggttaactctgtacttgtcatgaggagagttttcatacccggagtgtagaactctgtactgtactcggatccttccttttccatccaagtgggttttattttaaaaaaaaaaaaaaaaaaaaaaaaaaagggggcga

SEQ ID NO: 88250 - DNA, 204 bp, Zea mays
  Clone ID: MRT4577_180483C.1
tcggtcagtcactggccccccattaagccggccggccttttttgggcggtggcgggagcttgctttgacccaacccccattgggaacgggattggccccattggccgcaccttcattggcttgatcccgggcggcggttcctttcccggggatctcggggtttgaacaaccccagccgtttttcccagggtggccccccgttgg

SEQ ID NO: 88251 - DNA, 1514 bp, Zea mays
  Clone ID: MRT4577_180484C.1
ccggccggggccccgtcccaaatcccctgtcccgctagcggctagtccgaccaggcgatcccccccccaaaccctcccccaaaaccccagagcggagaagagcgcaagatgttcggcttcgggcaccacggccaccacggccagaacccgccggcgcaccccccggcgcacggcggcgtgcaccagcccaccttcaagatcttctgcaaggccgacgaggggtactgcctcaccgtccgcgacggcaacgtggtgctggcccccgccaacccgcgcgacgagcaccagcactggtacaaggacatgcgcttcagcacccaggtcaaggacgaggagggcaaccctgcgttcgccctggtcaacaaggccactgggctcgccatcaagcactccctcggccagtcccacccggtgaagctggtgccgttcaacccggagtaccaggacgagtcggtgctgtggacggagagcggcgacgtgggcaagggcttccgctgcatccgcatggtgaacaacatccgcctcaacttcgacgccttccacggcgacaagggccacggcggcgtgcacgacggcaccaccgtggtgctgtgggagtgggccaagggagacaaccagagctggaagatcctgccctggggcgacgaggcctacgccgcgggaggcagcagcgccgccaacgcgccccgcttcggcggcggcggcgagcccaccgtccgcatctactgcaaggccgacgaggggttcagcgccacggtccgcaacggcgccgtgtgcctcgcgcccaccaacccgcgcgacgagtaccagcactggatcaaggacatgcgccacagcaacagcgtcaaggacgaggaagggtacccggccttcgcgctcgtcaacagggtcaccggcgaggccatcaagcactcccagggcgagggccacccggtcaagctggtgccctacaaccccagctaccaggacgagtcggtgctgtggacggagagccgcgacgtcggccacggcttccgctgcgtccgcatggtgaacaacatctacctcaacttcgacgccttccacggcgacaaggaccacggcggcgtgcgcgacggcaccaacatcgtgctctggaagtggtgcgagggcgacaaccagcgctggaagatcgtcccctggtaaatgtgctgttctgtggctgcattggtcatcaccatgatctggagctttgaaggcatagccacctgtggtcagcagctgctgccgtgttgttagaataaagttggtggcgatcgatcgatctatggtgatgagtgtccctatctgtgtgtttgtgtttagttccagtcgtctgtgaggaagtcagttatgtttgagtgagaggggtacttcgctcttcggtgaacactgtacttgtcatgaggagagttttcatacccggagtgtaggaactctgtactgtactcggatccttcctttttcatcgaagtgggttttattttatgtaaaaaaaaaaaaaaaaaaggccccta

SEQ ID NO: 88252 - DNA, 1129 bp, Zea mays
  unsure (1)..(1129): unsure at all n locations
  Clone ID: MRT4577_180485C.1
gccccgtcccaatccccctgtcccgctaggattccccccaaaccctcccccaaaaccccagagcggagaagagcgcaagatgttcggcttcgggcaccacggccaccacggccagaacccgccggcgcacggcggcgtgcaccagcccaccttcaagatcttctgcaaggccgacgaggggtactgcctcaccgtccgcgacggcaacgtggtgctggcccccgccaacccgcgcgacgagcaccagcactggtacaaggacatgcgcttcagcacccaggtcaaggacgaggagggcaaccctgcgttcgccctggtcaacaaggccactgggctcgccatcaagcactccctcggccagtcccacccggtgaagctggtgccgttcaacccggagtaccaggacgagtcggtgctgtggacggagagcggcgacgtgggcaagggcttccgctgcatccgcatggtgaacaacatctacctcaacttcgacgccttccacggcgacaaggaccacggcggcgtgcgcgacggcaccaacatcgtgctctggaagtggtgcgagggcgacaaccagcgctggaagatcgtcccctggtaaatgtgctgttctgtggctgcactggtcatcaccatgatctggagctttgaaggcatagccacctgtggtcagcaactactgccgtgttgctagaataaagttggtggcgatcgatcgatcgatctttggtgatgggtgtccctccctgtgtgtttgtgtttagttccagtcgtttgtgaggaagtcagttatgtttgagtgagaggggtacttcgctcttcggttaactctgtacttgtcatgaggagagttttcatacccggagtgtagaactctgtactgtactcggatccttcctttttcatccaagtgggttttattttatcaaaaaaaaaaaaaaaaaaaaaaaaaaaaaaaaaaaaaaaaaaaaaaaaaaaaaaaaaaaaaaaaaaaaaaaaaaaaaaaaaaaaaaaaaaaaaaaaaaaaaaaaaaaaaaaaaaaaaaaaaaaaaaaaaaaaaggggggggngggttttaaaaggataaaattttaggnaaggggggatatgaaaagtattaaatttttttt

SEQ ID NO: 88253 - DNA, 452 bp, Zea mays
  Clone ID: MRT4577_180486C.1
ggttgggaggaaagcaaatcatcaatgaaacgggggacggcacaagcacaaagccgggggaaacacagtcacgccaatcaaaaactcgggggactaaaaactcccgaccaaaaaacccactctgaacaagaaacaaaccacaaaccgcacgcccttatacaaacaaaatagccgaactagcgaccctgggccacagagcaacacaccccttcaccacgggcccagcgatggaaaaaccactcatctctgcctggggggggagaagaacaccagcactgccttcaaagggcaggaagacaccaaccatccggggccaaggagagcggggacccacaataacagcgggcctgacggtccctctaaggaaaaacaaccccttgtacactgttgccataaccatgggaccaacacaggcagacggaagccaggaaaggcgacccatgaaacccagg

SEQ ID NO: 88254 - DNA, 1677 bp, Zea mays
  Clone ID: MRT4577_180487C.1
cattgggtacctcgaggccggccggggccccgtcccaaatcccctgtcccgctagcggctagtccgaccaggcgatccccccccaaaccctcccccaaaaccccagagcggagaagagcgcaagatgttcggcttcgggcaccacggccagaacccgccggctcacggcggcgtgcaccagcccaccttcaagatcttctgcaagtccgacgaggggtactgcctcaccgtccgcgacggcaacgtggtgctggcccccgccaacccgcgcgacgagcaccagcactggtacaaggacatgcgcttcagcacccaggtcaaggacgaggagggcaaccctgcgttcgccctggtcaacaaggccactgggctcgccatcaagcactccctcggccagtcccacccggtgaagctggtgccgttcaacccggagtaccaggacgagtcggtgctgtggacggagagcggcgacgtgggcaagggcttccgctgcatccgcatggtgaacaacatccgcctcaacttcgacgccttccacggcgacaagggccacggcggcgtgcacgacggcaccaccgtggtgctgtgggagtgggccaagggcgacaaccagagctggaagatcctgccctggggcgacgaagcctacgccgcgggaggcagcagcgccgccaacgcgccccgcttcggcggcggcggcgagcccaccgtccgcatctactgcaaggccgacgaggggttcagcgccacggtccgcaacggcgccgtgtgcctcgcgcccaccaacccgcgcgacgagtaccagcactggatcaaggacatgcgccacagcaacagcgtcaaggacgaggaagggtacccggccttcgcgctcgtcaacagggtcaccggcgaggccatcaagcactcccagggcgagagccacccggtcaagctggtgccctacaaccccggctaccaggacgagtcggtgctgtggacggagagccgcgacgtcggccacggcttccgctgcgtccgcatggtcaacaacatctacctcaacttcgacgccttccacggcgacaaggaccacggcggcgtgcgcgacggcaccaacatcgtgctctggaagtggtgcgagggcgacaaccagcgctggaagatcgtcccctggtaaatgtgctgttctgtggctgcactggtcatcaccatgatctggagctttgaaggcatagccacctgtggtcagcagctgctgccgtgttgctagaataaagttggtggcgatcgatcgatcgatctgtggtgattggtgtccctctctgtgtgtttgtgtttagttcccagtcgtttgtgaggaagtcagttatgtttgagtgaggggggggggggggggggtacttcgctcttcggtgaactctgtacttgtcatgaggagagttttcacacccggagtgtagaactctgtactgtactcggatccttcctttttcatccaagtgggttttattttatcaaccgtatatatactcgtggttttgctattaaaaaaaaaaaaaaaaaaaaaaaaaaaaaaaaaaaaaaaaataaggggggccgcccgaagtgagacagcgccgccgggggttttttttctggggaagggtaagaggaggatggaggttcccacaagaagggtgatataaaaagggggga

SEQ ID NO: 88255 - DNA, 1548 bp, Zea mays
  Clone ID: MRT4577_180488C.1
ccggggccccgtcccaaatccccctgtcccgctaggattccccccaaaccctcccccaaaaccccagagcggagaagagcgcaagatgttcggcttcgggcaccacggccaccacggccagaacccgccggcgcacggcggcgtgcaccagcccaccttcaagatcttctgcaaggccgacgaggggtactgcctcaccgtccgcgacggcaacgtggtgctggcccccgccaacccgcgcgacgagcaccagcactggtacaaggacatgcgcttcagcacccaggtcaaggacgaggagggcaaccctgcgttcgccctggtcaacaaggccactgggctcgccatcaagcactccctcggccagtcccacccggtgaagctggtgccgttcaacccggagtaccaggacgagtcggtgctgtggacggagagcggcgacgtgggcaagggcttccgctgcatccgcatggtgaacaacatccgcctcaacttcgacgccttccacggcgacaagggccacggcggcgtgcacgacggcaccaccgtggtgctgtgggagtgggccaagggcgacaaccagagctggaagatcctgccctggggcgacgaggcctacgccgcgggaggcagcagcgccgccaacgcgccccgcttcggcggcggcggcgagcccaccgtccgcatctactgcaaggccgacgaggggttcagcgccacggtccgcaacggcgccgtgtgcctcgcgcccaccaacccgcgcgacgagtaccagcactggatcaaggacatgcgccacagcaacagcgtcaaggacgaggaagggtacccggccttcgcgctcgtcaacagggtcaccggcgaggccatcaagcactcccagggcgagggccacccggtcaagctggtgccctacaaccccggctaccaggacgagtcggtgctgtggacggagagccgcgacgtcggccacggcttccgctgcgtccgcatggtcaacaacatctacctcaacttcgacgccttccacggcgacaaggaccacggcggcgtgcgcgacggcaccaacatcgtgctctggaagtggtgcgagggcgacaaccagcgctggaagatcgtcccctggtaaatgtgctgttctgtggctgcactggtcatcaccatgatctggagctttgaaggcatagccacctgtggtcagcagctgctgccgtgttgttagaataaagttggtggcgatcgatcgatctgtggtgatgagtgtccctatctgtgtgtttgtgtttagttccagtcgtctgtgaggaagtcagttatgtttgagtgagaggggtacttcgctcttcggtgaacactgtacttgtcatgaggagagttttcatacccggagtgtaggaactctgtactgtactcggatccttcctttttcatcgaagtgggttttattttatcaaaaaaaaaaaaaaaaaaaaaaaaaaaaaaaaaaaaaaaaaaaaaaaaaaaaaaaaaaaaaaaaaaaaaaaaaaaaaagggcggcctagatcgcga

SEQ ID NO: 88256 - DNA, 727 bp, Zea mays
  Clone ID: MRT4577_180489C.1
ccggccgggagccccgtcccaaatcccctgtcccgctagcggctagtccgaccaggcgatccccccccaaaccctcccccaaaaccccagagcggagaagagcgcaagatgttcggcttcgggcaccacggccagaacccgccggctcacggcggcgtgcaccagcccaccttcaagatcttctgcaagtccgacgaggggtactgcctcaccgtccgcgacggcaacgtggtgctggcccccgccaacccgcgcgacgagcaccagcactggtacaaggacatgcgcttcagcacccaggtcaaggacgaggagggcaaccctgcgttcgccctggtcaacaaggccactgggctcgccatcaagcactccctcggccagtcccacccggtactgtttgtactcctgatcttgcttccccttttttttttctggcgtggtctggttcgttgttggtctgatttcattttggttcttgtatccatttgttcaggtgaagctggtgccgttcaacccggagtaccaggacgagtcggtgctgtggacggagagcggcgacgtgggcaagggcttccgctgcatccgcatggtgaacaacatccgcctcaacttcgacgccttccacggcgacaagggccacggcggcgtgcacgacggcaccaccgtggtgctgtgggagtgggccaagggcgacaaccagagctggaagatcctgccctggggcgac

SEQ ID NO: 88257 - DNA, 374 bp, Zea mays
  Clone ID: MRT4577_18048C.1
cgagcgttcattaaggctcgtggcctaggccaagggcggcattgcacttggtgggtgcgttggcaaaccatctccccaagtgggagagtggacgtcataatttgtgatagagggggtatgcgttcgcgcggccctgccaaatctaaaaatattaattttggtccttggtgccggttgctgtgcgcatgatgtcgcgcggccccttacaaatcggaaaatattacttttggtccttgggtgcgcaggttgctatgctatgcgtgtgtttcgaaggaaatacttgtaatcgaaattttcataagcgtttacttttggtaccctgttgtctgatggctagctctcatctgtcgaggtgaaaagcatgtattctcaac

SEQ ID NO: 88258 - DNA, 763 bp, Zea mays
  Clone ID: MRT4577_180490C.1
tcgaggccggccgggaaagtttaccatcgccatgccccgatccacccacgacacacagagacagaggtcaggtcaccactactagccagctaggcagagccagcaataaacctcgctgcgcaatcgacagaggtttggaagacaatctctgcgcaaatggcgttcccgacggcgatggcagcagtggccgtagccctgtgcgcggcgttcgcgctcgcggcgctcggcggcgccgaggcgcagcagctcagcccggcgtactacgacgactcgtgcccgcacgtctacgacacggtgcggcgcgtgatccaggaggcgcgcgcctccgatccgcgcatcctcgccagcctccttcgtctccacttccacgactgcttcgtcaatggctgtgacgcgtcgctgctgctcgacgagaccccgacgatgcgcagcgagaaggaagccaaccccaacaagggctctgcgcgagggttccccgtggtggacgacatcaaggccgccctagagaacgcctgcccaggcgtcgtttcctgcgccgacgtcctcgccctggcagccgaggtctccgttgagctggcaggaggtccgtactggagggtgatgctgggccggacggacggcatggcggccaacttcgacggtgcccagaaccttccaaacccgacggaaccgctgaacgatctggaagcggagttcgccgacctcgggctcgacgacaccgaattttgtggccctccaaggggcacacacgatcggccgcgcc

SEQ ID NO: 88259 - DNA, 351 bp, Zea mays
  unsure (1)..(351): unsure at all n locations
  Clone ID: MRT4577_180491C.1
gaacgcggacncnnggactcccctctccatcactgcgatttttacttttgcctcgaaaacctaactacagcggaacgcgggggcgtacacgccgatggcctccgcgcaactctcgacggatttatacaagacatcatgccccgacgccgagaagatcatcttcgacgtcgtacagaaacggatcaaagctgaccccgacaccaccgccggccttctacgactagtcttacacgactgctttgaaaatggctgcgacgcgtacatactgaacgacccgatgtcgaaccaggccttcgagaaggaagacggtcccaacgtctacatgaagggctacgacgtgacgaggagatc

SEQ ID NO: 88260 - DNA, 198 bp, Zea mays
  Clone ID: MRT4577_180492C.1
actgacttctaatgattcaagggttggagaaaaaaaacataaaaaggttcaatgcttcaacacatttttaggcctgaaagcccaaaatctcttggaccaacaaccacatttgaaatcctgagctagcatattattatattactttttacttgaacttggcaccaattatttggcgcaacatttataactcttcgcggc

SEQ ID NO: 88261 - DNA, 309 bp, Zea mays
  Clone ID: MRT4577_180493C.1
aacagggttgaaggggaaacctttttttattgtcccaccccattaaaatttaatttccactttttttattaaaagccccggggtttatttgattaattaaaaaactggttttccaaagccataaatcttttatgaccgttttttgagtaaaacccaaattacccctttttaagaacgccgggtttttccgttaataaattcccgggggttttgaggtaaaggccctttttagggttcaacccaagttgcccaagcaaatgtacttgagctccaaattcttgtaaaggccggtattttgaactttttttt

SEQ ID NO: 88262 - DNA, 349 bp, Zea mays
  Clone ID: MRT4577_180494C.1
ccgttttgaagagaagccgattttggaggagacgatgatgagttcggcgggggagcgcaccctgatgatgcagagcgacgacgacgacgacgcccgatccggccacgacgtggaggcgccggagcaggactagaagatcctctagcggatccaattctagatcgaggcaactccggggccatgctttacgctctacatccagaagtggccgtagagttacaggcaattgatcgactttcttagcagcgtgcattcacacaacctgagatttctggggactccaactttgagcaggctgaagtactcttacctctccatcaccgattcttttcagggcaaggtccccgaa

SEQ ID NO: 88263 - DNA, 596 bp, Zea mays
  unsure (1)..(596): unsure at all n locations
  Clone ID: MRT4577_180495C.1
cggncgcgtgggcatgcataaatgtagtttgtcttaaaaacctgacagaaatgcttgacactccaatcaactcatcattccctttggtagattaaaatatgtacacttgggccactcacagggtgttgcccctcccaaaacacacacacacacacctgcttgatgaagggaaatcttcatatatggtgctttctcagtgcttgggaaaaaggagcttttgctgggttccgactataactcatgttttgtttcaaaaagtctacaaaacagattctttacacggatttgtaggtttgcacacatgattttcatgaagaattgagaaaaatgcatttcatgaacattctagacaaagaaggatttcaaaacctgtcagaacatctagctggtagacaaactgaacttaacagctgtggttctcttctacttcctgctattatttttcatttccatttttaaagcagtctcctctcactgagtgacaggacaaagaataggaagtgagactcaaatttcaccatttacctgccatcagcactattgttggtggagtttcaaccagtcattatttgctgaaatgacgttggggggctggg

SEQ ID NO: 88264 - DNA, 741 bp, Zea mays
  unsure (1)..(741): unsure at all n locations
  Clone ID: MRT4577_180496C.1
gccggccggtccctcatcgacgtcaccaacgagcgcaacaccgccttcgccgcggccatcgaccgcgccatggcatcatcctccaagccggcggccaccttccacacgctcccccgaatccgcgaccctcccaccgtcaccaacgacgtcaacctgctcctcggatacttcgagatcatacggcgctacaacgaacacctccgcgagctgctccgctccatccctcggcagagcgtccacgcggtggtcgtggactcgttctccaacgcggcgctcgacgtcgcggccgagctcggcgtcccggcctacagcttcttcacctccaacgcctccgcgctcgctgtatgcctccagctcccctgggcccgtgcggagggccagccgccgagcttcaaggagctaggagacgccactgtcaacttccacggcgtcccacccatgccggcttctcacctcattcccgaagtgctcgaggaccccggcactgagatctacaaggcgatgatgaactcgctgagcaagaatctggaggccggcggcatactggtgaacacgttcgcgtcgctagaggctcgggcggtggcggccctcaaggacccgcactttctcgccgaaagcaggctcaggatgcctcccgtgtactgcgtcgggccactcgtcgnagaggctgctgagacgaaagaggagcacgcgtgtgacgcgtgtctcgcatggctcgacgagcacccggagctcagcgtc

SEQ ID NO: 88265 - DNA, 495 bp, Zea mays
  Clone ID: MRT4577_180497C.1
gtttgtgtcacgcgcgtcgacacacgaggctggggcttcccatacgctcctagaacccgacctaccgagtatgacagcttcgcccgggcggggagctggccacgcgaatcgatcggcttaaggtcgtggcgcatgtcacctgggcccacgaagattgccgttgacgattatgaggcggaagatgatggccatggcggggattacagggattatgatgaactctctggggatgccagtggcaagtcaaagcctatacacgattgagaagaggagccgcaaggccttgctgtagcttggcatgaagcccatcactggtgtcagccgcattactgtcctagaaacccaagattatactctttgccttctgcaaaccggatgtgttgcaatagtcacgaattccgactcgtttgtaatattttgttaggctaagtatcgagacctaatttaccagctgcagacccaggcagcagaacaactcaaggcttctgacttgag

SEQ ID NO: 88266 - DNA, 406 bp, Zea mays
  Clone ID: MRT4577_180498C.1
agatcttcttctctctgggtcgtcaagatctcaatgtagaatgcattgatggattggctgcagtcctgagtgtccagcactacgagaagttcaagggtgataccagatacaacttgtggcaaccttatttttgctgtcggcagattgataatggtgacatcaaaccttttgatgtcacacagctgcaaggctactggagccaggaagtacttaggaccatgttcaatgcaacttcctttttgaaggttttatggggagaacatccaacaattgtgtcctggttgccatgtggaagtactctctcaggataagtggttaaggggatgttggtttagatgtttgattctgaagaggcttaaagataaaatcaaggtgcgctacctagaacttcaggatgctgatgaga

SEQ ID NO: 88267 - DNA, 1941 bp, Zea mays
  Clone ID: MRT4577_180499C.1
aagagatgaagagacttattgcttatgtggaagatctctacgaggatacaaactcatgcaacatggtcaaggtacaatggttcgacaaagttgatgaggttggtgttcccttgcccatggatttcgatgacagggagatcttcttctctctgggccgtcaagatctcaatgtagaatgcattgatggattggctgcagtcctgagtgtccagcactacgagaagttcaagggtgataccagttgcaacttgtggcaaccttatttttgctgtcggcagattgataatggtgacatcaaaccttttgatgtcacacagctgcaaggctactggagccaggaagtacttaggaccatgttcaatgcaacttcctctctgaaggtgcgtttcaaggtccctaaatccagacccagttcagatggagggctgaagaggaagcgtgatgcattcaacgatgatgctaatccacagaagttcatttcttctggtgcttctacttctaggttttatggtgagaacatccaacaattgtgtcctggttgccatgtggaagtactctctcaagatagtggtataaggggatgttggtttagatgtttgattctgaagaggcataaagataaaatcaaggtgcgctacctagaacttcaggatgctgatgagactggaaacttggaggagtgggttatgctaacacgagttgccaaacctgatcaactgggtgtacgtttccttggaaggccaatggttcgtccacagcgcgtggaacaaagcaaggcctcatgctttgatgttggagccattgttgatgcgtggtggcatggtggctggtgggagggaatcgtgctgtaccaggtgggcagtgggcgtctacaagtttattttccaggagaaaagcgaacagctgaatttggtgaagatgagctgaggtgttcccttgagtgggttggtaacaaatggaatcctttgaagggaagaaaagatgtcacaagcaagctgacctccactgcagattgtggaagtgaatatttgattgcgaaacaagatccactgaattttcatgtgcctaaaaattcagaacctcaactagagggacatcaatatgacaagaggggtattgagaaatcttcagtcagcacaatttcacgagatcagaaacgtgtccttgccgacctgactaatgatttgaagttagataacttgaggtggaggccaagaaagaggagcagaagatctggctcaagaaagcagtcggacacaagcagtggaagcagcagcggggacatggacctgttcagccccagccccagtggaagctttggtcaacataatttagtgcctgacgaggagacatgcaagagcagtggagagcagacttttatgggtgtgcctgtgcaggttcccaatcttgtgatgtccaggtgaaagccatcttagcaccggttgaagattaacatgttagcttctggagttacaccgaccttggcgagatgtggttttgtgcatccccaggttatttttgccagcacaacccagatccagttttctgcagtttttttggaggctcatcagctgtgatcagttagatgtgaaaatgtctcaccaagaaccagtatacagtttgtatgtagggagagaagaaaatgctcggtttggttttggttttagagctttcagttttttttcttttcttttcaatcctagtctttgttgtttgaaggacaggtcctagatttgacatagcctctttacatcggttattctttcccatagttgtcagtacttggtagtccttgttttttatttgtccatgcagtcttgtagcagtcgcgcgccttacgtaaaattatcctgaactgaactcagtgaaatgtcacaaaatagtgcttattgcctatttctgtgttcttttaaatgtcagttagggtactagttgggttac

SEQ ID NO: 88268 - DNA, 384 bp, Zea mays
  Clone ID: MRT4577_18049C.1
atgggaaagggttttttaatgggcatagatatttttcacgggtacgagtttgggacgacaaaacccagcgggtttatacccattgccatctctactatgaaggttgagagtgagacggtaccatcgcagccactaccacaaccacaaccacaatcacagacagggctgccatggcatctgtacgaacaggccaccctcaaaaaattccgtacgaacagtccaaacgcgcagggacagggccagggcctcagtgtcagggagtcaggggccacagccgcagcgggcacggtcctcggcgaaactgggtatgcagagacagcgtccgtagcacgaccgcttaccgctgggcggcgccggcgatcgctgcacaaatcgctcacatga

SEQ ID NO: 88269 - DNA, 538 bp, Zea mays
  Clone ID: MRT4577_1804C.1
ctctcttcgaggctttaccacaaacttggtcaacgctgcgttcagattctaaaacaccttttcccgcctcgagaagcaaatgctaaagtgggaaatcgtgtggttactttcaagaatatcgaggatacaattgaagtccgtcaccatgttttcgtgaagacgggataccaatctgtagagctggcggaggtcgggccgaggatgagcatgcgcttgttcgagattcgcgcgggtacgctggataataaggagggagatgtcgagtggcatcttaaccagtacacgaggacgggcaggaagaaggattacttgtaagggtttggaggttatgcatggaaatcggctgggctgccttcgcttacgagatattaacaccatgtggaggctcgccaggaagaaatagccaagaaaaagggcacgaaaaaagtcgtttcgaggtcattttgcacatggtaatggttttggtacatatgatttgggagcagggcgttagagcatgcatgtgggacaacaaaagagcccaaaaatatcaatatgc

SEQ ID NO: 88270 - DNA, 346 bp, Zea mays
  unsure (1)..(346): unsure at all n locations
  Clone ID: MRT4577_180500C.1
acctgagaatcccccttatttttgcacaattgatggttgtgtcctgtagtggctttgagtgatgcatcactcctaaacgattttagaaagctataccaactaatgtgtggaggacctgggcaaggggtggtagtcgcgctggttcgctatccacggcggcaagccgcctactcgaagatcccacctccgaggacgccgctacggggaggacatgggcactaatcttgaactaaaactaggggggtgtctatgtaagttaatactttctctcacatttgcatcaaaatttgttttccgatngaaaacacgcaagcgaaaccgtacacattgaaaaaaacctaaagcg

SEQ ID NO: 88271 - DNA, 2187 bp, Zea mays
  Clone ID: MRT4577_180501C.1
cgggttgtaaaaccaaccagcctaccacccgaggccgagtgcgtcgctttcctcctccaggcctccaccctcgagacgagacgggagggggagcgagcacaaagcggaataaagaaaaggccgggaaaagcgagggcactgcgcctccgctgcggcctgcggcgccagcgccagccaacccctccctcctaccagtaccagtatttgtttgtttatttatatgtatatataaaaccgtcgctcactccaccactgaccactctaccgagccgagcgccgggcggcctttggactcgtaccactccgcaggcggaacggaacacgggcgagggcgtctccaccctcccgagctcgtcgtcaccgtcaccgcaccaccgaggcgcggcgcggcgggcttcgctcggcgagggaggcgcgccgtccatggaggcgatggaggaggccaacaggacggcagtggagagctgccaccgggtgctggctctcctctccaacccgcacggccagctcgtccccagcagggagctcgtggccaccaccggggaggccgtagccaggttcggctccctggcggccaagctctccagctccaacggcaatggcctgcagggccacgctagggtcaggaagaccaagaagcccctgcccatcttctacagcaacctcttcctcgagagcagctctgcggtggccgccgccgccactgtggccaagacgggaggggatggaggaggccaacaggacggcagtggagagctgccaccgggtgctggcgctcctctccaacccgcacggccagctcgtccccagcccgagcccgatccctggcctccagctgttcccgaggtaccaccagtttgagggctcgtcgtctcaggatcctggggccgatccctacccagttgcccaagaggttgctgctagagaagccgactgccggtatggaggggtcgacgtcgcagtcccctccgatcgtccagatggtccagccggtgtccgttgcgccccccggagggacgcccagcccggcactgccccccggtcgccttcatttcaaccagcagcagcaaagctaccagaggtttcagctcatgcagcagatgaagatccagagcgagatgatgaagaggagcaatcttggtgatcagggtggtagcttaagtggcggcggcggcggcggtcgtaagggactgaatctcaagtttgacagctctaattgcacggcgtcatcgtctcgctcgttcctttcgtctctgagcatggaaggaagtcttgcgagcttggatggaagccgggccagcaggccgttccagctagttagtggctctcagacagctagcacaccggagctgggcctggtgcaaaggagaaggtgcgctgggaaggaggatgggactggtcagtgcgcaaccgggagccggtgccattgttcaaagaaaaggaagctaaggataaggaggtccatcaaagtccctgcaataagcaacaaggttgcagacatcccagctgatgagttctcgtggaggaagtatgggcagaagccaatcaagggatccccacatcctaggggttactacaagtgtagcagtgtgagaggctgccccgcgaggaagcacgtcgagaggtgcgtggacgacccctcgatgctgatcgttacctatgaaggtgaccacaaccacaaccgagttctagcccagccagcctgatctctcaggctatcaattcaagatcgcttctacagtcaccctccctccctccctagagaagggatgacaacgacgacaatagcaataacaagagcctagtgcctgtacatatgttctgcttctaacagttggaggagagagtcagttagctagctctttcagaagaatcaatggtgacaggggggaaacttgtcatgtcgatggagaaagggggaggggttcctcatcaaatactctagttttgtagttttggtttctcttttgtgttcgtcctgtgctagggcccatcttgtggttgcagtgtgacattgagccgcagttgtatgtctggtaatggtgttaggggattggatcgagaagaagggcacaaggcaggaaaagtgcctgtaaaagtggctacacctaggaacagaatgtacaatcgtcttcagtccagtggtacaatcttgttgacgcaaaaaaaaaaaaaaaaaaagcggcc

SEQ ID NO: 88272 - DNA, 676 bp, Zea mays
  Clone ID: MRT4577_180502C.1
gccggccggtccgggattctgatcacttatttccactttctgcttgctttgtgctccatggacatacagacacatcatgtacagatctagtagagaggctacgtggtggacctcgaacgaaaatgctgccgatgttcagcggacagctgatggaggtgccgctacacctggtggggtggggccgccggacgccgccgcccaatacgaatgagtaacagctcctgcggggcttcctgggcgtctacgacacggactggtacgtgtggctctgcgaccacggacacctctgttactcacatatcaaccaggagctcctccgccccatagtcgttcttcgtcaaagaccaggggtactgcctgtgcgaagcggagctggaaaacctggatcgattgatccaacaatacattttggagagttatgacttcaaagaggtgctcctcggcatctatgactatcacacgttgcgagactgttcggcctacccggacagattcatgctcgaccagctcaccggttcctacgactgcgtcctcttctactagtccaccaactcactggtcgtctgattcaaccccgacgccaggaagttcgctcttctggaagatcgcctcccacgactgagtcgccttctccgacgacatcgacatggtcacaggatcatgcgtctagcttgtc

SEQ ID NO: 88273 - DNA, 389 bp, Zea mays
  Clone ID: MRT4577_180503C.1
gctaccaataccgtcgacgacgtgttcagctcttcggtgggcgcggcgtacgccgcaagcccctgtgcgcgaccgcgttctccatcctacgacgacgacaaaccagtcttcgatgcatggcctctcttcgacgaggaacctgtcgacagggctaccactcaggctctcttctccgacgatgtcgaccactgcttcggcgacgagctcgacaccgaccggaccatggagttccgcttccccacctccgagttcgacatcaagcaggtcgtggctgtggtcagcaacaccaaggactcgctggagttcgccagcgcgcgacgggtcgagatccgcacgcgcgtgaccgtggcgtgcgaggactgggtggtggatcacaacgtggatgccgc

SEQ ID NO: 88274 - DNA, 950 bp, Zea mays
  Clone ID: MRT4577_180504C.1
gcgtcatcgtctcgctcgttcctttcgtctctgagcatggaaggaagtcttgcgagcttggatggaagccgggccagcaggccgttccagctagttagtggctctcagacatctagcacaccggagctgggcctggtgcaaaggagaaggtgcgctgggaaggaggatgggagtggtcagtgcgcaaccgggagccggtgccattgttcaaagaaaaggaagctaaggataaggaggtccatcaaagtccctgcagtaagcaacaaggttgcagacatcccagctgatgagttctcgtggaggaagtatgggcagaagccaatcaagggatccccacatcctaggggctactacaagtgtagcagcgtgagaggctgccccgcgaggaagcacgtcgagaggtgcgtggacgacccctcgatgctgatcgttacctacgagggtgaccacaaccacagccgagttctagcccagccagcctgatctctctggctatcgattattcaagatcgcttccgtagtagtcaccctccctctctagagaagggaggacagcaacagcaacaagaagagcctagtgtctgtacataagttctgcttctaacagttggaggagtgattcggttagctagctctttcagaagaatcggtggtgacagaagggaacttatcgatggatgggagaaagggagagagagagagagttcctcatcagatactcatactctatttttgtagcttcggtttatctctcttttttgttcatcctgtgctagggcccatcctgtgggtgcagtgtaacattgagctgcaattgtatgtctgggaatggtgttgggggggattggatcggagaagaaggcatgtggcaggaaattgcctgtaaaagtggctacacctaggaacagaatgggccatcgtcttcagcagtggtacagtcttgttgacgc

SEQ ID NO: 88275 - DNA, 146 bp, Zea mays
  Clone ID: MRT4577_180505C.1
gacgcaaaccagccggtatatggcgacgaagcatgtcgccgctatacgacgccgtatccggaacccgcaagccccgcgatcggaaccccaaaacgcatgcccatggcacaccctcaagaaaggcggaggcaacgctggacgtatat

SEQ ID NO: 88276 - DNA, 1034 bp, Zea mays
  Clone ID: MRT4577_180506C.1
tttgccgggtatagtgcaattgtacccactgatttcatgctatcttatttaaatacgaccaccagtgctgttgagctcaggtaagtatctctcccttttcatgttctggagtgcatgatctcccatgaaggaggcaccacaaaggattgtactgatatgaaaaatatgaacaagcatcctctccctagtcttatgctgcttatagcattgggtcgtttggcttctaacctaagttctcagttttgtttcctactattttacaataagcatactgactacaagcatacatttatggttacaaacctgttgtaattctggtagcatgcctgttgcaatccaagaaaggccacaactggcaacctcttttggagcacagttcactctcctgtacctttgtcaaaatatgcagatcacagatactcacaaagctcaccggccttgcaggggttactacaagtgtagcagcgtgagaggctgccccgcgaggaagcacgtcgaggggtgcgtggacgacccctcgatgctgatcgtcacctacgagggtgaccacaaccacagccgagttctagcccagccagcctgatctctctggctatcgattattcaagatcgcttccgtagtagtcaccctccctctctagagaagggaggacagcaacagcaacaagaagagcctagtgtctgtacataagttctgcttctaacagttggaggagtgattcagttagctagctctttcagaagaaatcagtggtgacagaagggaacttattgcgtcgatggatggaagaaagggagagagttcctcatcagatactcatactctatttttgtagcttcggtttatctctcttttttgttcatcctgtgctagggcccatcctgtgggttgtatgtctgggaatggtgttgggggggattggatcggagaagaaggcatgtggcaggaaattgcctgtaaaagtggctacacctaggaacagaatgtactatcgtcttcagcagtggtacagccttgttgacgcagtggtttt

SEQ ID NO: 88277 - DNA, 750 bp, Zea mays
  Clone ID: MRT4577_180507C.1
ttcgggcgggactctaccgagccgagcgccgggcggcctttggactcgtaccactccgcaggcggaacggaacacgggcgagggcgtctccaccctcccgagctcgtcgtcaccgcaccaccgaggccgggcttcgctcggcgaggcaggcccgtccatggaggggatggaggaggccaacaggacggcagtggagagctgccaccgggtgctggcgctcctctccaacccgcacggccagctcgtccccagcaaggagctcgtggccgccaccggggaggccgtcgccaagttcggctcactgacggccaagctctccaactccaacggcgatggcctactgcagggccacgctagggtcaggaaggtcaagaagcccctgcacatcttcgacagcaacctcttcctcgagagctctgcggtggccgccgccgccgccgccgccgctgctccggccaagacgcccagcccgagcccgatcgctggcctccagctgttcccgaggtaccatcagtttgagggctcgtcgtctaaggatcctgtcaggatccctacccagttccccaagaggttgctgctagagaagccgactgccggtatggacgggtcgacgtcgcagtcccctccgatcgtccagatgggccagccggtgtccgttgcgccccccgcagggacgcccacccccggcattgtcccccgcttacccttatttcatccagtcacagcaagctaccagagggttcagcttct

SEQ ID NO: 88278 - DNA, 311 bp, Zea mays
  Clone ID: MRT4577_180508C.1
cggacgcgtgggttcgtagctaagaacgtacagggagagagagagagttgacagcagggagcggcaggaagggagaaaagcggaagagcgccgtcgacggcttacgtccagggtcgatccgtcctcaatagatggcttgtgaggatcgtagaggtgtactaatggtgtcttgaccttgacccactggaacttgtgcggtcgcatggcaatttctcgccgaagtggatgaaccaccgtaattccggcctttatcgtggcctgacctgtcgtcattttcactgccgtgcgaggacacgtgtcatcttgaaatg

SEQ ID NO: 88279 - DNA, 168 bp, Zea mays
  Clone ID: MRT4577_180509C.1
aagtaaaacaaaggagcatagtggacagggtatacatacatacctacatacatacatacatacatggtagatataagttggattacccggcaattaatattgacggggatggggacaaaattaccaacaatcatctttatttatggtcaacatattataacaaaaccc

SEQ ID NO: 88280 - DNA, 304 bp, Zea mays
  Clone ID: MRT4577_18050C.1
caaaaaaaaaaaaaaaaaaatataattaaaattttttttttttaaaaaaaaaaaaaaaaaggccggcccggtttaaaaaaaaaaaattttccaaacccaaccatccggcccccccgcttaaaaaaacccaaccctacaatcccttccatccaccgtcttattacatctataggaccaccaaaaaccaattcactgcccatctttataaaccttcatcacatgaaaaacccggccgttaccaaattaaataactttccaaaacatatctcttttcccaacagttttaaaaccaaaaaggcccaaa

SEQ ID NO: 88281 - DNA, 593 bp, Zea mays
  Clone ID: MRT4577_180510C.1
gggcttgaggcagcgagggcgaggcgcttgtcgttggcggtcacggtggcctccgaggcgtgcggcatacgccgacacgagcccgcatcgcttgcgactcgccctctcggtgctctgggcgatactctgaggtccagcacggaacgccttcaccccctgcttcgactcgtacgacgtctcgctcttcatggaactccagctcgtcgtctccgcctccttacacctctgcggcttccacgacccggtgacattcctctcgcgcgcggtaggcgtgctagcgccggtgctccacgaaacagccgtggcgcacgaggttggggagcaaccggtaggggtgaacatgaggctcgtgacgcacgcggaggggctgcaggtgatcaacgtcaacactgagctcaagaggccataggaggctctcgcagacatgcgcgcgtgagttgagcatcaggagctcatggtggctcacgccaccctggagcacttcaagcatgtacctgccacctctgggagaaggcacgtcagcctgaattgagttcaagcaggggctgaacttctgccaggaggcgctcgagactgcatgagctcgacgctga

SEQ ID NO: 88282 - DNA, 599 bp, Zea mays
  unsure (1)..(599): unsure at all n locations
  Clone ID: MRT4577_180511C.1
tgctctgcaggccgcacaccggccgggccgcgcgctgagatcccggcgtcccgcgccgcgtccaccgtgctgggaacccgcctgcccctccacgtgcggtcgtgccggtcgtctccatattcgctgcttcctccgcgaccatgctccactcctccaccccgtccggccgtccccaagccaaaggcaccggcgtccctcggctcctgcctccggcctgtctaccgccacctgtcgcccgcggagaaaccccaggtccgcatcaccgccgcgtaagatgcacaattgcacacgatgaaaaaaaggccagggaggacaccagtgacacacacgctgcatcctcgcgcgcccctgtgcggcttcccgtgccacagagcgtgccggtaagcgcgcccttgcagatggactggacgacgcccaacagcggctcgaggaaatgccagcaagaatgttatttttgattcaagggagcatgatgcaagcttgctgagggccattgcttctgaatacgaagttttacattcgtaatattgattggctgttgctcaagcaaatgattgtngtcctgttacctggatgtcgtttcgtggctatattctata

SEQ ID NO: 88283 - DNA, 1596 bp, Zea mays
  Clone ID: MRT4577_180512C.1
atggacccgtacaagcaccgcccgtcgagcgccttcaacgccccgtactggaccaccaactccggcgcccccgtgtggaacaacgacagctccctcaccgtcggcgcacgaggtcccatcctgctggaggactaccacctggtggagaagctagccaacttcgaccgcgagcgcatcccggagcgcgtggtgcacgcgcgtggcgccagcgccaagggcttcttcgaggtgacccacgacatcacccacctgacgtgcgccgacttcctgcgcgcgcccggggtgcagacgcccgtcatcgtccgcttctccacggtgatccacgagcgcgggagccccgagacgctgcgcgacccgcgcgggttcgccgtcaagttctacacccgggagggcaactgggacctggtgggcaacaacttccccgtcttcttcatccgcgacggcatcaagttcccggacatggtgcacgcgctcaagcccaacccgcggacgcacatccaggacaactggcgcatcctcgacttcttctcgcaccacccggagagcctgcacatgttctccttcctcttcgacgacgtcggcatccccgccgactaccgccacatggacggatccggggtgcacacgtacacgctcgtcagccgcgccggcaccgtcacctacgtcaagttccactggcgccccacctgcggcgtgcgctcgctgatggacgacgaggccgtcgccgttggcggcgccaaccacagccacgccaccaaggacctcacggacgccatcgcggcggggaacttccccgagtggacgctctacatccagaccatggaccccgagatggaagaccgcctcgacgacctggacccgctggacgtgaccaagacgtggcccgaggacgcgttcccgctgcagcccgtgggccgcctggtgctcaaccgcaacatcgacaacttcttcgcggagaacgagcagctggccttctgcccgggcctcatcgtccctggtatctactactccgacgacaagctgctgcagaccaggatcttctcctactccgacacgcagcgccaccgcctcggccccaactacctgctgctaccggccaacgcgcccaagtgcgcacaccacaacaaccactacgacggatccatgaacttcatgcaccgccacgaggaggtcgactacttcccctccaggtacgacgccgtcaggaacgcgccgaggtacccgatcccgaccgcccacatcgccggccgccgagagaagactgtgattagcaaggagaacaacttcaagcagcccggggagaggtaccgcgcgatggacccagcaaggcaagagcggttcataaccagatgggtcgacgcgctctccgacccccgcctcacccacgagatcaggaccatctggctctccaactggtctcaggccgacaggtctctgggccagaagctcgcgagccgcctcagcgccaagccgagcataactcttgtagaagacagaactcgtccaaaacaacatcgacactgcattcatggttattgtgcagaagcagaactcttggtttcagttgaatgtttggctgggtttccatccgaataa

SEQ ID NO: 88284 - DNA, 2068 bp, Zea mays
  Clone ID: MRT4577_180513C.1
cattgggtacctcgaggccggccgggctcctcgcaggcgaccttgcgtacgtacgtcgtagcggatcgtccagctcgctcgccaccgccatggacccgtacaagcaccgcccgtcgagcgccttcaacgccccgtactggaccaccaactccggcgcccccgtgtggaacaacgacagctccctcaccgtaggcgcacgaggtcccatcctgctggaggactaccacctggtggagaagctagccaacttcgaccgcgagcgcatcccggagcgcgtggtgcacgcgcgtggcgccagcgccaagggcttcttcgaggtgacccacgacatcacccacctgacgtgcgccgacttcctgcgcgcgcccggggtgcagacgcccgtcatcgtccgcttctccacggtcatccacgagcgcgggagccccgagacgctccgggacccgcgcgggttcgccgtcaagttctacacccgggagggcaactgggacctggtgggcaacaacttccccgtcttcttcatccgcgacggcatcaagttcccggacatggtgcacgcgctcaagcccaacccgcggacgcacatccaggacaactggcgcatcctcgacttcttctcgcaccacccggagagcctgcacatgttctccttcctcttcgacgacgtcggcatccccgccgactaccgccacatggacgggatccggggtgcacacgtacacgctcgtcagccgcgccggcaccgtcacctacgtcaagttccactggcgccccacctgcggcgtgcgctcgctgatggacgacgaggccgtcgccgttggcggcgccaaccacagccacgccaccaaggacctcacggacgccatcgcggcggggaacttccccgagtggacgctctacatccagaccatggaccccgagatggaagaccgcctcgacgacctggacccgctggacgtgaccaagacgtggcccgaggacgcgttcccgctgcagcccgtgggccgcctggtgctcaaccgcaacatcgacaacttcttcgcggagaacgagcagctggccttctgcccgggcctcatcgtccctggtatctactactccgacgacaagctgctgcagaccaggatcttctcctactccgacacgcagcgccaccgcctcggccccaactacctgctgctaccggccaacgcgcccaagtgcgcacaccacaacaaccactacgacggatccatgaacttcatgcaccgccacgaggaggtcgactacttcccctccaggtacgacgccgtcaggaacgcgccgaggtacccgatcccgaccgcccacatcgccggccgccgagagaagactgtgattagcaaggagaacaacttcaagcagcccggggagaggtaccgcgcgatggacccagcaaggcaagagcggttcataaccagatgggtcgacgcgctctccgacccccgcctcacccacgagatcaggaccatctggctctccaactggtctcaggccgacaggtctctgggccagaagctcgcgagccgcctcagcgccaagccgagcatgtaagatcaaccagacaagggcgccgcgcgggggaggacggacggagctctctgtctgctttcgctcatgcatgtatcatatgcatggaaccaagacaaattactctagcagactagcacgcatactgaatcgcgtttccgcctgatcctttccctagtttagttttttttcgccccggataaaggctgctagcttggttgtaataatggctggctgtgtccagaactcttgcagaagacagaactcgtccaaaacaacatcgacactgcattcatggttattgtgcagaagcagaactcttggtttcagttgaatgtttggctgggtttccatccgaataagggctttgtttaatctcgatccatacgaattaaacgagattgagtgggtttaaatctctaacaagttaatactctttctaatttctttcaatctcatccaatacatgtgcaatggccggacaaaaaaaaaataaaaaaactcgagggggggcctggta

SEQ ID NO: 88285 - DNA, 391 bp, Zea mays
  Clone ID: MRT4577_180514C.1
tttgtggcgtgggcggtggcacaggacggggagagcgatctccttggacgtcagacatggcaggcactgtaccagaagaaagtcatcaaggagagaatccacgcatgaagaccatgatgcatccgtctatgtggacggacatatgtacaatggagcagaatgaggttgacgttgacatgtgaaaaggcgtatagcgagtgtaccttggttgcaaggtggcaggcctacatgatccaaactatgacgacgcaggcgatgttagctgcataccaggaatcacgacagccgagcactgaaggacagaatggacgcacacgacgtgctgcatgtggtgattttgtccgtgacccgatgcaacagatatcaggctgatagcgtctcgaaagaaact

SEQ ID NO: 88286 - DNA, 246 bp, Zea mays
  Clone ID: MRT4577_180515C.1
ctgttcaagtatcaccattcagtgttctggctggaagagatgctccttggtgaagtgacgtgcatctcattctgcagtggtagtagactaatcaccctgcatgccttgctataatgcaactactttcactgacttgatgccattggactgaggtttcgcgatgtacaattaccaagctttcttatcgaagctaccactttttgcgtgagtttcaatacagcagtgaccttgcttatggatcttcct

SEQ ID NO: 88287 - DNA, 1355 bp, Zea mays
  unsure (1)..(1355): unsure at all n locations
  Clone ID: MRT4577_180516C.1
atctgctggggcaaggaggttttgggtttgttcacaaaggagtgctaccagatggcacagaggttgccgttaagcagttaagagatggcagtggcccgggacagcgcgagttccaggctgaagttcagattatcagcagattacatcacaagcatcttgtatccttggtcggctattgcatttctggagcccacaggttgctcgtctacgagtttgttccaaacaatacattggaattccacttacatggaagaagcagaccaaccttggattggccaacaagactaaaaattgctttgggttctgcgaagggattagcatatcttcatgaagattgtcatcctaagattattcatcgtgacataaaggcctcaaatattcttctcgatctaagatttgaagctaaggtggcagattttggacttgcaaaattcacttctgatgcaaacacccacgtttcaaccagagtgatgggcacatttgggtatctagcacctgagtatgctgcttctggcaagctcactgagaaatcagatgtcttctcttttggagtaatgcttcttgagctaataactgggcggcgccctgtaaattcaagacaagcggacgacaacctggttgactgggcaaggcctctgatgataaaagcatttgaggatggtaatcatgatgctctagtggacccccggctgggaagtgagtacaatgataatgagatggcgaggatgatagcctgcgcagctgcatgcgtccggcattcttcacggcggcnggccacggatgggtcaggtcgtccgggcgctggaaggcgacgtatctctggacgacctgaacgagggcgtgcggcccgggcacagccggttcgtggggtcgtacggcagttcgacgtccgactacgacaccagccagtacaaggaggacctgaagaagttccggaagatggcgctgggcggcagcgggctccagagcagcagcgcgcagacgccgacgagcgagcacggggagaacccgtcggtgtcggtgtcgagcagcgatggcgacggcggcgcaggaggcggcggaggagccggcgaggagcgtgaagacagacggcaggcagcgtcgtgactcgtgaggcgtgcccagcctactacggcccccgcgcatgcatctgtagatcctagtcctctcgacatcgctacgtacatgcctaattgatagctgacctgtggccgggaggcgggagaaccgagagattcatgattgctttcttttcttttgtgtgattctcttggtgggtacgtacactggtctcatgcatgcgatctctgtataaattcacgacccttaggaactgattactattggctattcgt

SEQ ID NO: 88288 - DNA, 257 bp, Zea mays
  Clone ID: MRT4577_180517C.1
gaaacaacacttttttctttttatttcaactccctcattcaaggaatatgctcacactgactcttccttccatggggttctgagacacatttttacttaatcatcgcctttaaatgactcatctagctagctagccaccgtttatgctacaacacatagattcttcattgggggacaccggcggtcacactccagtaactgacggtgattgtcgggcctgtcagagcccgctcaatgcccctacggtctaggcgaat

SEQ ID NO: 88289 - DNA, 316 bp, Zea mays
  Clone ID: MRT4577_180518C.1
ggccgcccgggcaggtacaagcttttttttttttttttttttttttttttttttatggttttttttttttttttgatttgtccattattgacattaagcggccgatagacccaaaaaaaccaaaacttttttatgaacccagcaatttattattggccataccaaacatgatggtgtttccccacatactgaattatgacatatggggggggggagagatggatagaggaaattagccaaatatgaggaattagccaaagggcggaatgccagcggaggaccccaaaggggttggtgccgccacagggcatgtggc

SEQ ID NO: 88290 - DNA, 408 bp, Zea mays
  Clone ID: MRT4577_180519C.1
attgggtacctcgaggccggccggggattgaacctcccctgacatccccagttttccaacttggctaccggccccctacgaccgttaggacgttctgcaatcgcttgcgccggcgcacgcgtcggacgctatacaatacccaattacgggactgcattccgtatagaccttcgtgagtgcacctgtaccgccacatccggcacgataacgactacaatatccaccagatgtacatacggggtgttccagagactctccgagcagcctattcttggacgatccctggacgttcgcgaaagccgcttcaccgtgactggaggtggaaaccacctgcctcctgctgtaccgggagatctggaaccgactggcctacatgaggctatatctggtacactgccgccaactgtt

SEQ ID NO: 88291 - DNA, 513 bp, Zea mays
  Clone ID: MRT4577_18051C.1
cgcggggctgctctttgcttcaagagttaaatttacctaccttgtcaaggtcttgttccatcattgatccgggtgtcgcttctagtagtctgatggactgttagcagtttgcgttgcgtcggttgagagggaacggtggtggtggtggtgtgtgtgcaaaaaaaaaacaaaaaaaaaaaaaaaaaaaaaaaaaaaaaaaaaaaaaaaaaaaaaaaaaaaaaaaaaaaaaaaaaaaaaaaaaaaaaaaaaaaaaaaaaaaaaaaaaaaaaaaaaaaaaaaaagtgtaaaaaaaaaaaaaaaaccaaaaaaaaaatttccttccccggcccccctttaagggggaaatttcaaaaaattggggggccttttttgggggttcgggtttgggcccaaatttggggaaaaatagggataaagttttttctggggaaaattgttttcccggtacaatttgcaaaaaaaaaaggggccggagtaaaaaaggtaaaacccgggggggcccttggggggggt

SEQ ID NO: 88292 - DNA, 344 bp, Zea mays
  Clone ID: MRT4577_180520C.1
atggtcacattttacttttaaaacatgacatacaacttattgcctcagggcaaaagggcgtatatatatatatgagagctaacacaacaaagtttaacatctgcaaaccccgccaggagaactaccctaataaacaaaaacattcaacaggctgtggccttcagaaggaaatggcactgatggttatttccttccgcgtaacaaaggatctgtggaacaacctaaaactacggcgaactatctcataaaacaaatgcttttgtctatccagcaccaggaaggagtagaatagaaaatgaaaaaacaccctctgaagaagcaacgccctgaaaaaaaatgaggaa

SEQ ID NO: 88293 - DNA, 270 bp, Zea mays
  Clone ID: MRT4577_180521C.1
gcgcgacgcatcagggagacggaggtcatttacgaccgtgctccctccgctcgctatcgctaaatggcatgatattccgtcactttattaaaacatctcagctgaatctacaacaccttgggagaggatgagagaaattaatcaagtttgcatgtcggagagcgagttatcatgatttatcatcttttgagtgttttttggattcggggctctattacttgccgaaaggaaatgaagcttgctcaaaagagaaggagaatgtaaagcgag

SEQ ID NO: 88294 - DNA, 384 bp, Zea mays
  Clone ID: MRT4577_180522C.1
ccggcaaaatcctttattttgtaaacagaaggttcataaggcctcatggggacctttaaaaagagccgttaaagtttctgtcccccacccaaaaaaaaaaaaaaaaatttggagcccgcgtaacaaaattgacgacggttgttagttttttgccggaggcgacttgggccccaggctttcaatctccggggttggcacaacgagggggggagcctttgggggagggtttcggccaccgtcaccttgccatactttcccatccttggttggaaaactcctaaaggatgcctgcaaaaaaaaccggtaatcgagatgatgatgtaaacggttcaaataacagcgcatgaggttgaatatccagctttttacctctttgttgaaaat

SEQ ID NO: 88295 - DNA, 290 bp, Zea mays
  Clone ID: MRT4577_180523C.1
taaaaaaagagaaaaaagataaaaacaaaagacagaaagaaagggaaaaaagaaatatcacatcctgtttctctcctaaattgggaaaacttacaaggaactacagtaaagatctatgagaatagtgcaaaaaggggaaaaccaaagagttcctaaaaattcctattctcttaaaagtagcaaaccaaattgctgttaccctctacatggtccatttcccacatggttttggaagtacaaattgggtaaacaccaatttttagctattactatttctgctattttaaaaa

SEQ ID NO: 88296 - DNA, 371 bp, Zea mays
  Clone ID: MRT4577_180524C.1
gtatactgttactgtaacacacacaccagctggggactacaatatttttctgtatcccatgctatccccactatacaaggctcacactctataaacaacagcacattactctcaaaccatgaatgtgtactacaagcccatcatatcaaaacctaccaatcatatcacttcaattatcccacacctactgactcaatttaacttttactaaatatctactcactctctatcatttatcaaaaacaatcctatacaatataatttaactgctcataattttaattcaaaaccatatattcattcaaccatcattcacccattatccgccattacataattatctaaagaatttcatccattagatgatgact

SEQ ID NO: 88297 - DNA, 249 bp, Zea mays
  Clone ID: MRT4577_180525C.1
aagaaaacactaccgccaaacttaataacccagtagcaaagcgggggaataaagccttacaatgtaagttgtaaaccacacgacgacagatagattataaccgacagatacataacatgatgggagccactcagggcacatgactggataacagtggcacacaagcccgacgacgccgtgccagtagagcgtgtagtatttgtcaccctggatcgccgtactcaccctccgaaaactcaacaccgaacc

SEQ ID NO: 88298 - DNA, 288 bp, Zea mays
  Clone ID: MRT4577_180526C.1
aattggaccaattggctggcattacctagatgacaagaacagtttctatgtggccttggaacgagtttcccatgagtaactgaggggaggggtactcatctccatctccaaagataaacctactccccacaagaactggcctttaatgtggtataactgttccgctgcctcctggcgtggccagtataaatactgagtaccagcatgtccatttgaacatgcagagggttaatcctgcttcctaaagcctcaagtacatgcctcctgcttagttcactttgtatcaca

SEQ ID NO: 88299 - DNA, 339 bp, Zea mays
  Clone ID: MRT4577_180527C.1
cccgaagctgcaatgagcatgtgtaaagcgctaaaggatgacaacttcggtttaaagtggttaccaaggtccaccataatattgagctgaagaggaaaagaccggtgaatcactggtgttttgtatcaggattatgtatatatgttaaggtcacaaatgtatttttatcgggctatatcccgtgcctataaatgggtgaacagtactcacgtactgttcacgctggattgtaattggtctcgggtcattgactccaaacaagccgaatgtatcgatgtaatacaaactttgataaggatctatatcttccttatgaaataaatatgtggcttgatttcc

SEQ ID NO: 88300 - DNA, 566 bp, Zea mays
  Clone ID: MRT4577_180528C.1
cctcgaggccggccgggccgggaatctttttcctcccaatgccgccgccgtttccgccgtctacccttccgccgcgtctcctcgccggcggcgaccaccacccggcgccgaactccggctcctcttcggtacactccttgcctctccgcgaatgtcgtactcccgtgagatctcgctgcagccgctcgatattcgtcaacagatctaccccatcagacgctgcaatcactgtctgtatcgatgctggctagctctcgggaccaacacaggtgtgtcattgcactgaagagaccagacattgcacttgtctgtatgatgacattcccatccgctgatatagatgcatgaaatagctatactcttcttatctacgagcgcgggctcgatgatgttgtgaagcagtgtagttgcagaaacctcttcttcatcactgatgatgataaggacgatgctgaggatgacatcatcttctcctcggagaatgcccccaccaagaccagtgggcttggaactggcaagggtgccgactccacccactggcagagagatgttcgtatgatcgccga

SEQ ID NO: 88301 - DNA, 644 bp, Zea mays
  Clone ID: MRT4577_180529C.1
cattgggtacctcgaggccggccgggatccaagttcaagcagcttccctaaaaaatcccccatctttcttcgaggggaggagagtgagaaatacaggacaccgatcagcgacgatgtcgtcgcgcgacaagggcggcaaaggtctgggcaagggcggagcaaagcgccaccgcaaggagctccgtgacaacatccagggcatcaccaagcccgcgatccgtaagctggctcggaggggcggggagaagcgcatttcggagattatctacgatgagacccgcggaggcctcaagatcttcctcgagatacgtcatcggcgacgccgtcacctacaccgagcacgcacgccgcaagtagcgacaccgccatggacgaccgctacgcgctcaagcggcagggtcgaaccctctacggattcggaggctatgttgcatgccatcgttctccttgctatcgagcatgacatgtcttgatgtgtaggagaacttcgtgtacctacttgtctgtgacgtgatggactattggtactagattcgtgaagccagtgctgcgaatgtaatccaatcttatcgctcgagaattgaaatgattcctgagcaacatttttgtccgaaaagacaaaaaaaaataagcgatcccccaga

SEQ ID NO: 88302 - DNA, 499 bp, Zea mays
  unsure (1)..(499): unsure at all n locations
  Clone ID: MRT4577_180530C.1
gnactagttctagatcgcgagcgtccgcccttttttttttttttttttttttttttttttttttttttttttttttttttttttttttttttttttttttttttnttttttttttttttatcccaaggtaattaaaaaccggtttttaatttatccggggcgggaaaatggacatgcatgggttttttatccaacaccaacctttttttttggataccactatagctcccaagggggatcatcgaccaattgacgaccacgttaccgtatttataaaaatatacgggaaccgcccccccccgttgtttccaaaagaaccctttcgatgggtttaacatatacctataaaatacgttctcagcatcactcacggggtacccatttgggagtagctaccgcaccaattggatcggatactcactcccagggggcgcaaagcaagcccacatataccatatatatacatacctgctacgtactataatttgtatacggccgg

SEQ ID NO: 88303 - DNA, 515 bp, Zea mays
  Clone ID: MRT4577_180531C.1
aattcggcaagaaggatcttatggaggagggactagggacggatccaccgagcgcagcgcagaggactgctccgtatggctcacacctacgcgcatgcgcatacacaagagacgcctagcactcgcaactggggagaggagcaaccatgcagtgggaccgaatcccacgccccgaggccaatgcgacgtgcaggcctaccgggcatgctgccgtgacaagtgccaggggggattccctcggccacgtcaaggcgtgctgccatcaccgcggcctccccgaggacacgcgccgggctgcggctggtggtgttaatagccgcatcgggccccgcctcgtggcgccgccaacgttggccgagggcccgaggacacatcggtgacgggtgcccagtcccatggacctgaccctggatgtgcgacacgcgcctggggcacatggccatgaagcgcgacgcgcaatagatcaagggctacatgggggccatctactcgctggtaaagcacgcctgctgccc

SEQ ID NO: 88304 - DNA, 322 bp, Zea mays
  Clone ID: MRT4577_180532C.1
ctatggtcactctatttgtgttgttttttttagggactaaaaaccaaacacagcaattgcgtgcaccatattctgagttccacactgtggcgatccatgcaccacatttattaaataaaattaatctgccactcgaatagtgatgtcgcaaacgtacatgtgccattaccggactaaagctttgaatgggcggtttagaccagtgggcctggcacatttataatcttctgatttgattatcttgggccgaagcacttggagacaattttacctttcatgaaagagccaccagctactgtttaagctgtattgtgaaaatggg

SEQ ID NO: 88305 - DNA, 442 bp, Zea mays
  Clone ID: MRT4577_180533C.1
acggttgcagatatctgccaatcggccacttcgtaccacattaaacacatatctgctgccatgcctcaaccatgtagagggatgagtatcagcctcaaatgatgctgctcaacgagggcacatacacgtcgcatggtctcgctaaggtagtgagctatattaacacctgcactgcggtggtcgagaccgtgcggaccactgcttggcctgaatggatagacaatctcatgcacgactgacaagggcggagtaactattgttaacgatggaaacaccatgatgcccctacttgacatagagcacctcggcgctaatatacttgtcgacattgaactactaccacgacttctaggtctgcaatggcacaactactagggcgcttatagctgacaaattcttaatggtagcataatcttatatcgatgactgagtgcaccctcac

SEQ ID NO: 88306 - DNA, 403 bp, Zea mays
  Clone ID: MRT4577_180534C.1
agggagcaaagcaaagtttattgagcaataacaaagggatgggacacaactcctgaggagggaggggaggtaaaaaaaacaggtaatggggattaaggagggcccttgggataagcaccaaatgtcatatgttagggctgaattgctatactgcacacctaaaactaatatgacacctgtttgttaactggaatcaaataaataaatacatttacatacatacttacatacatacatacttaaaaaacaaaaccaaacaaaacaggcttcaaaccctactgttgacaaggatttatttcctggccccttcaagaatctgctggctgcaaaaggctaaaactggctctaaaggtcagttcaaaaagaggaagtcacatctacttaggcttcaaagcccaactag

SEQ ID NO: 88307 - DNA, 220 bp, Zea mays
  Clone ID: MRT4577_180535C.1
acctactatacgtacggggtacagaccagttggagggctttttttcccagccatggcgaccgccacgcggaggctgctcgccgcacatcttaggagcccttgctccagtgtgcaacaagcggctgtcactatggacgatggtcatgacaccaatgagcggacactcccttacagctatgggatgaccggttcttagcgcggaagcgccttaggcgagcct

SEQ ID NO: 88308 - DNA, 333 bp, Zea mays
  unsure (1)..(333): unsure at all n locations
  Clone ID: MRT4577_180536C.1
tgggacctcgaggcggcgggaaagttgctgtggccctcgccaagactgaagggcaggctgccgctttactcatccagcgaccgtgtgccaggctgcgtaagtcttctgatgaagcagtcatggcagtcttccggtnccacgtggagtgtcagttgtnacctactgtcagaatcgaaaggggctcttcgaggaatcagaagtattagctgcttctgangcactcaaggatatgncacgtggagagactgtttcacgactcacggtgcagagtcggcatcttcgcgcaagcggatgcctgacgccctcatcagctcgctcttgtacaaagagggc

SEQ ID NO: 88309 - DNA, 122 bp, Zea mays
  Clone ID: MRT4577_180537C.1
ttatctttttaagtgtgatgtacccacacccatcccagggagagcccacaacgacaagggggtattgtatagctgggatgtgattcctcacccaatatataggcatggcggagtaatgctag

SEQ ID NO: 88310 - DNA, 320 bp, Zea mays
  unsure (1)..(320): unsure at all n locations
  Clone ID: MRT4577_180538C.1
cggttcaattgctcttctcgtgcattctctcaatcatccgcaatcatgtctactgctttctttgacattgagtacggccctgctggcaacacccagacaggtcgtgtcgaattcaagctctacgacgacgtcgtccccaagactgccaagaactttgctgagctctgcaagggcttcactgacgagactggcaaggtctttgactaccaaggctcttccttccaccgggtcattccccagttcatgctccagggtggtgacttcaaccgcggcaacggtaccggtggaaagtnatctacggtgagaagttcgccgatgag

SEQ ID NO: 88311 - DNA, 774 bp, Zea mays
  Clone ID: MRT4577_180539C.1
ccacgcgtccggatattgaagaattgaagactgagcttgtgggactgaaaggtagaattgagaagaaaagtgtttacttacaggagctacaagatcaatatgtaggtttgcaaaacctgattcaacgaaatgagcaattatatggttcaggaaacacaccttctggtggagtggctttgccattcatcctagtccagacccgacctcatgcaaccgtggaagttgagatatcagaagatatgcagctggttcattttgacttcaatagcactccatttgagctgcatgatgactcatatgtcctaaaggaaatgcggttctgtggaagagaacaacatgatggaactcaagagtcgatatcaaatggaggtgagagttcaaacgtgtcaaatatttattggcaacaagcacagcatatggagatgccaaacaatggcacagttaggttatcaagctcaccgcctattccagggatattaaaagggcgtgtgaagcacgagcactagcgcttcggttttggttcactggcgttgtcgtctgagagcagtttgttttattacttttctccgttgtgtaaagcgcctgtaaattattaggcaagggggagggtagtagctctgatctgatttagctctgattggtagaacgacgggtgtaattctatatccttgattcggttctttcggtatggttgagaaaagggttgacatgtaatttgtagagcattataaaaactaaaattgttgatgtcttcaaaaaaaaaaaaaaaaaaaa

SEQ ID NO: 88312 - DNA, 457 bp, Zea mays
  Clone ID: MRT4577_18053C.1
attagatgtaattcaataagcaatctaaaagagggatgtatgtggccaaccagaaataaaaagttacatttccagaagagaaaacaagacctacaatggacagcaatacaaggacaaggaaaaagtgataagaggactcccgaaaactaaagggggggcggccctttaaagaaatgaacttaataaaggcgtgcttggaagaaataagtttttttaaagggtacccaaaatcaaatatatgggcggctgtttaaaaaagctggaaagggaaaaaccctggggtaccccaactaaactcgttggcaaaaaaacccctttttcccagtgggggtaatacaaaaaagaccccgccgaatgcccttttcaaaaatattcgcaccttaaatgggaaagggaagcccccttttttggggaattaaaacggggggggggggggggtttcccccagggggacgct

SEQ ID NO: 88313 - DNA, 400 bp, Zea mays
  Clone ID: MRT4577_180540C.1
attgttgatgccgcgctgcatctcctacgcgggggggctgggctaggtgtccccctccctctgctgcatgggctagaggagtctcaatcgcgaggccacgcaccatcgttcgaccgtcagctggcgggaggtgccaaaagaacgactgcgccggtgctagcggcctgaaccgcaggaccgtcttcatcatgccgtacaacagcggggtcagcacaccctacactcatgagacttacacggggtgctccagtggggactgagacctaaccgacgacaactcgcgacagtgggcacctgaagacgatccatatctatcccgacatacatggactcccgcgggatcaaccgttgttaccatatctagctacctacataggctggtcacgactcgcatgcctac

SEQ ID NO: 88314 - DNA, 189 bp, Zea mays
  Clone ID: MRT4577_180541C.1
ggggcttggcctccgctcgatgttcagctaccttacagaccgtcctcggctaggttacgttacttgcaggatagtatcaacgaaccaggagaaagaaatcgcgactaaagaacttggcagctgctctatgagtacaccacgtgctcatcgcttcgccacaacgtcgttcaagcagctcgtgacatcgac

SEQ ID NO: 88315 - DNA, 593 bp, Zea mays
  Clone ID: MRT4577_180542C.1
cgtggttctgatctttgtttttgcgcataacagcctggttccaggccactgcctgtaccccgatccggcccactggtgcccgatccgctccctgaacaactacatggcgagcgggcgtagagagagattgatgaaacggcggacgaggcacgacgcttatcactgggcgttagctgaccgaacgaacccaaccgaagcgagagctgatcatgtagaggcggggtgaccggcgatggatcggatagcgtggatctttggcgcctccgggatggggcagtgcgccgacggactctgcgttgctcgattcctccgagcagggctacatgtgctacctagtgcttctcaagatgctcaagcacgtggagggcgtgcggctgcccagtgagaggtcatcgggcctcatgctcgaggagttagctaactactacaccgtcagggtcggcgacgaattcggcatgccgtatagcgggactgacggcagctgagaagccgacgatcacgtgttccagacggacctgcttgacatgcttaatcagaccggttggccaggattgcgtggagggcaggatcactcacatgctgcgttgacatgc

SEQ ID NO: 88316 - DNA, 401 bp, Zea mays
  Clone ID: MRT4577_180543C.1
ttacataaatttattaaaagctcaagagcatctaaggtgtcgatcgggaggtctgtctacatagaaaatgcttttcagttcaactttctaaagtgagacggtgatgttaagactagaacagataaactatatccaattaaagacatgacccaaatatcttatgttgaacaaagagtttactttaccaagaacatgatagagtaaatatgagtttgcaatctaaactgttagtgtttacgtgtatttgttgttatgcaatatttataattgaaatgtatgtgtttattccgataaacatgacgaacgcactgatatcttgtcgtgattaatgtacgaaatatggagatacaagtgctcgattcacttagtacctaaatcgatcgcagaaacatcactcactc

SEQ ID NO: 88317 - DNA, 771 bp, Zea mays
  Clone ID: MRT4577_180544C.1
aggctctcgtcgtccttgtccttctcgagctgctccttgatgctgaccatggggccgaggtcgatggccttgggggccttctcctcctcctcctcctcctcgtcgtcgtcgtcctcctcctccccgtggcaacgcggcgcgcacttgccgttgggcgccgtgtcgcagtgctccgcggacggcgccgcttccttggccggctcccccggctccgggccggcggggacgtcgaccttggggcaggagacggcctccaccgccgacgacatcgtcgcacgcacgcgcgcgccgggcacagcagcagctacctctcgcgtcgcgctcgcgcgcacagtggcttcggccttcggctagacaaggaaaggaaggagggcggggacggggagaagcgagcgctggcacagataccaagatgagcgcaccaaaaaggagagcgagcacgcagtcacgcacgagacgagtcgcgatgggaggggaggggagagagggggagggggaggcgaacacgtcgaggcggattatttcggacaggaggacgggccgcggcgcaaggctccaaaaaaagaggccccgcgcgcacgccggccggacggcgaggggagattggtttgatactttgatccaacgcacgacgatggcagcgccagcggcagagaggagaggagaggagaggagaggataggggtgagcggggggcgcttcgctttaattctcccccgcgtgccgcagggacggaggaggagaggagaggagaggcgacggagtggagac

SEQ ID NO: 88318 - DNA, 128 bp, Zea mays
  Clone ID: MRT4577_180545C.1
gtgcgttcggcacttataataataagcacatgaaattttgcttcaggtgcaaaacccaaaaagaatacacgactaagcaaacaagtactgaaaggagccgactacaagagtactatgggacaaaggcc

SEQ ID NO: 88319 - DNA, 318 bp, Zea mays
  Clone ID: MRT4577_180547C.1
cgatcgggcatggggtgcgacgacaagtgcgggtgcgccgtgccgtgccccggcggcaaagactgcaggtgcacgtcggggagcggcggcagcggagcacacattgcgtgcggagatggaggcgcgtcacttgcgccaatcgcgcgaaacaagtatgttggggctgactgattgctgtgcgcctgcttgtccttagggtttgcaggatgaaatagtttaagccctagaaaggtggagtgaacatacctattgatggatggaagtggatatacataattttcaaaaaaaaaaaaaaggggcgttaagatcagttactac

SEQ ID NO: 88320 - DNA, 489 bp, Zea mays
  Clone ID: MRT4577_180548C.1
gttgaattcatctctgccctagcaccagccatggcgaagccgcagcttcttctctgtttcctactcgccgcctccgcgccgctaatcgtcgccacggccaagaaatccggggacgtgtcggagctccagatcggcgtcaaggttcttatattgatgctatgcctgggtatttgaaatgcagtacaagccggaatcatgcagcattcaagctcacaaaggtgacaaggttaaagttcactaccgtggaaaacttactgatggaacggtttttgattcaagctatgaaagaggtgacccgattgaatttgaattgggcactggacaagtgatcaaaggatgggatcagggtctcctgggaatgtgcgttggtgaaaagcggaagttgaagatcccatcaaagcttggctatgggcctcaaggctcgccacctactattcctggtggagcaaccctcatatttgacacggagcttgtcgctgtcaatggaga

SEQ ID NO: 88321 - DNA, 269 bp, Zea mays
  unsure (1)..(269): unsure at all n locations
  Clone ID: MRT4577_18054C.1
attnaattntttttttttttttttctcaaaatagcttgtggcctgtagcttctttcattgtttcaaagcattacaacataagcagcaaaaccagaaacagtcctcataagcacccattatttggggcgttccacaccaaacgttagcgcgggggcgatccagaaaggacccccacctgtggaagcccttttaaagccttgtttaaccccggcgaccccccaaaggtttttaattgaaaaaagggcccctttaggcaaaaggtttttcca

SEQ ID NO: 88322 - DNA, 1066 bp, Zea mays
  Clone ID: MRT4577_180550C.1
aaaaaaaaaaaaaaaattatccaaaaaaaaaaaaaaaaaaaaaaaaaaaaaaaaaaaacctgatgtctcctctgccccagctccccccctggcgaacgctgcttcctctctgtgtcctactcgccccccccgcgcccgagattgttgaatttatctctgccctagcaccagccatggagaagcggaatgttgagtcctgccgctgtctgttataaaggcacagctcttctgtctccacgagattgttgaattcatctctgccctagcaccagccatggcgaagccgcagcttcttctctgtttcctactcgccgcctccgcgccgctaatcgtcgccacggccaagaaatccggggacgtgtcggagctccagatcggcgtcaagtacaagccggaatcatgcagcattcaagctcacaaaggtgacaaggttaaagttcactaccgtggaaaacttactgatggaacggtttttgattcaagctatgaaagaggtgacccgattgaatttgaattgggcactggacaagtgatcaaaggatgggatcagggtctcctgggaatgtgcgttggtgaaaagcggaagttgaagatcccatcaaagcttggctatgggcctcaaggctcgccacctactattcctggtggagcaaccctcatatttgacacggagcttgtcgctgtcaatggagaaccaaccaaccaatctgacgagctttagattcatcaaacaaatgaatccattcacctttttactcggaactcagcagatgtaatactttccaagaaatgagccttcattccctgccactttcatagtttctttcgctgttccacactgacatctatgatttttggagcaaactctgatctgttttgactagtttacacgtttgtgtgtggaatctgaagagctgttctgaaatgttactttccttttttaaaaattagggctttggttcaggcttcatttgcaaaaaaaaaaaaaaaaaaaaaaaaaggcccctagctaccatttttttccctttgagtgaaggagttaattgacgacgctttggcgtaaatg

SEQ ID NO: 88323 - DNA, 326 bp, Zea mays
  Clone ID: MRT4577_180551C.1
atattttttttttatttattaggtttttttttttttttttatttattttttacactttattcatttaccgtttatggctaatgttcatctttacataaatcgagtctacgccgtcattcaaggcctttctcattagcaacggcgaggtggaccacatcaaggccaacttcgtgcccaaataaagatccaatgtctgcattccctttattttttcaataataaatccctgcggtgtgcagttcgatttgttaaaaaaaaaaaaaaaaaatatttatgattaactacaaataaaaaaaatagattattctgaaatggtatttataaac

SEQ ID NO: 88324 - DNA, 655 bp, Zea mays
  Clone ID: MRT4577_180552C.1
ataggcgtcttcgcactctgctacctccgcgtgtcaacctttcccccttctcccaagtccttccgccgaccgccgctccacccgtacgaccgcaccatgagggagcgtgtttctatccacatcggacaggccgtgatccagatctcaaacgcgtgctggaaactgtactgtcttgaggatggcattcaagctgacaatcacgatgcccggtgacaagaccattggtagaggtgatgatgctttcaacaccttcttcagagagactggtgctggagagcacgtgccccgtgctggttttgtgtgaccttgaacccactgtcatctgtagggtgttaactgtcacctacccccatgtcttccaccctggcaaaatcatcacaggataggaggatgcagccaacaactttgcccgtgctcactacaccattggcaaggatattgttgacctgtgccttgatcacatcagcaaaattgccgacaactgcactggtcatcagtccttcctcgtcttcccactgaaggaggatgaacgagatctggccttggttacctcctcctacagcgcctgtctgatgactaccgcaaaaatcctagtttgggatcactgagtacccttccccccaaacctgtacttccgcaattgagccataaaaca

SEQ ID NO: 88325 - DNA, 284 bp, Zea mays
  Clone ID: MRT4577_180553C.1
aattgaatgcatatactatggacgacgatcaggcgtctcacatagcagcggattcgacgtatgtattcgcgctcggcccggatcgatgtcgagagaactagccaggagctagtgcagattatagcgaggcgttcgagaaggccagccggaagatcctctctggtcagtcaccgaggacgatctgtgctccactcaggtgtagtctcacatgtgtctcagcgatgacgttcgacatctcgtcgtggactggaggtcatcttcggtagtatgaattgcgcagcgga

SEQ ID NO: 88326 - DNA, 481 bp, Zea mays
  Clone ID: MRT4577_180554C.1
gagggaataaaggatgtcatgaactagttccctattgagatacgatatcgggtagatgaactcaatgaacgaacgaatgagggatcaaaggaacaaaaggagaagctacacacttgctgcaattaatgcacaccccagcttcttctaataaaaatcgtagaaacaggaatcggctattattggacgggatgctatctatatgccaggagctcagctagcgcgtgctgaagcgcctgaagcgttcggatgggtgaggaacgggtgctacaggaacttaggcaccgagcgcctccgccaggcctagttgtagaggcaccgagacacgaaatcacggaactagttctacgcagcggttggagggtaccgcgcctcggctaagcatatggagcacatgagcgcggcccaaccctggcgctggccctcgggcaggagagggaagtggcccaggcacagctccaggatggacaccccgaggcttcac

SEQ ID NO: 88327 - DNA, 533 bp, Zea mays
  Clone ID: MRT4577_180555C.1
gcgtttcggagtatccagctcaagcctaggtctagcggcgacagctatgctccgtagctggacgcggggggaacggaccaccaagcaccctggtgactagttacacactcttgcacacaccacgcagacaacatggcgatgctcttgtaccaccattcgaaggaacggggcaacttcagttctaacatccccctcgttggctgtaaaatacaactagctatactgtgtctcataggcaagaagatgatgctcccactgtgtatatatgcacacacgtacatgagagtaagtagatatctcaccaaccagacaatggtataggcctaaaaaacagacaaatcctttactggatgggactcactgaatagattctaaggatgaaggccagcgacctgtacgcgcgaactattgctagttgttcaataaaaagactacgactcgtttgcttaagaaggatggcttgatggctacccatgaagaggggagtgcaatttactaggcatcacactgacgtcaactgtgttccgagccct

SEQ ID NO: 88328 - DNA, 612 bp, Zea mays
  Clone ID: MRT4577_180556C.1
ccggccgggagtctcgtatggacccgcctaccaagagagcatcaccctcgtgtcctcgcccgggtcgatcgactttctcctctgctcgcgtcgtgccacggccatcgcatcgccctttacatcacatatattttctgcatctccaaacgcttcttcagacctcgctatacctcgccggagcttggttctgatccgtggacaaaggggaaggcagtgaataagggaaagatagcgaaggagaagctcacgggcggcgatgcccacgacgagaagctagcttacgtgatgtgcgggttagacgggttcagacttcagaccaccgatagccacaaccttgctgagcatgtgagttcaccgggtcgctaatcgtacgcttgctgggcttaagccaagctgatgggaggctactcacttgaatattcacttccattgttctattctattatgacagaaaacttgattatattttcaatatgttttgaactgctggtgtgacgataaaggtgcccagtaatctctgggtatcagtctgccccatgtccgttttatttttggctcatctcatactatacacaccatgtgtttgtgaaaaaaaaaaaaaaaaaagcggcc

SEQ ID NO: 88329 - DNA, 673 bp, Zea mays
  unsure (1)..(673): unsure at all n locations
  Clone ID: MRT4577_180557C.1
aaattccgtgccctcttcgtctcgcagtaagctcctagcgcgcgaccatggcggcggcaggtaccctagtcgtgtacagggcggtgttcgccgcgcttggctgcctcatggtgggcaccctggtgtacacctgcatcaccgacggctcgccgtttcgcaccgagctgctgaccccgtggatggtgacaacactggttgatctttatgtaaatatagcagcgatttcgacttgggttgtctacaaggaaggaaattggattacttctatcttctgggtagtattgttgatttgtttcggcagtgccactacatgtgcttatattgttagcaagttatttgagataacatcttcagggctttcccaaaatccgcttgaccttttgttgctcaggcaaaataatctacctgaaaggaagtgttcttttgtcgtcatcggaagaactattttcagcattctgggcatactcatggctgcacttgtcacgtatactgtcattacagatggactgcctttcaggaaggatttgttgacaccgtggatggctgcaaccttaattgacttctataaatgtttttgcaatatcnggtatgggttgttcacagggagtcgacttggatctcagcagtcatttggatatgcttgttgatatgcttcggaagcatcacaacatgt

SEQ ID NO: 88330 - DNA, 514 bp, Zea mays
  Clone ID: MRT4577_180558C.1
aaaaaaaaaaaaaaaaaaaaaaaaaaaaaaaaaaaaaaaaaaaaaaaaaaaaaaaaaaaaaaaaaaaaaaaaaaaaaaaaaaaaaaaaaaaaaaaaaaaaaaaaacctcccctggtgggttggttttgttccaatccaagggggccggaggcggccaaaaaccttagcccaagcccggtcccccggccattttccgcttattacaaaacgcgcgcggagaacaacccggtgaaaattaggaatgggttcgccaaccccgccgcggaagccgaagctttcccgggggccaataccgcggatgccgccccgccccggtccccggggggggggggggtaatcaaggagttaaattttgggccccgaaagcccaaggccgggaaggggggggccgcattattggttttggccgcggtattccgttcaagaggggccaccaccttgagggagttggaaatcgacctaaaaagggcttttgaaaagctaaagcccgggaaggctaaatccattttttttt

SEQ ID NO: 88331 - DNA, 182 bp, Zea mays
  Clone ID: MRT4577_180559C.1
ggggggagtttatttatttttgtttgaccaatttgttcgttctcacgagattgcaaacatgggaaccaaatcagggctacaaaacaaggtagttgcttgcataaattattcccaaaaaaactagaaccaggtcttattttctaccacgttcagtcggtaccaaaaaaactgggatcggacct

SEQ ID NO: 88332 - DNA, 1794 bp, Zea mays
  Clone ID: MRT4577_18055C.1
aagtggaggatttctcgctgctagccctaccattggatcggatccctatcccctcttttgctttccttcccctgcctgctcaattcttctcgtgctgtcacccctttcttcaatcgcctcccgattcccgcggggctcgcagatcccggaaggacaccccgccgcccccgatgagccgccaccgggtcgagacctgcgactcgtggcggcccccgcggaagaaccacgccggtgcgccgccgctcctccgcgcggggcctcggctcctcgccttcgcctcgctctccgtccgcgacggcggggactccgccgcggccgtcgccaaggcggttgaggaggcggttgtcgtacgatccgatgaggtgaaggaggcggtggccggggaggagaggaagaagacgaagtcgacggagcgcaggctgccccccgcggcgcagctggtgagccatccgctcgcgctgctggcgctagtacccaacagcgccgcgatctttgccgcgggggccgccgcgggcactgtagccaagaccgtcaccgcgcccctcgaccgcgtcaagatcctcatgcagacgcatagcgtgcgggtggcgggagagagtgccaagaagggtgttggatttctcgaggctatggcagacattggaaagaaggatgggcttaagggttactggaaaggaaaccttccacaggtcattcgcattattccttacagtgcagtgcaactcttctcgtatgaagtttacaagaaaattttccggagaaaggatggagagctttctgtatttgggagacttgccgctggtgcttgcgcgggcatgacatctacacttgtaacttacccactggatgttctccggcttaggctagcagttcaatctggacacagcactttatctcaggttgctcttaacatgctgagagaagaagggctggcctccttctatggaggcttgggtccatctcttgtagcaattgcaccttacattgctgtgaacttctgtgtttttgacctgatgaagaaatctgtaccagagaagtacaagaatagaccagaaacatctctagcaaccgctcttctttcagcaacatttgcaactttgatgtgttatccgctggacactgttaggagacagatgcagatgaaaggcacaccatacaatactgtttttgatgctattccaggcattgtggagcgtgacggtctaactggtctttatagaggttttgtgccaaatgcgttaaaaaatctaccaaatagcagcattaaactgaccgtgtttgacacggtgaagacactgatagctactgggcagaaggagatggacaaattaattcaagaaaatgaggagaaaagaagctaggaaaagagccttggtcaatcttgaaggctttggtagaaagcatgcctctttgcagactccatattgctatgtttcctcgtttgctggtgacatattttaggatctaggcagcgcatctttctgttccttttcaaatagatctagtttccagtgctttccgtagcatccacattcatagagatagaggtgggcattgagttgtgatctctttatctagtgtcggtagcattcccctacagatcttacctattttaatagaggatagtgtatcaatgtgaccgccccagattctttaaatgtaattattatacataatagccagaacaatcaaatatcatggagcacaggagcatgttctccttgtcaatgaattagcatctttgatttaaagaacataaaaaaaaaaaaaaaaaaaaaagggggcggccgctct

SEQ ID NO: 88333 - DNA, 775 bp, Zea mays
  unsure (1)..(775): unsure at all n locations
  Clone ID: MRT4577_180560C.1
attgggacctcgagccggccgggaggagtccagctttgtcgtctcatttcaccattcccttttttccgcactttgtgctttaccgaatacccatctcccattcctcacgaacaattactaccatgagattatctctgtcagcccttgcggcaaacgtcttccttgtcgcctctgccctcggcgacggtgcctatgccgcccaggggggcaaagttagggggtactatcctagcttcaactctgatggccagcgccctgccgccattgattgggctggttttaccgatgtgctttacttcatggtggagccccaagcaaattttacactgacttacgaccctaagttcacataccagcagggtgaacagctggtcaccgagttcattgcggaggctcgcaagcaccacgtcaatcccattatcnagcgttggtgggttggactggctctggnggccttttcggttttgacccgaagtgatgcctctcgtaacaggtttgctagggtgcttgttgaatatgctcagaaacacggggttcgttggtattgaaaatggattgggaataccccaacgagttgggcattggatgcaacaccaagcacccggatgacaccgttcactttggcaagctcactaaggaactccgcaccttatggccggaagcttcgctcaccattggcggngncccttaaggggtttgaccggcgccagcggatcgcctgccaccgccgcggagaccgctttgcttgttcagaacctanatacgtgcacctgat

SEQ ID NO: 88334 - DNA, 266 bp, Zea mays
  Clone ID: MRT4577_180561C.1
acccactcatccgcaggcatcaaccatctacttactattatatcactacaacacataaccactcaatggtgcactctttaaaaatactcagctaccaactacattctacaaccatttattcacattcaacatccataactccaaaccactttccaccatgctctatataacaaaccttctcttaactatatcacaaacacatgatcttttgaaaccaaccaatctcataacattaacaccatattataaacttaccaccacactca

SEQ ID NO: 88335 - DNA, 222 bp, Zea mays
  Clone ID: MRT4577_180562C.1
tttttctgggctgggatattaactaactaggggggattataaaatcaacggcggttaaaaacccacaataagactaaaacaccaagaccccacacctggaccctacaccacgagctaacctaacgaggcccgaaaaaacatatgcacacagcaaacagacgctcaaaaccaaaccataccacccaacaccgacaaaacaccaccaacacaaccctcgctatc

SEQ ID NO: 88336 - DNA, 165 bp, Zea mays
  Clone ID: MRT4577_180563C.1
cagaggtgctcgtactaagctcgaattcctagtgcttcgagcgagaccggggggtcattaggtcgctgtctgactacaacaagacctccaaaaattgtcatgtgtcaaagaacattgtggggcgctcgagctgaaaatgcgagagaacattaactctaagggagt

SEQ ID NO: 88337 - DNA, 405 bp, Zea mays
  Clone ID: MRT4577_180564C.1
gttgccaaacgccccaaagtgtttatttcgcccgggagccgagggtaacaaaaaagggatttggcaagctggggggctataaaggttatactggatgaacgggcccgcgggctaaagccctcgcgaattacatatatctagacatgtccagatcaccaaattccccaaaattgggtgaaggatttgaaaggggggaaaccataattgtcaggaaggggggcatttcccgggcgaagggaaattatcacctaaaaaccagcgtttttagcaacaagggctttttggaagacatcggggatgaaaaaaatttgagatggactgcccaccccgggggattggaagaactcaaaataaccccttgttacttttttgggcccaggggggggaaaaaaaaacccccacagg

SEQ ID NO: 88338 - DNA, 455 bp, Zea mays
  Clone ID: MRT4577_180565C.1
gcgaccgctccttcgaatacatattatttgatttatcctagcggcgatctgagtagcgcgcgggatgaatttgtacagtgtttggtaaactatgagtggaagggagcggctgtgaattctgcgaaagctgacgagctggttttgggcttgacgaatcatgacctattcctgtactttgggcatggaagtggaacccagtgtatttctagtaaggaagtcgagtagatagataactgcgcagctgctcttcttatgggatgtatcagtggcacacttcattgcacacgaagttatgctcctcgaggggccccattatcatatttataggctggttcccctgctatcattgcgaatctctgggatgtttcagacaacgacattgacacgcttagtaaggcttttctcaattgatggctgcatgacaaatctctagatggcaacaattgttcaaaatg

SEQ ID NO: 88339 - DNA, 373 bp, Zea mays
  unsure (1)..(373): unsure at all n locations
  Clone ID: MRT4577_180566C.1
acgcttncgtttctgtggcgctcagctgcacctgaacgcgctacattgaggcggggatacggctggcgaagtggttcaagaggtacgaggtgccctcaccgtcccctaacctgcacggggccactatgctccactacatcatggggagcctggacgcacatttccacgacatgactagcgacgccttgtacgcccacgacaacttaggaatcgagatatctatgtgcaacaccacgcacttgaatgaggggatccagatcatgacccactggtgggggaacttccgtaatgacaagggtgccaaaattattgtcaaagccttcccacacataacatgcactgtgctgggccctcccaagatcatagccaccaa

SEQ ID NO: 88340 - DNA, 348 bp, Zea mays
  unsure (1)..(348): unsure at all n locations
  Clone ID: MRT4577_180567C.1
aggaaacctctgccattagaaccttctttacttctacgtgaggctaataggcgcagggctttccgctccgccggcccttcccctgtgctgttggtttcttctgatggtgcacgtgttctggctatttcggaacctcctcccagcagatctgctgccaacttaatgacaagaacaatgtcaggtccagcaacgtccgagacttcactgccagttgatcgtcccatgaggttgtcagaaattcatgttgcagctgagcatgcactgaaacaaacgatatcagatcctgattntatgacatcactttcatcactagaagaatttgagaaaagatatatggagcttactaaa

SEQ ID NO: 88341 - DNA, 264 bp, Zea mays
  Clone ID: MRT4577_180568C.1
cccccgttttttgcctgcttccttcctctcttctggtggtgctgcgggggtgtttcctctggttcttgtgccccttggcctgttcgtgtttgccttgccgtggcgcgtcgcctgctttcgctggtctgtttgctgctcctttggtcgcgctccgttgccgcgtgctgggcgtctccgcgctgcgctttttgcttctcccctccggtggcttcttgtgcctcttcccctgggcctgttgccccttctcccctctggcgcttgctc

SEQ ID NO: 88342 - DNA, 370 bp, Zea mays
  Clone ID: MRT4577_180569C.1
ccacataaaaatcgggaaaggaaacttttaatttggggggggccacatcccccatccaaaaaaactttattatggaatgacatcaaaaaagcaatctaaaagagggcccccccaatgatgtgttgttggaaggaggctgctgggtttgaaaaaccaagtgggacaaagggcaacaattgttgaagttgaaaaagggttgcggggttaccccaaaactgctggaaaaacggaaccaactgttgttgggtaaaaaagaaaccacggtttgctgaacctagctggcaaaagggaagaagtatttgctgctgcaaaaaaccagcggggttcagggcacccaattggttaaatggaaaaagttgttgttgttgaa

SEQ ID NO: 88343 - DNA, 591 bp, Zea mays
  Clone ID: MRT4577_18056C.1
gggtgttggatttctcgaggctatggcagacattggaaagaaggatgggcttaagggttactggaaaggaaaccttccacaggtgcttgatgttccctatcatccatggtttatcttgctgtgctgtgctgattcctatccatctcccattaacttgtccaggtcattcgcataattccttacagtgcagtgcaactcttctcgtatgaagtttacaagaaaattttccggagaaaggatggagagctttctgtatttgggagacttgccgctggtgcttgcgcgggcatgacatctacacttggaacttacccactggatgttctccggcttaggctagcagttcaatctggacacagcactttatctcaggatgaagaaatctgtaccagagaagtacaagaatagaccagaaacatctctagcaaccgctcttctttcagcaacatttgcaactttgatgtgttatccgctggacactgttaggagacagatgcagatgaaaggcacaccatacaatactgtttttgatgctattccaagcattgtggagcgtgacggtctaactggtctttatagaggttttgtgcc

SEQ ID NO: 88344 - DNA, 170 bp, Zea mays
  Clone ID: MRT4577_180570C.1
aagtagtctgcgtcgagctcgtacacaccctaacacctattagccagaagaagcgaaagcgtagacgcgatcttagcggagatcaagcatgtcgctgcgtacttgctcgcaagcgatgcaaggcaatccatctccttctgcctaagctatcacaaacatgctatgcgcag

SEQ ID NO: 88345 - DNA, 357 bp, Zea mays
  Clone ID: MRT4577_180571C.1
caccattaaaatcgggaaaggaacctttttatttcgggggggccacatcccccatccaaaaaaacttttttattgaattccatctaaaaagcaatctaaaagagggcccccccaatgatgtgttgttggaaggaggctgctggttttgcaaaaccaagttggacaaagggcaacaattgttgtatttgaaaaagggttgcggggttacccccaaactgctggaaaaacggcaccaactgttgttgtgtcaaaaaggaaccacggtttgctgtacctagctggctaaagggaagaagtatttgctgctgcaaataaccagcggggttcagggcacccaattggttaaatggaaaaagt

SEQ ID NO: 88346 - DNA, 223 bp, Zea mays
  Clone ID: MRT4577_180572C.1
ctgattgctaggtcaggacttgacaagattggctagtctgtgaagtagatcacaagtcttaggaggagaattgttaaaataatccttgtgcttttagctggagtctggtttatttctgctagctgaagtcagtcgcacggtttgctgttggctgtgcgtgtagtgggcttggacgttcgcggtttttgttcgcatgtagagcgcgtactgcgccatgtatcca

SEQ ID NO: 88347 - DNA, 468 bp, Zea mays
  Clone ID: MRT4577_180573C.1
ccacattaaaatctggaaaggaaactttttatttctggggggccacatacatgagggaaaaaactttattattgaattacaactaataagcaatctaaaagagggcccccccaatgatgtgttgttggaaggaggctgctgggtttgccaaaccaagttggacaaagggcaacaattgttgtatttgaaaaagggttgcggggttacccccaaactgctggaaaaaaggcaacaactgttgctgtgtaaaaaaggaagcacggtttgctgcagctagctggctaaagggaaaaaaaatttgctgctgcaaataagcagcggggttcagggcggccaattggttaaatggaaaaagttgttgttgataaaagtaggcaatacctacctggctaaatggaaatagttgttgctgcaaataaccagcagggttcaatgaaaatagttggttgaatggaaaaaattgttgtt

SEQ ID NO: 88348 - DNA, 439 bp, Zea mays
  unsure (1)..(439): unsure at all n locations
  Clone ID: MRT4577_180574C.1
ggtccagcangcgtgcgctggcgncaacaacaaagccatgagcagcaatttcatccactacaacatcatccacaaaaacaagaacattagccaccatcacatcatcaccatcatcatcaacaccaacaacaacatggttacatgcaaccacaaaaacattagctacaacaagaagttcatgttcaacatcaacaacaacaaccgcagcaccaacaacaacaacaactacaacaccaacaacaacatcaatgtgaatgccaacaacaacatcaccaacaatcacaaggccatgtgcaacaacacgaacagagccattagcaacaccaatgacagagccattagcaacaacatctacaacaataccagggtcatgacaatgcatcatcaaccacaacaaccttagcattattagcaaggtcagtaaaaattacaacaacca

SEQ ID NO: 88349 - DNA, 477 bp, Zea mays
  Clone ID: MRT4577_180575C.1
cggccgaggtacaagcttttttttttttttttttttttttttttggcatcatccaaaaaactttattttggaattccacctaataaccattctaaaagagggcccccccaatgatgtgttgttggaaggaggctgctgggtttgccaaaccaagttgaccaaagggcaccatttgttgtatttgaaaaagggttgcggggttagccccaaactgctggtaaaaaggcaccacctgttgctgtgtcaaaaaggaaccacggtttgctgcacctagctggctaaagggaagaaatatttgctgctgcaaataaccagcggggttcagggcggccaattggttaaatggaaaaagttgttgttgataaaagtaggcagaacctacctggctgaatggaaatagttgttgctgcaaataaccaccagggttcagggtaaatagttggttgaatggaaaaaattgttgttgctaatagtagg

SEQ ID NO: 88350 - DNA, 809 bp, Zea mays
  unsure (1)..(809): unsure at all n locations
  Clone ID: MRT4577_180576C.1
ctgtcatggcaacttctgtcagagatgtttaattgctcattttgtctttccttgcgtgcagatcaaattttgcccgattggatttccgtggattctatataattattttagaacgtggagatgaaataatagctgcagcatctgtccggtgggtggtttcatcctgttttctttttcttgctatgttttgttttgtgactgtctaggcatagcactgaatgctgtatccagtgagatgtatacccaaactatatagatctaaatactagtttgatgaaacagataagaaagaatcataccataggctctaaaaaccccttgaacaaaccaaagtttgtcccaatgtgcaggcaaaagatattctgaacaagcaaccatgccagggaccggcattccttgaatcaattcattacaaattttcaaacatgatgacttgattttgcatatttctagtactggtgatcttgtttagcgcgaaactttagtatagtgctgtacccgtttctcacttcaattactttacatgattgttgtaaccattgtatattccagtttgaaggaaaagaacatccttactggaatngcctagtattttggtgtacaggtaattggttcgttggtgctgaataataatttatggtatctgcagagtgcagagtcatggaggcaaacctccctttatctttctaggntactaagaagttttgaatgcttcctctcgtagggntcatttcatgttttcatagttagtcatgtctgtgcngtgacttttctgtagcttgctaataacatctgccaaggcatgttaa

SEQ ID NO: 88351 - DNA, 642 bp, Zea mays
  Clone ID: MRT4577_180577C.1
ggccgcttttttttttttttttttggagcatagcccccttggttaagtgtggatcgcagtcacgaacacaatagaccaagcctacacaaagaacccatgaaagttattgtttaggtaactactactagaaccaccgaacaagaatactcagacgagcatagaaaccagtagccatggattacatgcaaaagcatgatcatttgttcttggcagagcgcttggtgacctagggtcccgaagggtccttattctgcacgctttttatcacgccgaccgcaaacggcagcctcatttggctaacctcgaagcgccccacctgaggatacttcgcgaaagcgtccaccaacatgagcttgaaggggatcatcttgtcgaagacgtagtcaccgttcttgaggaactggggagcactatacaggtccttgttggaccgccagacgatgttgaccagctgctaagggaacttaaccttgatgcgggacttgtggtactccatcaccggatcttagacattgccgatctggactggctggcatatgaagatcacatgcgctgagaaaatggcagactccttcgaggtcaccatcctggagatggaggacacgtaacagcgctgcagaaacttaaccgccatgtacttga

SEQ ID NO: 88352 - DNA, 654 bp, Zea mays
  Clone ID: MRT4577_180578C.1
ccggccggaaaagtatgactctcacgacaccagcaccgccaaccatgaatatggagatcaagactcttctcgccgccgctgcgagtgcctccgctgctcctaaggataccactcccaacaacttcaaattccaagggcttgtcctcagctctgcctcccccattcacttcatctacctccgggattcccaggggtatttctgagcttgatattcagggaccacaaaggctcttgttacagcaagagggacaagacccaagaggccactttccagctctacggcgacgaggtctggctctactccaacgatgatccccgccagcactgctacattgactgtctctaggatgggccagtgcgagcactgattacaccgctggtgctcagtctgcaaccaagaacgccacccgcatagggcatgcaaagtgcgacgaggacggcatgctcacatggaatggtaccagtttcgtgcactgtcccatggcagacaacctctagaagactgcttgtgcatgctgggtgtactacagcatcaacaatcccgagcgactacaagaactggcttccgttctccgacaaggccgtcaaaggagagaagcccatcccctgctcttactctgcaatacagcccaaggcttaagatctggctgtgat

SEQ ID NO: 88353 - DNA, 768 bp, Zea mays
  unsure (1)..(768): unsure at all n locations
  Clone ID: MRT4577_180579C.1
gggagatctagaatcantccagcctatggcggaccacctagattcgctaatacctcatacacaggccagtttttacctcatactcctctatttctaagtacatatctgcttatttgtacagtcttgatttcctgttgtgtttagttgttggcctgattgtgtgtagttaagtacatatctgttttttttgtttcctgattgtgtttagttgtaaaatagtgtgcttctttttctgtttgcatccagatatcttgtgttttttgttccattacttcgtgcagcacccttgttttgcattggaacctccaatcaaataattgatggtactcactgatgtcaaaattcactagttttcattgtaagataactactattcataagtagtcagttatatatgtttgttttttacaactattcatatgtgcatccatgagaatcataaggccagatggatgaaaattcgacaagacaactaagctacataataacatgttcattcatataaaagattttttgcttaacacaattatataaaaaatgtatatgttacatccatctacctgaatcctcccatgccagattcccttgatcctagctaagtattggtaatctctatgaattgtactagtatgaccagaaacatattgccatgtgattttactctcatgacttccttctcttttcttctgnttaagntggtaccatggttcatacaaatctgaggcagtttcctttctcctataacttctcttttcttctcttttctgg

SEQ ID NO: 88354 - DNA, 1875 bp, Zea mays
  unsure (1)..(1875): unsure at all n locations
  Clone ID: MRT4577_18057C.1
cttcaatcgcctcccgattcccgcggggctcgcagatcccggaaggacaccccgccgcccccgatgagccgccaccgggtcgagacctgcgactcgtggcggcccccgcggaagaaccacgccggtgcgccgccgctcctccgcgcggggcctcggctcctcgccttcgcctcgctctccgtccgcgacggcggggactccgccgcggccgtcgccaaggcggttgaggaggcggttgtcgtacgatccgatgaggtgaaggaggcggtggccggggaggagaggaagaagacgaagtcgacggagcgcaggctgccccccgcggcgcagctggtgagccatccgctcgcgctgctggcgctagtacccaacagcgccgcgatctttgccgcgggggccgccgcgggcactgtagccaagaccgtcaccgcgcccctcgaccgcgtcaagatcctcatgcagacgcatagcgtgcgggtggcgggagagagtgccaagaagggtgttggatttctcgaggctatggcagacattggaaagaaggatgggcttaagggttactggaaaggaaaccttccacaggtcattcgcataattccttacagtgcagtgcaactcttctcgtatgaagtttacaagaaaattttccggagaaaggatggagagctttctgtatttgggagacttgccgctggtgcttgcgcgggcatgacatctacacttgtaacttacccactggatgttctccggctcaggctagcagttcaatctggacacagcactttatctcaggtaaccagtcttgtaagtgcaaatttctgtactttttttttctggaaactggcgtagcctgatgactttgtaggttgctcttaacatgctgagagaagaagggctggcctccttctatggaggcttgggtccatctcttgtagcaattgcaccttacattgctgtgaacttctgtgtttttgacctgatgaagaaatctgtaccagagaagtacaagaatagaccagaaacatctctggcaaccgctcttctttcagcaacatttgcaactttgatgtgttatccgctggacactgttaggagacagatgcagatgaaaggcacaccatacaatactgtttttgatgctattccaggcattgtggagcgtgacggtctaactggtctttatagaggttttgtgccaaatgcgttaaaaaatctaccaaatagcagcattaaactgaccgtgtttgacacggtgaagacactgatagctactgggcagaaggagatggacaaattaattcaagaaaatgaggagaaaagaagctaggaaaagagccttggtcaatcttgaaggctttggtagaaagcatgcctctttgcacactccatattgctatgtttcctcgtttgctggtgacatattttaggatctaggcagcgcatctttctgttccttttcaaatagatctagtttccagtgctttccgtagcatccacattcatagagatagaggtgggcattgagttgtgatctctttatctagtgtcggtagcattcccctacagatcttacctattttaatagaggatagtgtatcaatgtgaccgccccagattctttaaatgtaattatatacataatagccagaacaatcaaatgtcatggagcacaggagcatgttctccttgtcaataaaaaaaaaaaaaaaaaaaaaaaaaaaaaaaaaaaaaaaaaaaaaaaaaaaaaaaaaaaaaaaaaaaaaaaaaaaaannnnaaaaaaaaaaaaaaaaccgggttaaattggcaaaatggcagttggggtaagggtaaaaaaaaaaatttttgggtccaaaaaaaaaaaaaaaaaggggccc

SEQ ID NO: 88355 - DNA, 266 bp, Zea mays
  Clone ID: MRT4577_180580C.1
ggctttgctagattcccctgtgcctcttacaacgtcttcactgcaaacaagtgtttaccttgtccaagtggcagctgcccacagatgggtcactatgctgatagatatcctgggaaaacaaatgatgtgggccagaaattttatctagacactggtgatgccagtaattttgcacgttggaggtcataaggtatctgtcacactgtctggaaacaaggttacaggacacatcctagtatctttgttcgagaataaaggaaactcta

SEQ ID NO: 88356 - DNA, 785 bp, Zea mays
  unsure (1)..(785): unsure at all n locations
  Clone ID: MRT4577_180581C.1
gtgcggcgctcaggcggcggttccgtgggattcggctcgaggcatttcttacactagcttgttgccgacctgctcccgggacacgcacgaacactgctcttcagtcttcaccatggagtgcacctcaagccgccgccgccgtagccggctctcgcgctgcctcctcctggtgtgcgcagtggcatccctgctgtgccactcccccggcccggcggcggcggcggccgcgccccgccggctgctgcagacgtgcccggggcaggacttcgacgtgccccacgcgcacctgcgcgcgcgggacaacgtgaagccgctcaagtacacggaggagctctccgcgcgggccgcgcagtgggcgcagcagtacaggagcgactgcgaggccgccgcgcccgcgccgggaatcaacgtgttcctcggcgccgcgggcgccacctggctgcccagcgacgccgtcgccgcgtgggccgaggaggagcagcactacgactacggctccaactcctgctccaccggcaaggcgtgcggccgctacacgcagatggtgtggcggggcagcaaggagttcggctgcgccgtcgtcgactgcgactccgggaagacgctcatggcgtgcctctacgagccgcagggcaacgtcgcgngacagaggcccttctgatcgccgcctaccatgcataccataccaaaccatcagtagtagcgcgtgtccatggcgccagtataccaccggccgttcctagctaatcttgtgttttcttcgccttgtcttgcatttcttttct

SEQ ID NO: 88357 - DNA, 509 bp, Zea mays
  unsure (1)..(509): unsure at all n locations
  Clone ID: MRT4577_180582C.1
ggccccgcccttnntttttnnttttttnnttttttgatgttttggaaatgtaactatcgaagaacaaagaggccacatacatcaaccaaaaacctactttatagattgacaactactaggcaaacccacgagatggcgcacggcaccgatgtggagtacgtataatgcggatgggattggcagacccctccgaacaaggggcgctgcctgttaccagagggatacggtcgcgaggacagccacaaacggatggaataacggaagcagtaggagggcggtcaccaaagaagtagcccctaccaaagcaatatggacaagtggtagctgtagtaggtgctcaaaataatccgacgggagtcagtgcggccaatggaatcaacggaagaaagtggggctcctgataggacgcagctactagctggctaactggtacaatctgttgcagcagtagatgatccacgggtgtaagtgcatacaccacagcgagcggactaaatgaaagcagctga

SEQ ID NO: 88358 - DNA, 330 bp, Zea mays
  Clone ID: MRT4577_180583C.1
gcgaagcgtgcaacgatatgtgtgggccaatactggctcactggtagagagactacttcagtttggttggaggttggtgaacctaaaggtaatgatgcggtttgaatcatcaaaaacacagataccttggctgggtcgatcttgacgatgaattgttcctagattcatattgacttgttcacgctggctaatgaggataacgatattataaattaatggggtgatacaactacgattgaatccatatgtgtggcttacacaagacatgcacataatgtgctgcacgcacatgagtttatctcgcaattagctgatctgatgcaaactcag

SEQ ID NO: 88359 - DNA, 821 bp, Zea mays
  unsure (1)..(821): unsure at all n locations
  Clone ID: MRT4577_180584C.1
ggccgctcgagccggcaggccgactctccgccgccacccgaaaccccgacccgcgccgcctcgccgccgcgctaccagcagccaagcacaccgccgcgcccacagcaaccaagcacaccgccgcagccaccatggcagccgttctcacccgcccgacgccgggcaccgtccagtgcttcggccggaagaagaccgccgtcgccgtggcctactgcaagcccgggcgcggcctcatcaaggtcaacggcgcgccgatcgagctcatccgccctgagatgctccgtctgaaggccttcgagccgatcctgcttgccggcaggtcccgcttcaaggacatcgacatgcgcatccgcgttcgcggcggcgggaagacgagccagatctactccatccgccaggccatcgccaagtcgctcgtcgcctactaccagaagtacgtcgacgaggcggccaagaaggaggtgaaggagatcttcggccgctacgaccggacgctcctcgtcgccgacccgcgccgctgcgagcccaagaagttcggcggtcgtggcgcccgcgcgcgtttccagaagtcttaccgttgagctccggcgagatctcttgttgggtatggcggcggtggcctactgcttgcctgcctatctatctaccttttaccgctagtagtttgttttcttttgaaccaatgaattggatatgatctcgaagaactatgagttgtctgcagtatcatgcctagttgacgaagggggttttgctatcataatcttatgttaatgatgaaactgaatggtctgnttgagcttaactgtttgcgatttgac

SEQ ID NO: 88360 - DNA, 330 bp, Zea mays
  Clone ID: MRT4577_180585C.1
gattgaactacaaggtttataggttcacacactgaaacacacacaatcacactcacacagaactgaagttcaatgaaaaatacaacaccgtcaatatgcggaaagagcacatgctgtgactgtaagaggactggataactggtagtttagactgcatcagcgtagcttgctcttgctacagagtggctgggcgaagtcagacttcgagctgacacaaactgcccataacgtagcaggacatcctacagcctgtgtgtccatgatcactctcaacaatggatttttgagcggcttctgtaccatcgatatgagagactccatgatctcctt

SEQ ID NO: 88361 - DNA, 301 bp, Zea mays
  Clone ID: MRT4577_180586C.1
aaaaaaagggcccgaaaatatgatttcaaaccatcggtcaaaatataaaaaaacctggctggctcaccagggttggaaaaaaaaaaatgctcccttccagacgttggggacccccttctcgatggggggggggttctcgggggggatcttgggggccattatgctcaccttgaacccggaaaagggggggggggggaccagccccccgttcacgaactggtggggcaccggggggaccgccgggctgccgctttccacgtccaagtggtagttattgccgccggatcccggacccgggggg

SEQ ID NO: 88362 - DNA, 298 bp, Zea mays
  Clone ID: MRT4577_180587C.1
cccactctttcggagacgcgtcagtctgcttgctaagggggccactctcttggcccggggggggaacgacctaatttccttcgcacgtgaccccgtacgtactaaaggatacactcgtctgcttcaagctgggatagagcggatatttcttcgcaggagtcatcacccattgaccgaccgcctagagacaaactcgccaccgggtgtcccatgatcgatgttcgaagaacagactggtacgacccttaccggagctgttagaggagagccaacacaggaagcctttgcccggctctac

SEQ ID NO: 88363 - DNA, 765 bp, Zea mays
  Clone ID: MRT4577_180588C.1
gaggtaccgtatcgaatatccatgccttccgtttggtatctttatcggtgcacatagactgcttattcgctttttacccctcgcagtagatgtagatcgaggctgggtctacagcctctgatagagggggcgtggagttttccttctttcctttgttttccgttggcgctgtttagagatttcagttttgtatcggtgaggcctgctgcattactgcttttttaaactttttttttcttcttcttcttctgttaaaagaaaacaaaaaactctacttggctcagaattgtttccgatacagacatgagtttatgatttgtttgttcgtatctgcaatgatttcataaacccgaattaaatgtcatggagacagtcgagttcatgtatggagttcagtgtcctgagtggagacgccattatttggattctctgtttggtggtgattccttattggtttgatagcgacataaaaccgaacccaatgtcatggacccagtccatgactccatgctatattctcgtaatacattagtgggctcaattgtctgaaatccagaatacaggcctgccaaaaggtgtcgacgcatacggcatactacctctctctctctgcgcccaagctgaatatattttgagtggcactgtggctggctcaatatatcgctgacatgttgctaatactgtgtcagcacagatgctgatctataggtagaatatggcatgtcgtcatgttgctagcaagacgaagtatttggttctgttccc

SEQ ID NO: 88364 - DNA, 632 bp, Zea mays
  Clone ID: MRT4577_180589C.1
ccgaaatactaagaagaagataacatctcgaccatgatgatgagtaaacaaatgctcatcttgtcccttctcctagtgttgttcgagcttggatcgctgccgacgacatcgtgcaaaaaggtcgttttcaactcatgggtgagaaaccagccatctaatgccaaccaagatgcggggtgtgctaagaaagatgatgcgctctcctccgccgacaccattaaggtatggaattacatcgaccctgcctccgcattgagacctgaagatggcggttacacgaccattaacgagtccatcgccaacatccctgaggacaacaccaaacgctacttacttttcctcaaacctggtgttgtgttccgtgagaagctgttactcggtagaagcaagccattcatcaccataatatccgaggaccccatgaaccctgctgttatcgtctggaatgacactggcaccaccatgggcaaggacggcaagccccttggtgtggatggaagcagcaccatggacatagagtccgactaacaacgttgtcttcaagaatgatgcgccgctaccaaagctaggggaaaagaaagggagggcaccagcactgcgagtgatgggaacaaaggcaaccttctacaatt

SEQ ID NO: 88365 - DNA, 234 bp, Zea mays
  Clone ID: MRT4577_18058C.1
attttggtggaggccttgatcttgcttttgatttttttttacttcttgctcttcttgttcatggtcgagatgattgttgttctttcttgcggaacagaaaacaaaaaaacgggcgcggacacaataaacgcggcccccgggtgggcggaccccaaccccctagacgaggcgcccgatttccttggggttgcgccggacccgcaaagcctttgcacccccatcttttccaggggg

SEQ ID NO: 88366 - DNA, 266 bp, Zea mays
  Clone ID: MRT4577_180590C.1
cgcataaaaaaatacatatatagctaaattgcttgcatgcatcattagatataataacagggatggatcgttacacgctgaaaaagcatgcgcttagtcgttattgggggacgataataagtaaatcgatggagtagggatggagcaaaacacacgtgatgacgcttgctcttattaacttatacgcacgcacgtgtacggagctaggggccgaatatatatcaagttctgcatgcatatctcaaacgaggggataatcagtcgtt

SEQ ID NO: 88367 - DNA, 135 bp, Zea mays
  Clone ID: MRT4577_180591C.1
cggacgcgtgggtgtagttccaaggcaggtgtaatccttagaaacatctcttggagagcttctagccttggagcactcgatatctgccattcaagaagagtcagagattcttcacctacccatgatattggtgct

SEQ ID NO: 88368 - DNA, 297 bp, Zea mays
  Clone ID: MRT4577_180592C.1
agcacaacaccatgagaccagagtcatggccacaaggacgagacccgagtaggcccgcggtgaaagaaagaggctgtgtgtggctgtagtggagagcatgtggagggactcggaatgcagtgtcagggaagctgatggagaatcgagctctggatccagggactcgggactcctatggtgccaccagccagctccccaacaagggggccctggcgaaggtcaagaacaacttcaaagacttgatgtccaaactgacggagtagaattatgtgctgtgccggtggacagatggcctgt

SEQ ID NO: 88369 - DNA, 431 bp, Zea mays
  Clone ID: MRT4577_180593C.1
aaagccccccaaaaaaatcaatttctacaacaaatttgggcctcagtagaagccctgaagcggggggggggttaaaacagccggggggcctattggccccacaggttggacataccccccccacaaaggggaaggggtggacaagttttccctgggggtaaaaattcatgccaaccccccatttaacaagggccccccggaactttgcccctaaaaaaaggggaaatggcccggacccggtccacatatagctgcatataggggcaagggaaattatgcccaaaaccacaagggcctgaaggtatacatggaacctcccaaggggcggatattttgcattggccccagcagcacatgggccacatacagggtcaatgcccccgcccttaaaggacccggggggggccatgcaacatcccattgaatttttg

SEQ ID NO: 88370 - DNA, 400 bp, Zea mays
  Clone ID: MRT4577_180594C.1
ggggcatggcgcgttaccatgctccccgctaccaccacgtcactccacagggggcgcggcactgaacgatttctcccaactcatgaactcctcgtcgatccccatgccccggaatgccaccgcgtgagacttcatgtccgacctatccttcaggacccacgctgtcagcacaatcggaagtacgcggcggcgcccgacagaggcaaacctgaaaggggccatcaatgggttcggccgcatcacagcgccacttcctgctacgctgccacggacgtggtgactccacgcccctcgacgtcatcagcatcaacaacaccttttgtccaaagaaggcgtcgcgcctgttcaattactactccacggtggcaatctccgatgcctaattcaactccgtcactcc

SEQ ID NO: 88371 - DNA, 351 bp, Zea mays
  Clone ID: MRT4577_180595C.1
acatctcgtacacacgttctctgtgacctccagaccgcccttttcagagcttccgtcagcgcatcgggggcaccacctgctcgtcgtggggcgcccggcggtgacaaggcctcccggcccgcggccgtttcggcgctgaggctggccatgacaatccttgtcggggggagcgctttcttcctcctgacggccacttacgtgctcgcgcgctcgcggggccgaaccggggccatccacgggcacggggccgacaagacgtggaaggggaccttgtaccaaaagctggacttctccgtgaacaaggtggtgcgccccctgacgtcggcaaacgtgatcgggacggggagctcg

SEQ ID NO: 88372 - DNA, 377 bp, Zea mays
  Clone ID: MRT4577_180596C.1
ccacacgcgtccggaaaaggcaaaccaaacaggacttttggggttcggtcttcttcctggccgttgttgccgttccctttgtgcttaatttttcttgccggttgttgccttccgtccgggtccagatccggcaacaaaccgatccggggccttcaacattggcggggccggaagcgggaccaaaggcggcggaagccttggttttggggttggggctggggctggggggggccaattccaggggcgacgcgttttgggggttgggccggagcttaagggaccccggcggggttctgaaaagttggaacccaaggttggtaaacccttgaacttggttcaacgtaacttgggacgggaaaaacggtgtaaccggctta

SEQ ID NO: 88373 - DNA, 315 bp, Zea mays
  Clone ID: MRT4577_180597C.1
gtacacgcagcccgccccccgcaggcacagacggagagcagaaaggcccaggcctatccagaggaaacaaacaacccattgcaggcacactggggacccaaacacggagaagaaggcagacccagccaagcacgcacggaaaaaagctcaggggggcacagagagtcaacagcggggcccaccggaccgcacaccaacacggcgccgggaaccgggccaaacatgacgccccagacgcggacaaggcagaccagggcaagcgggagaacagtgggaaacgcgggaaggggcaaaccgcccaagaagggccgagcc

SEQ ID NO: 88374 - DNA, 107 bp, Zea mays
  Clone ID: MRT4577_180598C.1
gccgcacttctgatgagatgtatcccaatgcccttaccgacgaagatgtcgtaattcgctacaaaccctccattggcatggacgatacgatggaaggagccattgaa

SEQ ID NO: 88375 - DNA, 621 bp, Zea mays
  Clone ID: MRT4577_180599C.1
ccccccctcggtttttctttttttttttttttttttttttttttttttttttttttttttttttgaaaacccatgggagatgcacgggacaggtcacaaaacaaatatactaccacaaaaacacaatgaaatatagcccgtcccttaaaggccaaagcgggcacgttgtttggtggaacccccaccgcgctacagcttactataactacgggaactacaaggctcgaatcctgcgggacttctactgacgatccggtggacggaagttgacggctgaaactttacagcccaatacaagaaggtctttgctggtgtaaaccttgcgcgccatcaccttgatgaaggacaggctttacttcttttcctttagcgcagaatcaatgagggcacggcccatacttcttaatattcaccttgggggtacatcacttgcccaatccatggaggatggagtacacaaaggcggaaccaaataacacttcttgatgacaggtgtttggtgccaaaatggattaccacctccttcgtgttcccaccttgtggggaccatgaggattatgtcttttatgatcacatccttggataaaaggcacattctgtggtgcaaggtgtaaactccca

SEQ ID NO: 88376 - DNA, 484 bp, Zea mays
  unsure (1)..(484): unsure at all n locations
  Clone ID: MRT4577_18059C.1
gtcattatanttattttttttttatgttttcttttttttttttttttttttttttcccctgggaatttatcccccacttgcgagagcggccacattttttgaccctcggagttgacaaaaaggcccggcaccttttagaacatgtaaaatgtcttttacgggggacggaaaaaaaacgggacccaattggggtttcctaaactttaaaagttgttttgctggacaaaaatttgagggggcccttttaaaaggatcccctcccatttcaatttggaataaagagaaattggctcctttttgattcctttccaatttaatggccaccaaattacccctaaaaagtaaaaggatttcgcttgttgcccccccgtgggggtgggggaccttttacaattaccccaaatcgtccatttgccgctttttgatgctccccttttgattaagggaaaccagttgttgaacaacctgggacttgggggggggg

SEQ ID NO: 88377 - DNA, 111 bp, Zea mays
  Clone ID: MRT4577_1805C.1
gatgagcgcagagcgcccttcagacgtcctacagcatgatgcctactctacgcactaagcggcagcgtccaagggttgactacctctgaggagatactactagataatagg

SEQ ID NO: 88378 - DNA, 571 bp, Zea mays
  Clone ID: MRT4577_180600C.1
cattgttcataattctggcactagacgcagccctgaaaaaatataaaatgcaaggaggatatacccagtatggctgttaatattgtacaagaaagcacaacagtgggttaattattatgggggagcaaaccaccagatacaaggagggcaaggttactactcaataacgcaggggttaaaggaggaggcctctccttaacaagagcagattgggtcaaaggattgaacgggagctaaccgcattaccacctacaggacacggctcccgcattaatttagtcgggaatgctgcctcaagacactaggggcgcgcatgggggccctaaagctgtgcaataatccttgggcttcataacctgtatgattgttataactaaacagaggacactgaataacgccatgacgtctggctgcacaacactgatgagagtagtgagcccaaactaatctactatactccagggcactgctggctgattcgttcaccactgctttacaggccattccacgtactgcttcggcccctcattctatggctacagtgtgaggatgaattttaagttcttcacag

SEQ ID NO: 88379 - DNA, 353 bp, Zea mays
  Clone ID: MRT4577_180601C.1
ccccttttcacactggccggcggcctccatatcatggtgtaggactgctaccttatcagcctactcgcctttttctgtagctattgcatgcccttgcttgccccaccttgcaaacagctcttaatccatagctacatgcacctgcctctacctctctcgacaagtggtgcaccaaccatataaggcagatcgacatgtggccatcgagacctatctggcagaggctcaattattctcttatatgcatccattgaacctatggactgagtagtactcatgcacaaaatcctacaatgccacatccacactctgttgggctggaatcagggccaacgcatgtcggcatggtttgc

SEQ ID NO: 88380 - DNA, 655 bp, Zea mays
  Clone ID: MRT4577_180602C.1
atacaaagtcaccaacgcatccccacctcccgagctcagcttagctccactccagctccaatcacagtggtgaccacgagcgcgagagctagctagagggcgcgagaaaatgccgatcaataggatcgccctgtggagccccaagagggtaccgcccgggtgccctcaaggagggttcgctgacttcatctccaccctcatcttcgccttggccggtcagggctccggaatgctcttcagcaagctgaccgacggaagcccgacaaccccggcgagactgatcgcgccgattgtggggcacgcgttcgcgctgttcgtgacgtttacgtggtggcgacccccccggcggagaggtgaaccctgacgtgaccttcggagacttcgtagaagacaacatcaccctgatgcgggagatcctgtactgggtggaggacctgctggggtccaccgcggcagagcttcctggtccgcttctcgacgggcgaggaggccacgggcacgcttcggattgacgaaagcgacgctgtgtgagacgctggtgctgcagatcgggatgaccttagagctggtgtacacgccgtgacacacggcggtggactctaataagggcagcctgggcaccatcgcccacattgccatcggtttcatcgtgggg

SEQ ID NO: 88381 - DNA, 439 bp, Zea mays
  unsure (1)..(439): unsure at all n locations
  Clone ID: MRT4577_180603C.1
gcccacgcgtccgcccacgcgtccgcgggtacgtgggcaggatgaagcggctggccgcgaagttcgaccggttcatcgagcacgtgctgcgcgagcacggcgagcggcggcggcgggagggcggcgcgttcgtgcccggggacatggtggacctgctgctgcagctcgccgacgacggcgacggcggcccgggcctcgaggtgccgctcgaccgcgacggcgtcaaggcgtccgtgctggagctcgtcaccggtggcacggacacgtcgtcggtgacggtggagtgggccatgtcggaggtgctgcgggagccccgcgtcctgggtaaggtcaccgaggagctggaccgcgtggtgggccgcgaccgcctggtcggcgagggcgacatccccggcctgccgtanctggacgccgtcgtcaaagaagtccatgcngcttc

SEQ ID NO: 88382 - DNA, 672 bp, Zea mays
  Clone ID: MRT4577_180604C.1
ggccagcacgacgttaaggccagcgccccgtgctccaggcgttgcgcagcgagggcctccagcatacgaaagtcgtcgtcaatcgaccaggtacgctggaacggcgcgctcggccgctttgcacccttagcctccacctcttgatttggagcgggcttcgtctgcggcatctcgtcgtccgcctccctatcctcttcttcgtcggaagcctcggaatcctcgccagtctgcggcggcggaggcgggttcttggtggcggaagaagggaccacgtggttggccttctcgtcctcttcgacatcctcctcttcgatatcctcctcttcgtcgtcttcatcctcatcggacgcttcgggttcctggaccttctgcggctcgtcatcttcatcgtcatactcatcctcgtcggaggcttcgggttcctggaccttctgcggcagcggagcaacgctcttgggagcgaccggaggcggtgagtgggcggtctccaaatcctcctcctcctcctcctcctcctcggagcccgaaccagaggcggtctcctcggaggaggcagccgggggcggaggcggcggaggtggagccgagcgcttgggggccatctccgccgctgcacctagggttagagatttggcaagctggtgaggcgtcaccaagctagggtttttccgg

SEQ ID NO: 88383 - DNA, 405 bp, Zea mays
  unsure (1)..(405): unsure at all n locations
  Clone ID: MRT4577_180605C.1
gccggtcgcagcggtggtggtagagcttgtggttgatccagagcattgtccacaacacgggtgggcgcccgcacgggcgaacactctgaaaaactgtgaatatgttaggggacacggtagagatcacaaacatacaggatcgacatacgtggctagaaacgcggtgatagcccataatcttgttaaaaaaaaaaaaaaaaaaaaaaaaaaaaaaaaaaaaaaaaaaaaaaaaaaaaaaaaaaaaaaaaaaaaaaaaaaaaaaaaaaaaaaagggaagcaaaaaaaaaaggatcaaagatttaaaaaagaaaaattaaaaaaataaaaaaatttttaatagggncaccctaattaaaaaaaactgggcaagaatatataaaaacgtggggtttgggaaaaaccctg

SEQ ID NO: 88384 - DNA, 2101 bp, Zea mays
  Clone ID: MRT4577_180606C.1
ccctttagatgcatgttcgagcggccgcaagtgttcgctatcggtctatcgcctgtctttagcctggccgcttttttttttttttttttcacttataataatttaggatggagggagtatttccatattactggagctcagactgacaaattttttttttttttttttttgaggatccatccagactacaaagtaatcctaagaaattgagaaaccatatcaaaacataataactgaacaggtgcatactcaggcacttcctgacttaacactgacgctgcaacatgtctgacaccatgaacaactaaaaactcgacaccagatagataacaaaatcaagattcacctaccatgcttgagtaggtcatacaacatttgctggtaatcgatcatcagtgcacttaaataccataaaatagaattcttagatgatactcagctcagtccactgcatcactcagccaggtccatgagcgtcctggtcacttccttggtcaggtcgtggcgacgaagatgtaggttcatcagtgcacgcctttgaacttattgatcctctcgtacagtggacgggccttgctgtaatcgatcatcccaaactcccgcttgaacaagcctgggtgtgccctctgaagcgccctcacctcctccgcaaggtatgggtacagctcacacatctcgtcaggctccctcccagcaccaccgttagccgacgccttggtaaccgccttggtaacaggcttggcattgctaacagaaggccagacgttcttgcagaggtcgaagagacggcgatcctgatccttgctcggtggcgcgcctttcttgaccgctttggcgtaccggctctgcaaactcctcaccttcctcttgagatcggagaggctgcagccactattgtcgagcttgccagcgagggcgtcggccagcacgtccgtttgaggcagcgcgccgtgctccaggcgttgcgcagcgagggcctccaggatgcggaagtcgtcgtcaatcgaccaggtgcgctggaacggcgcgctcggccgctttgcacccttagcctccacctcttgatttggagcgggcttcgtctgcggcatctcgtcgtccgcctccctatcctcttcttcgtcggaagcctcggaatcctcgccagtctgcggcggcggaggcgggttcttggtggcggaagaagggaccacgtggttggccttctcgtcctcttcgatatcctcctcttcgtcgtcttcatcctcatcggacgcttcgggttcctggaccttctgcggctcgtcatcttcatcgtcatactcatcctcgtcggacgcttcgggttcctggaccttctgcggcagcggagcaacgctcttgggagcgacgggaggcggtgagtgggcggtctccaaatcatcctcctcctcctcctcctcctcctcctcctcctcctcctcggagcccgaaccagaggcggtctcctcggaggaggcagccgggggcggaggcggcggaggtggagccgagcgcttgggggccatctccgccgctgcacctagggttagagatttggcaagctggtgaggcggcaccaagctagggttttccccggccggcctcgaggtacccaatcgccctataaataccataaaatagaattcttagatgatactcagctcagtccactgcatcactcagccaggtccatgagcgtcctggtcacttccttggtcaggtcgtggcgacgaagatgtaggttcatcagtgcacgcctctgcttcttgatcctctcgtccagtgtacgggccttgctgtcttcgatcatcccaaactcccgcttcgtggacggcgcctcgtggtgcgacagggtccggaccggacggggctctcaccctcccaggcgtccctttccagagaacttgggggcggtccgtcgataagaacgcctctccccctccacctccggacggcgaggccgcccgattctcaagatgggctgctcccggttcgctctccgttagctaggggaatcctcgttagtttcttgtcctccgcttatttatatgcttaaactcagcgggagctcccgaatgttcttgtgtcgcccccccgcccc

SEQ ID NO: 88385 - DNA, 230 bp, Zea mays
  Clone ID: MRT4577_180607C.1
ctgacttttttttcttattatacgttttatgcgcatcttaaggtgttattgtagggggttttttttttgcagttggagtatgacaggtactaaactaatgcacaataaaaacaatgaatgcctctatgaaagacgagtaatgacactgctttgaaatgggcctgactgacgaaaaagaaaaaactgacggtactttttaaggacactattgaaagcacatgttctatgca

SEQ ID NO: 88386 - DNA, 517 bp, Zea mays
  Clone ID: MRT4577_180608C.1
tttttttttttttttttttttttttttttttttttttttttttttttttttttttttttttttttttttttttttttgggcgccccagccacaacctggcttagctttttttggtccatttgccccaatttccgggtttttgaaaccggggggcccttcttttggaaaacccggggggctccctcccccagggggcgggacccccggaacccaacgatgggggggggtttctaacggggaaacaaaccggccccgggggaaagacaggtgctttttttaccccccctggcgaagcgggtaaaggtttagtcgggtggccagctttggtccacaacctcacaaactttggggggggccccccccttggtctcgctgaacattctgggtggttcagggttggccggagaatttgggtttgggtcccccccccgggactggtttgggggcaattttgcccgcccctcttatatagggccccactggttttggggggtggccaaacaggagcttccatccg

SEQ ID NO: 88387 - DNA, 498 bp, Zea mays
  unsure (1)..(498): unsure at all n locations
  Clone ID: MRT4577_180609C.1
ccgacgacaagggcggcggtggcggcggcaacaacgcccacgacgcgccctttacctggacgccgccaccgtttttcatcgacgccgccctcgccgacaacaattttgggtgcgttttnnccccgacctcgaggtcgcgaggtggccgccgccgcccaacgggcgacttgcccccgcgctggccgggagagactctcgcgctgccagcggggccgatgccggtgacgaccgacgacgtgctcccctcgttgccgcgagggactggagcagcgggcatggactgctgctgcggcatccgcgtggacccaacctctgggctggctgccgggctgccaacagctgcggcggctcccggcgtctccggcgcaccaccgtggtgaaccccatcctggcggcgctgttcatggacgaggcgcacgtgatgctgagcgtcaccctcggcggccgcacggcgacttctgggggctggagccgccgccccccatcgcgggggtgccg

SEQ ID NO: 88388 - DNA, 365 bp, Zea mays
  Clone ID: MRT4577_18060C.1
cccacctgtacatggactggatcgcatgaggtttggaatcttcagcgagtattgaaatatacgggactccagggtggcattacaacgtccaatacacgttgcatatctccacgacgaagcaacatactacgctctattttctggcaaccgatacaggatgtgcggcctggtggcgtcggtaaaccatcactcagtgtggaacgataccatgtggggtcttgtacgaaccttatattatcaagatacctggaacctcggcggagggctctatccgaacacacgcaaagcggcagattgcctcagtaagattccatgaagttgagtaaaaacttattgaccaactgtgctctacttcagtcttaatg

SEQ ID NO: 88389 - DNA, 431 bp, Zea mays
  unsure (1)..(431): unsure at all n locations
  Clone ID: MRT4577_180610C.1
ttttctttttttcttttcggaccgctcgcccaattaggccagggccccaccaccagcgcccaggnggccccccagccccatcaccaccacgcggcggcgcgcgcgctgcccacgcccggccgagagcaccccaagacccaccgccacgaagctccgggccaccaacgaggtccgcgccaagagccagtcctggcacctacccgaggaagacgaagcaaggtcaagaagagcaacggccagggcctggccaacaacgagatcttcgagcgaaacccgacgacaatcacgaactcccgcacctggctgcgctaccacagcagaaccggcccccacaacctgcccaccgcagcccgcgacacaacccagaaatggcgctgaggagcaccagcacaacgagatggccccacacccccgcgggaggcccccccgca

SEQ ID NO: 88390 - DNA, 481 bp, Zea mays
  Clone ID: MRT4577_180611C.1
ctggtgttctttctggcatttttattggaagcttagggggcagccgtttcccaccttacctaggaacctggccggagggtgcccaaaaccgctttatcaaggaaaaaaaaccctgaaggacccaaagtttttggaacccaagacccttacctttaatacaaaaataaaaatgcgaatgggggggaaacaaatcgaaaggcaagcgatggtttttggggcgggcctcattcttattgtttttcccccctctaattgaagacagtggaccctggcttgacaggctagggtgcttgagggcgaaaaacattttgatgggggggcggggcttgcgccttttcaggttgttcacgtttcttccaaaacccgaacacgccgttcaggggtcatcagcctttcggcaaagagataccagggggccttcccaaagaaaaaatgggggccgccctgcaacattttgtttcataagctcagaatctgcctt

SEQ ID NO: 88391 - DNA, 152 bp, Zea mays
  Clone ID: MRT4577_180612C.1
gcattaaacgtaaaaaaatgcaacagggcacattcaagggcatgggtgcgcaaagcataagaattacatttatccacggtgctagtcacctgcaggacagaagtgaaacaagaaccacaccccctacttaccatgcaggtcgagaggaggat

SEQ ID NO: 88392 - DNA, 263 bp, Zea mays
  Clone ID: MRT4577_180613C.1
tatcgagaggaaaatcaacaagggcaacgttcatttacaagaagaagatgaaaaaaaaaaggcccacagagcatgagagcaaccgttttacatacacccgaggaaaaagggggtacaactccccctaatccattgtataactcgctcacgaataaagacagacacccttcatttgatctcccctggtccttttataaacaactaggcccttgttctgttgttgaatcgccagcgtgatataaatcaatattttgtggttccca

SEQ ID NO: 88393 - DNA, 650 bp, Zea mays
  Clone ID: MRT4577_180614C.1
gaatcatcaacttgataatgcaccagttgtacttgtttttgtaatacaactttacatcctttaatcgacctacatctttatcacctggcctcaccaaacaagaaccgtagatttcattgaagtaaaatgcagtgaattatgacttgtgagctactcacatgccccaaggcctcttgtcagtaagcttaaggttcaaaacttcagagtcgtgtctcgtccgggttcggtgatggcatattgaccattggtgcgatgccttcttctgccagttaggagtggacacgcatgcagagaaaagtaaatatgaaactgaggtaattgccaaccaaaattggcgggggaacgaagtgttcttttgcttctagccaccttcaaggtattgttcaaaagcgccatatacagcagccccgaaatgcacataaatgatagcataaaacaccctcgcaccctgcacatcttcacttgatgacgtcctgctcacttgctcagctcatcatgtacatggtgcacgaaggatgaaggaatacatgcgcatccttgaacatagcagccaacctgcctccttggccaagttgcaccttcaaccacagcgaggtaagcgctgcagttcggcgctcaaataagagcagcatcagcaagaagctatcatt

SEQ ID NO: 88394 - DNA, 231 bp, Zea mays
  Clone ID: MRT4577_180615C.1
tcttacaaaccagcacatcatcagccacctccattcattttctttcccctcctctcttcactatgtaagttattattaaaaggtgggccgtccccatcccctatttcctctctctaactcacactaaattccaaactctacatcacatgtctctataaatcactaacacatactctatttcctctatctacatactaatattctacaccacttactaactttcactataca

SEQ ID NO: 88395 - DNA, 2952 bp, Zea mays
  Clone ID: MRT4577_180616C.1
tcactccattcacctgtcagaaaccgcaccgtgtccatggaacctagcgcgccccggggcatcctccgcctctcgcccccccgtgggccgagcacgtgaatcccacacccacgaccgctacaacacatcgaccaatgatcctggtacccacaagtatgaagcgctcgtctagcccgtaaatctccagcgtccccctttcctcccatcttttgttgccagttcgggcctgcactgctcttgatgtggagctggcaagttcaggaatttttaatgcactatcagatgggttaagggataaacatgataaactcaggcgattctgtatggcaacactaggagagttattattctatatttctacccagtctgatcaagataccaaggaaataaatacccaagaataccctttgaaggataacaggtctgcaacatcttggcaggttcctagtgctgtaattgcactggtgtcatctatcttgcgaaagggtgaagatgatctagctcagctatatgccttacggacagtcgataatatatgtagccaaggaactgaatggacatcccgttttgcatctcaggatgcgattggacatctgtgctacatctataaagcaactggaaagcaggagagtacgaggctcattgcaggatcttgtttggcccgcctctctcgcttcagtccatcatgcattcatttaatcttggaaaagatatcattcaaggatatagcatgcacacttatcaagggaaatacacgtgaacagcagattagtcttaatattctcaattcggcattagttaatagtcacactgtgacaagcatgaaccggcatattctttcattatcagatgacaaacaattggtccccgggctcatttctctaatagaacagggaactgatgttctacgtgggaagacccttttgtttgttgctctgctttgcaagaatagtcgaaggtggcttcctcatttcttttgcaatgcaaaattaatctcagctgttgatagactgggaaaagagaaggagggttttattcatcaatgtacagaagcatttgtgcagttggttgcttccttggtccctggtattcttgacactgtctccagtgatatacagcaggttatggttggcaaacgccatggacctgttactgctttagctgggcgagctcatccaaagagcacaattcatctgttccctgttattcttcatcttctgggaagtgcatccttcaagcatagagttgtgacaggccatgtattgcttcagttggcaaatcttattaagattttggaggcaccatttcaggctagggatgatttccaaatgacattgttgcgagttcttgaggctgctacagaggagccttctgttatacttaatgaacactcagtattcatgagtcgtatcattccaagcttatctgtcttatacaagggcaataaagatggtgatgccagatttctgtgtttgaagatactcgcagatgttatgattgtgatcttcagtgattcttcattaacttctgacgaacaaacattaactgatttgaaatcaatctcccagaggcattttctgccactgtacccttcttttgcagaggatgaagatcccatacccatatttgctcaaaaactgctagtaatgctaatggaacatggttgtataaaagtctctgatattctacacaaagcaacagtatcccaatgctttgattttttgctaggagatctgtcaaatgcaaatgtaagcaatgtcaagctttgctttgccctggcatctgcacctgagatgaacacccatattctttctcagcttcaagttgttagaaggatagggaacctacttgagtttgtcgctgcaaaagacatggatgattttcttgaaccaaccctggagctttgcagagctttcattattcgtggcactggcagcaacagaagtggtcgccctctccaaaaacccagcacttcttcttgacagtgccttcagcatgagtattgctgttgatcaacaaacttgtgtcatggatatatgcgacttcggtggcaacatgggtatttttcttgagctagttggcaattcagatccgcagataagtgatttagcatcagattgtgtagtgttgttgctcaaggcagcacctcgagaggctacagtgggcttgttgacaagtcttcctaaattaagcactgtcatggacttgctgaagcatgacagccacctacgtctgattcgcttattatatggcctagccttctcatgcagacaatacttagcccagggaatgatcctgtcaatatcagtgccagctttgatgcgagttgaagcacttgtttcagttttcaagggctccaatgatagccttcttgccgatgctgcttcttatttgagcgccgaactgcagcgcttacctcgctgtggttgaagctgcaacttggccaaggaggcaggttgtctgctattgttcaaggatgcgcatgtattccttcatccttcgtgcaccatgtacatgagctgagcaagtgagcaggacgtcatcaagtgaaaggtactttacatcagtggctgatctcagttgcctcaatggccaagtgacactttccgctcatagatgtgcagggtgcgagggtgttttatgctatcatttatgtgcagttcggggctgctgtatatggcgcttttgaacaataccttgaaggtggctagaagcaaaagaacacttcgttccctcgccaattttggttggcaattacctcagtttcatgtaattctgtagtacctgtaattttattgagaatactgtagtccaatttcatgtgtacatttataaattcctgtgaagttccatgtagctgttaaagagttccccatagctcctgaatctttggtactattgtgtatttttttttactttttacaatagtgataacgtggcccatttcgaagc

SEQ ID NO: 88396 - DNA, 385 bp, Zea mays
  Clone ID: MRT4577_180617C.1
ggggctaaacccatcccagggcccgtaccgcgccgtccttatggagccggatcgccacccgctcgctgggcccccacctgccccgtcgccggctcgccacttcggcccacctccgggcctaagatccatccccaatccggcaaccctagcgcggggcagcagctcctcgactacggccgccgccggctgcattgcccgaggtgatcgaggggcagagatagagcttggctggtcggatccgggagacagagacggaggggaggatgtccagaagggcggcgaacccgagccggaggttgggggacggaggcttgccgtccttcggcggcccgttgccaccctcagacacgctcgcctcccgagctcaccagtgccctccagacac

SEQ ID NO: 88397 - DNA, 498 bp, Zea mays
  unsure (1)..(498): unsure at all n locations
  Clone ID: MRT4577_180618C.1
gtatctcctcgaggnnccggccgggaatatgtataatttctaccatcggcatccacactgaacgatccaactgcacttccaaaatgaatgaggtcacctccaggttcggtaagcgtcacaacaagacgaaaaccctgggcctgagatgcgcgcgctgatctctccacatcccaaaaaatgaatgctcttcttgaggctacccttctgataagatcggtaggcacaactgtccgcgagagacgcgtaagattatcaaagatacgtcgtgtaccggatcgtactcgatatctcaaggatgagtcccgacgactcatgaacgtatatcagattggcactatctggtttgctcgtgccctaactggcaagaaggactaataggaagcgattaccttctgatgccctacaacgcatgtgcgaacctatccttcttctatcacggacgattgaaacacccattgcttcgagtactgatacatcaacaatgacggatctctcata

SEQ ID NO: 88398 - DNA, 390 bp, Zea mays
  Clone ID: MRT4577_180619C.1
acgttgctgcccatccacaacttcccttctgattttccttgaactgcacatacaacgaggctaggaatgttcaaagacaaacaaggctcacaacccacataacacgcatagattccctgtttttattttatccagcctgctagccgcattcatactcgaggcggccacttcctcagaagctaaaccttctagattggagaacaaaacgaaatccctggagaaacttgataatctccgtgagaacgctttagtccccaatgataaaagcagatccaccgattacgagaaagtgatgccccattcggagaactttctaatcccacacgctaccgacgatgttttcttattttttttaaacctacccataaacccttccattgcgtaaaattt

SEQ ID NO: 88399 - DNA, 310 bp, Zea mays
  Clone ID: MRT4577_18061C.1
gtttgagcaaccaagaaatcatttgctctgctcacaaacggtacacgcactttcctgcgtgggttgccacctggttcatatagggaaacggctcaactatggaacagagacattgtacgactggaaagctatgcaagcacatagcttttcatcgtcgataaagaggattaaacgtgcccttgactcgtatcatgaattgcgtatcgaccatttgcaactggcttgcgcactttttagacagtaccttctgatgcaaaactagcactggttggaagctgcatggctcaaccaatgagtagctatcttgaca

SEQ ID NO: 88400 - DNA, 1784 bp, Zea mays
  unsure (1)..(1784): unsure at all n locations
  Clone ID: MRT4577_180620C.1
cattgggaccctcgaggccggcggggtcgaaaaaaaaaccaacctttagcaccaggcaaaccaaacactaggccaacgcaattctctagagcactgtaggctctagttctccagaggcccgccacaaccacaagccaaggccacagccagtgccctcgccatggctcccaacctcagcaagaagacgcctgctggcctcctcggcgacgaggtggccccggtggagggactcaagccgtcgcggttcacccttaagggcaaggacctggccgtggacgggcacccggtcctgctggacgtgccggccaacatccgtctcaccccggcgtcgacgctcgtgcccgccgcggacgtccccgcagcgggcggcggcagcttcctcggcttcgacgcggcggcggccgagagccggcacgtggtgcccgtcggaaagctccgtgacattcggttcatgagcatcttccgtttcaaggtgtggtggacgacgcactgggtgggggacagcggcagggacgtggagaacgagacgcagatgatggtgctcgaccgctccgccggcgagcccgacggcggcggccgaccctacgtgctgctgctccccatcatcgagggctcgttccgggcctgcctcgaggccgggaaggtggaagactacgtggacctgtgcgtggagagcgggtcgtcggcggtgcgcggcgccgcgttccggagctcgctgtacctgcacgcgggcgacgacccgttcgagctcgtcgcggacgccgtcagggtggtccgcgcgcacctgggcacgttccggaccatggaggagaagacgccgccgccgatcgtggacaagttcgggtggtgcacgtgggacgccttctacctcaaggtgcacccggagggcgtctgggagggcgtgcgccgcctggcggagggcggctgcccgccggggctggtgctcatcgacgacggctggcagtccatctgccacgacgaggacgacccgaacagcggcgaggagggcatgaaccgcacctccgccggcgagcagatgccctgccgcctcatcaagttccaggagaaccacaagttcggggagtacaagcagggcgggatgggcgcgttcgtgcgggagatgaaggcggcgttccccaccgtggagcaggtgtacgtgtggcacgcgctgtgcgggtactggggcggcctccgccccggcgcgcccggcctgccgcccgccaaggtggtggcgcccaagctctcccccggcctgcagcgcaccatggaggacctcgccgtcgacaagatcgtcaacaacggtgtcggcctcgtcgaccccaagcgcgcgcacgagctctacgatggtttgcactcccacctccaggcctccggcatcgacggcgtcaaggtcgacgtcattcacttgctggagatgctgtgcgaggagtacggcggccgtgtcgagctggccaaggcctacttcgccgggctgacggcgtcggtgcggcggcacttcggcggcaacggcgtgatcgcgagcatggagcactgcaacgacttcatgctgctgggcnacggaggccggtggcgctgnngccgcgtgggcgacgacttctggtgcacggacccctccggcgaccccaacggcaccttctggctgcaggggtgccacatggtgcactgcgcctacnactccgctgtggatgggcaacttcatccacccggactggaacatgttccagtccacgcacccctgcgccgncttncacgccgcgtccgcgccatctccggggggccatcta

SEQ ID NO: 88401 - DNA, 763 bp, Zea mays
  unsure (1)..(763): unsure at all n locations
  Clone ID: MRT4577_180621C.1
tttttttttttttttttncgattgaaacagtgacatttcaaatttgtgatgcaaccatcggacgctcattttggcccaatcgatcggcacgtcgcgaacgcgacccaaggaagaagagcccgaaaatttggggaaagctagctagctagctatatacaagcagaatgtagctagaatacagagtactacacaaacgtacgtacgcacgcacgcctagctctagctaaaagcactcctccgggatgcactgcagcgccggcgaccagcggccccggcgccttccggcagcagccaccgcgtcggccgcagcagcctgctgcttcctggcgtgctggcggcgcttcagcacgctgacgagctgctccagcgccggcggcagcccggcgaaggcgccgccgctcccggcggcggcgacggccgccgccacctgcttgagctgctgcttgctgagcacgatcttgacgcgcatcgcgccctcggcggcgacgctctcccccgtggaacgctcgatggccgtggccgtctcggtgtccagctgcagccgcgggcacctcaccagcctccgcccgtccctcctgcacgtagccggcgcggcagcagcctccagctccatggatcgcccgtctatccttcgatctggtaacgccagtaggcagtagtagctagagaacaacggaggaatattatgtaacatcactgtcacttgtgcgtgtccaagctagggtttttatgtagagagaagcggagcttacgagcgagacag

SEQ ID NO: 88402 - DNA, 389 bp, Zea mays
  Clone ID: MRT4577_180622C.1
ggagtcttaatcgcgacactcgatatctcataatcgaagatctgatgaaagcgggccttcctgttgccgaagatctgcatattacattgaatgatgcggtcaacgaagaaaattctgaagatagattagtaaagctcttgctagactacggcgcttctcctttggccaacggatgcaagacgttggtcgacgccgcataaaaggcgctttcgtcgtcactagcccgtttattggagattgaaattcctcagcatgatattgacgtggcctttagcaattcgttcaaggctgagaaattcgacgcttggtttacacaatctggattagagacggcgcagatgctttttgataaagagccacgggtgacgctttaagtggagcgcttgttc

SEQ ID NO: 88403 - DNA, 1874 bp, Zea mays
  Clone ID: MRT4577_180623C.1
cattgacaccctcgagcatgcccgggacacccgtgcctcccgatcaccgcctcgcgatctcccccccgccgccatggctttctccgcgcggaggagcctcgccaccagcctgtcacaccacttctccggccgcctctacccctctatctcgcacctcgttccttcccaccacgagcactccgaccccgctccctccccctcccccgtgccgcagcctcggccccaatcgtcgcagcaatccgcaccaccgttcccctccgcgcttcctcggccgtcgagatcccgggccctggcccccttccccctccctttcgctctccacctcgcggcccaccgctactcctccgccccggcccccgactcggaggtcttggcggactccgccgccgcggcccctgtgtcggagctgctctccgatggggtggcgtcagctgccgcgtccgtctccacgccgccgttgccgtaccccggggaggtcgctgccgccgcggccgaatcatttccacccgtcgcggcgctgcagcacctgctggacgccgttcaatccttcaccggcctcaactggtgggcgactattgcgctgacgacgttgatgatccggctggcgactgtcccgctgctgatcaaccagatgaagtccatgatgaagttaaatgagatgagaccagaaattgaagccatcaatgaagagatgcgaaattcaactgatccaaggtcaatggaagtggggaaacagaaactgggggagctattccttagacatggagtgactccattgacaccattgaagggtctattcatacagggacctatatttatgagctttttctttgctatatcaaatatggttgagaaagtcccttctatgaaaggaggtggtgtgtattggtttactgatttgacaactcctgataatttattaatcctcccagtgttaacatcactgacctttttggctacagtagagcttaatatgcaagatggcatggaagggaatcatatgttaaaaccaatgaaaaagttctcccggttttttggagttttgtttgttccatttacaataggctttccaaaggcaattttcttttactgggtcacatcaaactttttctcacttgtttacggtgctgttctccggaatccggctgtaagactcttcttaaatcttcctcgcttggaatctcagcccacaactgcagaggtccagcccttaaacctatcgggcggaccagagccaagtcctggagtcgattctcctatcacagataaggaaactgagcagtcgagttctgtgctaagtcctggagtcgattctcctatagcagacaaggaatgtgagcagtcgagtcctgcggtgagtcctgaagtcaattctcctatggtggacaaggaaagtgagcagtcgagttctgtgttatgtgaccgtatcagagatcttgagatcagggctaaagcaacgggtgaatctcgagagtaaattcgtgatttgtccacatggaagtaagcaagcacatctcctttgggggtttctggtacttttttttttttgttgggagcaaaggatacccagtagcgaggtataattttgaagagtccgcggtttttcgaaatataacggcccaccatgtttccgtgaataaattggtgtagtatattggcttgtaaaatcgttgcacggtatgatataaccttgtactactagctaacattagccatgatgttccttggattaagcatattgttgctattgagcggcacacgacatgtttgtctaatatttgcttcatgctgaaagctcaaatgagtgataactgtttctgtacatttgcgatgttgtcaattttcgagagctgaagttggaatgtgacttttcg

SEQ ID NO: 88404 - DNA, 226 bp, Zea mays
  Clone ID: MRT4577_180624C.1
attcggctcgagctcgagcccatacggtaagagaaaggccgcatatggacgcatccaagaccgtttaattgatgattgcaaagatccgcacgaaatggccactgatggctgctataccccaaatggacagagagcgctaataggatccaataaaggcagctgccctatagacgagacatctcgaataaaagacgacaccacaagaaacaaaatagacaccgcaaaa

SEQ ID NO: 88405 - DNA, 397 bp, Zea mays
  Clone ID: MRT4577_180625C.1
tctcgatctatttcttgtccggacgcgggggcacagtcctcatccatttatcctgttgagccaacaagcaggcaaaagttatcggtgcgaggagctggagagacgccgtcgacatgaagcaaccgtccgatcggagcctaggctgaacaggaggagggagccgcacatggagggtctcgtcggcggcagcacagcgcaggcagtgcacgtcgtcgacaacgcctgaggggaggcagagtacgtgcaccccatgcaccgacacgcgcctaccgagcaccagtgcacctacaccctcgtgaagcacatcaaggagcccatccacctcgtgtggcagctcgtgcggaggctcgaccagccgcaatggtacatgccgttcgcaaagaactgcgtcgtgcgc

SEQ ID NO: 88406 - DNA, 328 bp, Zea mays
  Clone ID: MRT4577_180626C.1
ctactaatttttctgcccaggggacgaacactggtacagaaggggcatttaatggataggggtatgccccttcacacagtttgctaggtaaatagaaaacataatgcatccttttgagtacagccacactctttcacacggtttatgatatattgttttcctcagggcatggctggtacctgggaccctactgagcgccacccggatattgttcaataacttccaagccggttattgtgcttcgggtcaaggctcaaaggtgctaaagttggatcgtaacgatccacaacaccttccttcttgtggaccaacaatgtggaaaaggttc

SEQ ID NO: 88407 - DNA, 657 bp, Zea mays
  unsure (1)..(657): unsure at all n locations
  Clone ID: MRT4577_180627C.1
ccccagtgccaccttccctcctcggctcgactcgcccggcgctccgccgcagctggctcatcccaatcccctcgtacagtcgtgctccgcgcccgcttcaccgcctgaacaaagatggaggccttcctagccggcctcttcagggcgcctccacgggccgtccccgcccctcggggcacgcctctccccagccttcctctcttctacggcaggcgccgcagggggccgtcctcctccgtcgtctgcatggcggagccctatctgattgccaagctggactctgcggagaaggcctggaaagaaatgtcggtatggttacctcttctgtgtgcacctctggttccttgttttcttctgtgttattaggattaccaatcaggttacatcgccattgttattgtttgctctgaagttgcctgagtgaaaaaaatgtcttgtggaatagaactaagttagtactaaatcaattctgagcttctctattatgccacggcaaagaaaaggtaacacatgcgcaggcattataaaatgcaatgctgccacagtgatgtggagaagtttcaattntgatcccatcccaatggtcatcagtctaatacttcagtgtatgcttcaggttagggtgggaagatctgacattgtttcggatccaagcga

SEQ ID NO: 88408 - DNA, 718 bp, Zea mays
  Clone ID: MRT4577_180628C.1
gtcctttccagcctcccgtcccgtgtggcgtctggcgtgtgcgcacgcacctccccaggccccagtgccaccttccctcctcggctcgactcgcccggcgctccgccgcagctggctcatcccaatcccctcgtacagtcgtgctccgcgcccgcttcaccgcctgaacaaagatggaggccttcctagccggcctcttcagggcgcctccacgggccgtccccgcccctcggggcacgcctctccccagccttcctctcttctacggcaggcgccgcagggggccgtcctcctccgtcgtctgcatggcggtaaggaaaagagatagacagagaagggaaaaaacgcctcctttttcagcgttcatctccatttccggacctttttaccggaaacttcttggaaacagagcggctgcaacctgaattcttgtcacttaccctgaatttttgttcttcgctgaagctgaactgaacattgtttgtgtgctctgctagccgaaaatcctacctttcgcgctcagactgaaccagtcgctgttcattctgtatgctctgtgcaggagccctatctgattgccaagctggactctgcggagaaggcctggaaagaaatgtcggtatggttacctcttctgtgtgcacctctgggtccttgttttccttcgtggtattaggcttaccatcaggttacatcgccattgttattgtttgctctg

SEQ ID NO: 88409 - DNA, 233 bp, Zea mays
  Clone ID: MRT4577_180629C.1
tttaattttttttttttattattcattttttttctgggctttttttcattcactattcgtttattttttttaggggggtgacacattattaccaaagttttaattgcttccatcaaatgtgaaacgggtaaacaccatcgcgaaccgacatatataaagagatatggactcaaccgctattgggaaggggtgcaaaaagattttcaacacaatatacatagctggttttaaat

SEQ ID NO: 88410 - DNA, 246 bp, Zea mays
  Clone ID: MRT4577_18062C.1
accggagcagacgcattcccaccgaccacgccgccggtcgtcctccatcacatcgccgatgactctcgttgctcttttcaataatcaagattagcactggtggtagtgccagtgttggtcaaagttctctgggatatctctttggaagctgtgagccccccaaaccagcagtagcaccagcggtagttgctccacctgttgagcaaccatctgctgcgaagactgatgcggccaagcaggttgctg

SEQ ID NO: 88411 - DNA, 839 bp, Zea mays
  Clone ID: MRT4577_180630C.1
aattcggcacgaggcggcttttgagctctgaggtctcggtcaccgcccccccaccccaccaccaccaccaccactgggtttttagatccaatgccaaggccgtgaggaagctagctcttgcgtcgtgaggaagagccgaccagagaagctaggagcgcgtggcaatggcggagggcgatgcgggaaaggcggaggcggggagctgcagcgccgccgccgcctccggcgccggcgggtgcgacgcggtcaagaagcggccggagcagagcgtggcgttccacgagctgttcggcttcgcggacccgctggactggctgctcatggctgcggggagcgcgggcgccgtggtgcacggcgccgctatgccggtcttcttcctcctcttcggcgagctcgtcaacggcttcggcaagaaccagcacaacctccgccgcatgacggacgaggtgtccaagtattcgctctacttcgtctacctcggcctcgtcgtctgcgcctcgtcgtacctagagatcgcgtgctggatgtacacgggcgagcggcaggtgggcgcgctgcggaggcggtacctcgaggccgtgctgcggcaggacgtgggcttcttcgacaccgacgcgcgtaccggcgacgtcgtcttcagcgtctctaccgatacgctcctcgtgcaggacgccattggcgagaaggtcggcaacttcatccactacctcgcgacgttcctggccgggctggtcgtcgggttcgtctcggcgtggcggctggcgctgctcaacatcgccgtcatccccggcatcgccttcgacggcggcctttacgcgtacacgctcactggcctgacc

SEQ ID NO: 88412 - DNA, 440 bp, Zea mays
  Clone ID: MRT4577_180631C.1
caaggatgcaccgcaaggtgctttgaattgttttaaatgcaactgtaaaaagtccgtaaccgggaaaggcatgcacccatccaattgccggggcaggccggggtacactgccatttttggcacatattggggcctcaaaagtgtgcccatggttgaacttacaaccagctggtttcctttgcaagaggtgacgcacgaatgcccttttgtaaagtgccatgacacgccttacacgcatgaacatttgacctgtacgggggcactaaaatgtgccgcaaacagaccaaggcgaacccgactaattatacagaccagatgccaatagattctaaattctgaaatggctctagttgaagtcaggcttttcagggtaagtgcagccaaaacgttggatgacaacattggcggggtaacaggcaactttgacacactcatcgatg

SEQ ID NO: 88413 - DNA, 416 bp, Zea mays
  unsure (1)..(416): unsure at all n locations
  Clone ID: MRT4577_180632C.1
aaaccccgcatctcctagccccagctagatctttggacacatatcgaaacagctctagctagcgcgctcgtcgtctaacctggcttccggcatggcttccaagcagatcggagtcttgacctgcttcattgccatcaccgctctcgccttccgtccctgcgcatccgccgtgccatggacgagaggctggncgaacggnggngccacctgngacgggcgaggcaagggcgctggatccgacggaggcgcgngnngggaccagggagccggcgaccagccaccgngcncggnanagaggaccgccgcccgacggcccaccgnacaggacgggaagggccgcgacaccnggcaccacangcagaagaccgnccacagacccgcccccggcacccccggggcagccagccaccaccgac

SEQ ID NO: 88414 - DNA, 372 bp, Zea mays
  Clone ID: MRT4577_180633C.1
cgcgatacccctcctccatccatattcatctgcccgcgaatcccatccccgcgccctcgtggccggggtaacgactaggcgaggatagacgtcgcacccgtaaatcacgcgaccatgccctttcatgcccgcaaatcacgtcacctccttgcatacatggcagccgagctcactgtacgcccttgcatgcatggtcgcggatccctgcgcgccacgattctttccatacgctgcctctgcgcccttccataacatggccgttaatacttgatagttgacatccgggagctgaagcgggagatctcgcgggtgccgctaacatagctagagcgggagcaggggctgatgaagcaacacgggaggatactcggc

SEQ ID NO: 88415 - DNA, 450 bp, Zea mays
  unsure (1)..(450): unsure at all n locations
  Clone ID: MRT4577_180634C.1
agcgtccgtttttttaatcagtatcaaaatggagagtgcccccccccccaaaatgttttgtaggcattggacggccacctgaggagctgggtgctatcaattttgttctgcggtcattcaccaagcaggnaaaaggaagagcttgaagtcacgttccaaaggagcttgcaagctgtaagaattatgggacgggaaggattcaacaaaagtgcacagtttgtgaatactccacagccaccagaatgctgaatagatgagagcccaacgacacatatataatattaggttccataatcaaaaaatataatattaggttcgtctagttgctggccgccaacatgtatgtgccctaattgattagtagaggttttcatttgatcacacatcaagtcatgtaaattggattcacatattggtttcagattattatggggattatttgggatttaa

SEQ ID NO: 88416 - DNA, 346 bp, Zea mays
  Clone ID: MRT4577_180635C.1
actaaatatttttcaatacacaaaaccactccgctctgttgatgtttttctttgtttgatcaccaacgccaaaactctaatcaaagcgatccagatcgtctcacactagcaataagtactgaggacacacgagtcggaataccactgcaagcacaagatcgtgtttttacaccggcctaagcaagctgacagctcaacctcaaggaattatcgtggcactggcatccgtttaagcatcatcaagagtctagctcaacttatgggtggccacataagattcaccagccatactccagtcggaagcacattcactttcttagccacactgaagcacacatacaaagat

SEQ ID NO: 88417 - DNA, 369 bp, Zea mays
  Clone ID: MRT4577_180636C.1
taagtatcttattttgcgtggggcgacaaaccggcgaggcaacaatggtgtgttaaggggctacaaccgcaaagctgatcgagctcccgacggcgccaacactccgcggttgctggtgctggacgacacgcaggcccgcgatccccgcgtaggttgttctcctcaaggtctgcgcctacgacgacttttttgacgtgcggtacttcctatcggccaattgatttgaaacccgccagaaaaagcctttcggtcccaagctgaattttagtgctagagaagcagacgaataccaacttgagtccttacacgacacatgatctggcccgtcaaaattatggcataccatgtcatgtacccctttgcacgctt

SEQ ID NO: 88418 - DNA, 422 bp, Zea mays
  Clone ID: MRT4577_180637C.1
aataaacactgaaaaaggcaggtgttacttagtaagtgatgggataacaaaacaattgcattacaggtttcaaacttgcattatatattccaaggtatcagatctgaccaaattgtcaggctccaaacaaatcgaactgtgagagctcacacatgtctaaaaacaacacgggtatcaagtacgaagcatatttgattgccattatcggtgattcgacctgacatatgtatccatcggccaacgtacacaaatactcactgttcaggtctttgtccgttctattaccgtaagaccgctccaactacagtatatctactctaggagaggaaagatgagtaccattggcttgacgattcctctgtagataccagtcctatatcaagtgatagccttcttatagggtgaaccataagactggggag

SEQ ID NO: 88419 - DNA, 111 bp, Zea mays
  Clone ID: MRT4577_180638C.1
attacgcgtacgctgtttcgaacgggagtaccatttcctagtagaagatagagtactcggtcggctacggcacgatatggctggacacataccagatcatcgacgccaacc

SEQ ID NO: 88420 - DNA, 862 bp, Zea mays
  Clone ID: MRT4577_180639C.1
tcatcaatggtttgtgtcccactagtggttttggatgggattgggagaagatcaagctcaaagttgatagtgtccactgtatggcatgagtacgttgagagaaataaggaagcaaaaggatataaacataaggttgtgaagttttaggatctactcagcctagtgtacaataaagatcaatcaaatggagagggtgctaaaacagcagctgaaagttcaaaggaaacgacaaaagagaatgataccggaggcaaggatgctccatattctgtatcttcctcgagtagtttaaaaagacaaagattagatgattcatttaattctatgtggtgtgataagtttgacatgcttacatctgcattgaaagatgacggtccgaagctaccctcttccgccgaagttctcgtcgtattacaagaggttgagggacttgatgaagacacataacttgagctttatgacatcctcacctctaatgcacgcaagtttgagtcgatgatggcactcccaatggaaaggaggaagaggtggcttatgatgcagctaaggaagtgaaacaacttatatgtgaacttagatctctgtgttgaactgattgtgtgaacttgtctttgtgaaacttttgtgtgtgaacttgatggctatgtgaaactgttgtgtgcgaacttgatggctttatgaaactgctatgtgaagatttgatgtctttgtatagaacttttatgtgcgaacttgatgactttgtgaaactgttatgtgtgaccttgcctttgtggaactgttatttgtgaacttaagatttgatgtctttgtagaacggccgcgaaaaaaaaaaaaaaagggcggccgccaccgcggtgga

SEQ ID NO: 88421 - DNA, 221 bp, Zea mays
  unsure (1)..(221): unsure at all n locations
  Clone ID: MRT4577_18063C.1
ccggccgggacctgcaccaatccgttgcgctcgtgctcccctctcgtccgccgncagcaccnccgcgccgccatggccacggactcnnccgccggctcgnntcagaagatccagatccagcgcgaggacacccacttttgatgcttatnngttgtggaaagaaaatggtnctggaattgnggntntgnnagagtggtggggagtngannatgagatanaga

SEQ ID NO: 88422 - DNA, 399 bp, Zea mays
  unsure (1)..(399): unsure at all n locations
  Clone ID: MRT4577_180640C.1
cacgccaatcgtgtgaagatgagatcacattactggtctgttatgatgaacaaccggtaagaactgtgttactgatccaatcaagaaaatatatggctatttaaaacaaggaacaccaaagaattggctttgctcngaaaacatgttttgagccaccaactgaaagactgaaacaaaaaagccacccagcaagaccgaggggccaaacacaatctttttttgttcttggcgggccactcctggaacccgcggaggctcgccgggaagtctgtgaaaaagccatccatgcccacgtcgttgatccaataatcgtactccgcctagggggtcttgccgaaggccaaatgcaagaacttgttctccttgcgggtcctgtttgggtggacctgcagtcccctc

SEQ ID NO: 88423 - DNA, 216 bp, Zea mays
  Clone ID: MRT4577_180641C.1
attcggctcgagccggaacgaaattttaattttacgcacatggccgatgctaaatggatggtttcaaagaaaccaggcatggaacaagacagcattaaacaagcgaaggtgggcctaaaaacgaaaaaacaactgatctttatagaatgaccagagaaatattgggggatgaacaggtagtctaactaacacccactgttaccccaggagtagaaa

SEQ ID NO: 88424 - DNA, 763 bp, Zea mays
  Clone ID: MRT4577_180642C.1
caccacttccttccccttcccccgatcttatcctcggcgaagctgctgctctaatggcggatccgccgtcgtcgtccccggccgacgaggcgcgggatccaggtagctcagaagctgctgctcatgggagtactacttcgcaagacacgaaagagcaggaggagatgaaaggagaagcggctgttgtgacctctgaaccggtgagggaggaactggtccagagtgccattagttttctgagtcaccccaaagtcgtggcatcttccgatgtccagaggcgttccttcctggaaaataaagggctcaccgtggacgaaattgaagaagcatttcgtcgtttacttagcccaccttcaaactctacaaactcaaatatgtgtgaatctcaaggaagtcctgatcctgaaactgtaacccctgtggtgccccggcacccaaaatcatatatggaggtcatggaaatgatacagaggggagagcggccagatgatatccaggatattaatgatgagccaccaaaccctgatcagccaatctcgaaacccagtatggcacccaagcccaagccatgggagaagcaaggccaacaaagttccggttgggacctgaaagtgctctcaagcgacccaagcgaattgtcgtcaggagttcgaaccgatagcaccagccaggccacggaattaaacaatagctccggttacggggatttgatgctgacggcagagccggctacaggctccaagccccccgtggatgacgttgc

SEQ ID NO: 88425 - DNA, 680 bp, Zea mays
  unsure (1)..(680): unsure at all n locations
  Clone ID: MRT4577_180643C.1
ttgggtacctcgaggccggccgggtattccgtatctcaatgaaagcggacgctccattcttgaatgtcatcgatcattactccctctataccgtcttgaagcactttgcgcgtctatgattgaagcgtggggtaataaaaatctgcttcacgatatacgcaaattctatgcgtggctgctcgagatgcaacctttttctagcttggcaaacgaaggatcaactccatacatacccgaatcgcgtttgagaaacttatacactgctgctaaggtttctgaagaccaagaacgcttatgcacgaccattctttgacgatcttcctcactatctaacacatgacgtgatacatgtcaaacatcacagctggcgaagatgttgatgtcccacacaaaaccgaagcacagaaagaggccgaacagatgcagctgaagatgagaaagcgaaggaagctgaggctaaactcacagacgataatgagaaggtaactgacaatactggagatggtgcatcttatgagaaaacaactgacaacactgctgatgccacatccacaggaaaagattgagacctggacgctggaacttccggttcagtgtcagcacccaagctcttagccatgtctaataagatgcgtgtacctcaagatanacggcaagacattcttcatcctgacttcctt

SEQ ID NO: 88426 - DNA, 382 bp, Zea mays
  Clone ID: MRT4577_180644C.1
cacttttctataactatttctacttgtgcattatggatgtttattctgttcatgctcaggcaaaacctaaacaggtcaacaccatagtcaacgacaccttcatacttttttgaggcactaggcccagaatgacccacagcaccctcacttccacaagatctacgagcaggtcgattgcggcggccgcccttattcttcgcatgatacgagcttataccataactacgcgcagaaaaaagaccagacggtcgctattgatgtcacccacgcgaagaagcaccacttgttgggccgactgatcctgccgtataatcatccctacaagtgtgctactctttcgcctgcgagagtcatatcgagcgcccggcgcttttttctctcg

SEQ ID NO: 88427 - DNA, 853 bp, Zea mays
  Clone ID: MRT4577_180645C.1
cgaacatcgatatctgtttagatcttctccaacacaagccgataatatccatattatctgattcacgagtgaaagtatgaaatcaaatatgggagagtaatattcgtgtagattcgatcgacaccctggttccctagttcttaccggtgctcgaggcctcgagcgcacaggccagccacatggcgtcatccagggtcgccggttgccgcagctccacgtcggtgagcagcggatcgcggagaccggcggtaaagaaggccacctgcagcggctccgtcacgccgtcgcatctgtccagcagcctcaggaactcgtcccggtactccgcgacggagccagtgtgccgcagccggaggagctcgcggagcgcgtacccgctcgtcggggcgccgaagcggcgacgcaccgactcggcgagctgcggccaggtagggacgccgcggttgtgcttgagcaaggagtaccagatctgcgccgcgccggtcatgtggaaggccgcgaggcacaccttgtcgtcgtcctcggtccgctgcaggctgaagaacagctcgaagcggtggagccatatggcggggtcgtccgtgccgtcgtactccggtaaacgcagctcgagtactccggggaacgcggcctgcttcccagcctcgacggcatcttggaggcgccgttgatcgagcttgacggtgcagagctcgcgctcgaccgtcgtcatcttggtctcgagcgatgtcagcttgtcgacgacgtcggtgagcagcttctggacgtcgatgaggccggagtccgccattgtcggtcgacgagcaggaatcacgagggttcgtgtcgtgtgcggccgcgaggggtcccaatg

SEQ ID NO: 88428 - DNA, 385 bp, Zea mays
  Clone ID: MRT4577_180646C.1
gcggcgccccggctgcgggacgctggaggggaggagctcaggaagacatggctcacccgggcagaaatcatctacgaagaggaccacaacattgtctccttcgtggagagactagcaccagaagcaacggttgctgctatactgccgagcgaacctactcatgccatgcgggatggtgccgtacgtgcttatactgttcagctcactgctgtggatccttgaccagcgggggaagaccatctacatgactctgatgaccatcaacgcatgagaatgcgtggagatggccacctacatatgccgatacctggcgtacgctccatccaatacacggatcgaagacgctgatctactttcatgctgctgtacgtgacgctcatagcac

SEQ ID NO: 88429 - DNA, 675 bp, Zea mays
  Clone ID: MRT4577_180647C.1
cgctcgacggtgtgggcggttgcggcggccggcacgccctctgggtgttcgatgtgacgagcaagagctggaccgtggtgcccccgccgccggagttcgccggcttcgtgttctccgttgcgtccgtccggatctgagaaaacctagatcttcttcgtcctgtccgtccctccgcgatcgatcaagagacgtaaaggctactgctagtgctagtgctagtacggtagtacctgctgtatgtccgtgcgccattgctggatctgatgaacactgctagttcgagatctgcgctcccgtgtaccatggatctgggcatctgcttggtacccgtacgccctgccatcgattcgtccaaggaagtgtaaggtaaggtggtgacccgacgccagccagatgagatgagatccattgaagccgacagccgagggttgggtgtaaaatatgggtgtggtgtttttgtcccgaggtgaaggacgacaagatgttgttagaacctcctgtgctacaaaaaaaaaaaaaaaaaaaaaaaaaaaaatcgagtgggggtgatctggatggagcttggagatgacggaattgcgacggatcctcatgtgccagcggctccgcctgcgctgaaccgctgtcatgcctagcatcgttgaggaaaggcgagttcgtgttctgccgagcgtc

SEQ ID NO: 88430 - DNA, 1545 bp, Zea mays
  Clone ID: MRT4577_180648C.1
ggccgcgtttggtgcatcgagggcaaccccgtcatggagtggatgggcacccgccgcgggggcgcggtgggccctacccgccggggctcaaggccggcacggcgcgctccgtctgcgtcggcctacttactgctagtgctagtacggtgatacctactggacgtccgtgcgccattgctggatctgatgaacactactagttcgagatctgcgctcccgtgtaccatgggtctgggcatctgcttggtacccgtacgccctgccatcgattcgtccaaggaagggtaaggtaaggcggcgagaaggtggtcgtcaccggcgcgctcgacggtgtgggcggctgcggcggccggcacgccctctgggtgttcgatgtgaggagcaagagctggaccgtggtgcccccgccgccggagttcgccggcttcgtgttctccgttgcgtccgtccggatctgagaaaccctagatcttcttcgtcctgtccgtccctccgcgatcgatcaagagacgtaaaggctactgctactgctagtgctagtacggtagtacctactgtatgtccgtgcgccattgctggatctgatgaacactactagttcgagatctgcgctcccgtgtaccatggatctgggcatctgcttggtacccgtacgccctgccatcgattcgtccaaggaagggtaaggtgaggtggtgacccgacgccagccagatgagatgagatccattgaagccgacagccgagggttgggtgtaaaatatggactcgatgagtgtggtgttttttctgtcccgaggtgaaggacacagactgttgttcgttgctcttgtcctacagccatgcttttggtactgcgatccgagtgcgtgtgatctggatggagcttggagatgacggaattgcgacggatcctcatgtgccagcggctccgcctgcgctgaaccgctgtcatgcctaccatcgttgaacaaaggcagtttgtgttctgccgagcgtccatctcgagaacataatgtaatctccacttggctatcaatcatttctctgtatattattgcaatccaagctggcgatttgtccgctaattgaacggaagttgacattgccacaaaaaattaaaaaaaaaatgagcgtggggtgattaaagtttcgtctacaccacgaggcaagagccatccgtccatctctagtattcacgagagagctaacaaattttggagagaattcaaaaatccaactagcatccaagatctatgaaatttcgccaacctaggtacatatatgtcaaatttgtcgtgtacacacaaactatcatgtaagttgttggcgctcattctgctatttcgcgtgatcaccttctttgtattttaattgtggggctatgacagaggcaagtaaagtggtcagcgtcaatcgtcagctgcctagctagacgataggatgaatcataaagtagtgatgttaagatataagttcctgtaagcgaattagtttgacgatttatgtatcgattagtcattcaacgaatattttctcttatat

SEQ ID NO: 88431 - DNA, 1115 bp, Zea mays
  Clone ID: MRT4577_180649C.1
gccgtactacccggcgtacagacagcaaacctccatgttcgacggccgcgagtacagatgggccggaaccacggccttgtgggccaactcgtcacgggcgaactccaccgacggcaccttcatcgagttcgtcacgtcgcctaacaacccagacgccctgctccgcgagcccgtcctccgcggctcggcggcggcgatcgtcgaccacgcgtactactggccgcacttcacgcacatcccggcgccggccgacgaggacatcatgatgttcaccgtctccaagccatccggacatgctggaagcagattcggatgggcgctgatcagggacgacgaggtggccaagcgggctttagagtacctgagggacagcaacatgggcgcgtcgcgggacacccagctgcggatgctggggatcttcaagttcatgctggccaacctgcgcggcaaggacgacatcttcgccttcggccacgacgtgatgaggagcaggtggctcaggctgagcgccgccgtgtcgcggacccgccgcatcacgctgcagaagatcgcgccccagtactgcacgtacttcggccgggtcagagagccatccccagcctacgcatgggtcaagtgcgagatggaggaagacgaagactgctacgaggcgctgctgaaggcgaacatcatcacgcgcagcggcgtccagtatgaggcgagcagcaggtacacgaggatcagcctcctcaagtcggacgacgacttcgacgtgctcatggagaggcttgaagatcttgtcgatgccgacaagtacgacgattccaacggttcgagctcaatgtagcaacggtaatccacggaagttcggaagcttggggcggtttagatccacctctctaaattttaagaacactctagctcacattgtatgaggtgggctaaattaaaatgcatatgatcagctaggcgctgattgttctgcgaatgtagtggaacagtcaactagaagttgactgtgttcccacaataaaactacctatattggattggcgcaaattatgcggtcagtatatcattccatatttatagtacaacttacagtttgttggattatttggaaaaaaaaaaaaaaa

SEQ ID NO: 88432 - DNA, 356 bp, Zea mays
  unsure (1)..(356): unsure at all n locations
  Clone ID: MRT4577_18064C.1
gggggcggggacaaaaaaaacaagagcgggggggggcagccgcncccgaaagcacacaaaggcacacccgcaagcggcgcgcgacgnngacgccacccaaacaacaaggcacgccgcagcaaagcnttcagcacacaacaacanaacagggaaagacaggacaacnngttttttttacaaatcacgtcttgcacaagcagatacaggattaacgactggtagcatcattcctttttggccgctgccttggtaacacttggcgccgttcggatccctcttttccacactctttatgactccaacatcatctgtctgcctcatgttgcgggccgcctgcctaccaatgctgaggatac

SEQ ID NO: 88433 - DNA, 194 bp, Zea mays
  Clone ID: MRT4577_180650C.1
gtggaatcggcgcctaaaagtcgttttttcgcgacatcgtggacgcccaggacggtgcctgcttggatttgggcggcaacatcagtggcatcaacggggaggtgatgccagggcagtgggagttccaagtcgggccttccgtggatttttcttcaggcgaccagatttgggatgatcgctacattctctatagg

SEQ ID NO: 88434 - DNA, 383 bp, Zea mays
  Clone ID: MRT4577_180651C.1
atgccttgcacaacatagcctgcgttcaaagaatttatctagtctcctgaaataactgcctgcggacccaaaaaactgaccgcatgataccgaagtaagggtaaacagaggcatgttcagggattcgagaatattgtactgcaaacactaaatagccgagcaaaactataactaccctaatagaggaacataccacggaagatgatagatcaacaacgattattaaaccccctatgtgtgtagatcaaggattagtatacaactatgacggggtgtacacggcacctcacctcgttgtggagggacctcaagatgataggatcctagtatgcagtgatcaccttagcgcgacggtaactggttggctgactgtggttgggctg

SEQ ID NO: 88435 - DNA, 213 bp, Zea mays
  Clone ID: MRT4577_180652C.1
ctccccgtactacgcgtcccctctccgtcccctcttcgcattgtggcagcctaactacatctactgccgtcctcattcgtgtgttttgggtttttgggtccaccaacacctcctgaagggtctcgtgttctgctgccgatggcatgcatgacctagatctgccgagggcgtccgtggatacagttagatgttgggtggtaccctctggtctag

SEQ ID NO: 88436 - DNA, 550 bp, Zea mays
  Clone ID: MRT4577_180653C.1
acaatgtccaaagaaactgacatcgtcgtttttctctaaataaacgtacgtgatttcccgtatcggccctaatgctcggagtcaccgctccaacaaggccccaaagggacatgcaagtaggcctcagcagacgcatcgactgggccatgaggacaccactgggtaattgcggcagctcgatatcacatgcactaccctaggctctcgccaaaggaggggaaaacgacctcgcaggagatggccactgaaggaatggacgcccgtatcctgtatggcaaagaacatttaagttaatcggacgccctttgaagactacactgtataagagtatgtaggaggctaagttatgaacttgacggataaatctgtctctgccgaatacgctgtggtatcaatgattatgcgttaatcaaagagattaacatgtgtgatgtaaggatagatatgatcaatacgaaggtactgatcatgcacgagctctttatcattgaaaatgacattacggttgattagatagttatgcctcaatcttctagccaatctcatgaag

SEQ ID NO: 88437 - DNA, 234 bp, Zea mays
  unsure (1)..(234): unsure at all n locations
  Clone ID: MRT4577_180654C.1
cgagcccatccctccctcccgtcgccttcgccanccanagcctagcctactcctcctcctancgcggatccaacctccgcncgcncgccgccgccgagagagccctatctcccccacgccgcggtctccgcncaagtgggggcaggggacgcngatcccgcagctccccgccatctccggaacggccatggaggtggcgcggttgccgaaggnaanccgtnaagccagaggatt

SEQ ID NO: 88438 - DNA, 3183 bp, Zea mays
  Clone ID: MRT4577_180655C.1
atggggctcggtgtatgtggctcgctctgccaaggtggtgatgagaatgatggttttgattatgcttatggtactggtaagtggtattctttccgtttggaaaggcaggagatagagtctgtgaggagctgttcccctgtgctcccgctggaggcgccccctgcaccaccactgagcgctcccgccgctggagtagctgctggagaagacccagacgacggaggtggcgacaacatctcaagccacgacaccgacctttcagaggagcaggagttggaaggaggggttgctcgacccatcactctcgacgctgctcgcatgtcagaaaacaggcgcagaggaggaaagcgtgctcagcaggagcggccagctcagcaggatgaggcaccccagcaacaacaactgccaccaccgcccccgatgaccatcgagcagatgttcctaatgcagactcagacagttcaagccatcgattggctgcgcactatggagcgggagttgcacaccgctcagtgtgatgacagggagaaagttctgtatggtccccctctgttgagaggagcagcccagtcttggtgggagtcctacctcgccacccatgccaaccccgacactatcacctgggaggaattcagaaacaatttccgccagtatcatgttcctgcaggtctgatgacagtgaagaaggaggagttcctagcgctcaagcaagggcctatgtctatcaatgccaagaggcagtatcgcttcttgagaggcttggtcgaccctctgcagtatcatctgatgaatcataccttccccacatttcagcacctgattgacagagcgatcatgacagagaagcagtgcaaggagatggaggatcgcaagcgcaagattggtggacctcagtctggaagcagcaattgccctcgtttctcatgcaacccacctcagcagtttaggcagaaccagcacccacctcagcaccagcagcaaaatcgtcagaacaaccagtcaggaagagaaataagggggattgcgtttcccgctaacctcatagtaatgggtactcagggaatagatgtcatcctagggatgaattggctagataagtatcaggcagttatcagttgtgataagaggacaatcaagttgatgtctccactaggagaggaagtggtgaccaagctagtctcgcctgagccaaagaaaggaagttgttatcagatggctgttgatagcagtgaagcagattcactcgagattatcaaggttgtgtcagaatttccagatgtgtttccggaagatttaccaggcatgtcactagagcggaaagttgagtttgctatagagcttcttcctggcaccgcccccatttctaaaagagcttacagagtatctggaccagagttggttgagcttaagatgcagatcgatgagcttgtattcatggattatcttgacaagtttgtggtggtatttattgatgacattcttatatattctcaaagtgaagaagagcatgtgaatcatttgaagatggttttgcagagattacgagagcaccagctgtatgcaaagttgagcaagtgcgagttctggatcaatgaagtcctgttcttgggtcacataattaacaaagaaggattggctgtggatccaaagaaagtggcagacattccgaattggaaagcgccaacagatgctcgaggaatcaagagctttattggaatggccggatattatcagcgattcatcgaagggttttcgaagattgtgaaaccgatgacagctttgctaggaaacaaagttgagttcaagtggacccagaaatgccaagaagcctttgaagcgctgaaagagaagttgactacatcacctgtcttagtcttgcctgatgtgcacaagcccttcttagtgtattgtgatgcttgttacactggcaaagcgaacgtagtggcagatgctttgagcaggaaaagtcaagtcaacctgatggtcgctcatccaatgccttatgagtttgccaaggagtttgacaggttgagtctcggatttctgaacaatatgcaaggagtgatagttgagttggagcccaccctagagcgagaaatcaaagaagcacagaagaatgatgagaagatcagtgagattcgacaactgattctggaaggaagaggcaaagattttcgggaagatgtagaagtggtggacagcttaacaaagtcagcccacttcatacccgtcaagaccaactacagcagtgcagtattggcagagttgtacatatctcggatcgtttgtcttcacggtgtgccaaagaagatagtatcagacagaggaacacagttcacctctcatttgtggcagcagttgcatgaagctttgggtacacatttgaatttcagttcagcctaccatccacagacagacggtcagactaaaagaactaatcaaatccttgaagatatcttgagagcttgtgcgttgcaagatcagtccggatgggacaagagattaccttatacagacttctcctataacaacagttaccaagccagcttgaagatgtcaccatttcaggtgctttatggaaggagttgtagaactccattgcaatgggatcagcctggagagaagcaagtgtttgggccagacattctccttgaagctgaagagaacatcaagatggttcgagagaatctaaagatagcgcaatcaaggcagcgaagctatgcagacacaagaaggagagagctgagttttgaagtcggagactttgtctatttgaaggtttcgcctatcagaggagtcagaagattcggagtcaaaggcaagctagcaccccgctatgttggtctgtatcagattctcgcaaggcgtggagaagtggcctatcagctcagtttgccagaaggcttgtccgcagtgcatgatgtctttcatgtgtctcagttgaagaagtgtctgcgtgtgccagaagagcagttgcaagtagaaggtccggaggtccaggaggacttgacctatatagagaagccagcgcagattcttgagactgcagacagagtcacccggaggaaaactatcagaatgtgcaaggtcagatggagtcaccactctgaggaagaagcaacctgggagcgtgaagatgatctgatggccaagtatcctaaactctttgctggccaaccttga

SEQ ID NO: 88439 - DNA, 201 bp, Zea mays
  Clone ID: MRT4577_180656C.1
attcggctcgaggcaccacagacaccattgtcactgccgccacctccggaggcgccggcgtaggcaaacggggagcccccgacgcaaacctgggacggttccgtgagggcacgcacagctacatgggcaccacacccttcacgagccccagggggcgcttatcgcgcacaggcacccaacgtcgacacaagcataggcagg

SEQ ID NO: 88440 - DNA, 1380 bp, Zea mays
  Clone ID: MRT4577_180657C.1
atgcaatgtctgaagaaggcagcccagcagcagtcaggccctggcgccccagcaaagcagaatatgtctcagcctggagcaggcaaccgctctcagccacgctacaaccatgggagactgaatcacttggaggctgaagcagttcaggaaacccccagcatgacagtaggtatgtttccagtcgactcccatattgcagaagtgttatttgatactggagcaacacattcttttattactgcatcatgggtagaagcatgtaatcttccaatcactaccatgtcaacccccatccgaattgactcagccggtggtagaattcgagccgatagcatttgcttgaatgtaagtgtggaaataagggggatagcatttcccgctaatctcatagtaatgggtactcagggaatagatgtcatcctagggatgaattggctagataagtatcaggcagttatcagttgtgataagaggacaatcaggttgatgtctccactaggagaggaagtggtgaccaagttagtcccgcctgagccaaagaaaggaaggtgttatcagatggctattgatagcaaggagccagattcactcgagattatcaaggttgtgttagaattcccagatgtgttcccggaagacttatcaggcatgccacaagagcggaaagttgagtttgctatagagcttcttcccggcaccgcccccatttctaaaagagcctacaaagtatctggaccagagttagttgaactcaagaagcagatcgatgagctatcagataaaggttacatccggccaagcacctcgccttgggccacccatgtcctgttcatggagaagaaagatggcaccagaaggatgtgtatcgattatcgagctttgaatgaagtcatgatcaagaacaagtaccccttgcccagaatagaagatctgtttgaccagttgagaggagccagcgtgttctcaaagatagatctgaggtcaggttatcatcagcttaggatccgatcctcagacattccgaagacggcattcattaccaagtatgggttgtatgagttcactgttatgtcttttggcctaacgaatgcaccagccttcttcatgaatctgatgaacagtgtattcatggattatcttgacaagtttgtggtggtatttattgatgatattctgatatattctcaaagtcaagaagagcatgtgaatcatttgaagatggttttgcagagattgcgagagcaccagttgtatgcaaagttgagtaagtgcgagttctggatcaatgaagtcctgttcttgggtcacataattaaaaaagatggattgtctgttgtcacacccgggtttcggggcaccaagacccaggcgcgaacataa

SEQ ID NO: 88441 - DNA, 804 bp, Zea mays
  Clone ID: MRT4577_180658C.1
ttccctggtcgtaccacgccttcggctcgaaatgcatggggagtccgaccctaccatggtatcatacacggaattcttagagatgttcaatgatccggattggggatttgggatcctgagcactctggtgaagctcgaagagagtgaccacatacgccatggtagccacacatgctacatctggccggaacactatcattgcgtcacggtttaaggaaacaaaacactcattcagcctgtgcaaccggtgctacagtgaagggaaggttccttcggtcttcaagttggaggagtacaggttcaaagaatacgctatggtgtaattgtttgcttggcactggtgagttcaccgtgattagaaggattcgaacttccccaattctgcttcctctgcctgagcacctgtgaaatggtatactgagctgagccatgtaagagaaagcgctggtttggtataacgaactgagcgtctgagccaactaagagagagagctgaacggatgggccagctatccactcagccatatggtcaaaatcgaccaactcttgatgcattaatctgactgccacacattttttacaaagttgttttgccttcacgtacccttcgcaataacaccatgtgttgtctctggtttcttctgtaaccttatcattgggttttaaggctcaaacccaaccaaacatgagaacttggtggtctatggtttcgtctgtaaccttatcgttgggttttaaggctcaaacccagccgaaacatgagaacttggtggttttaacgataaatcaccaaacctctacagg

SEQ ID NO: 88442 - DNA, 1635 bp, Zea mays
  Clone ID: MRT4577_180659C.1
atgggtactcagggaatagatgtcatcctagggatgaattggctagataagtaccaagcaattatcagatgtgataagaggacaatcaagttgatgtccccactaggagaggaagtggtgaccgagttagtcccgcctgagccaaggaaaggaagttgtcatcagatggctattgatagcaaggagctagattcactcgagattatcaaggttgtgtccgagttcccagatgtgttcccggaagacttaccaggtatgccacctgagcggaaagttgagtttgctatagagcttcttcctagcaccgcccctatctctaaaagagcctacagggtatctggaccagagttggttgaactcaagaagcagatcgatgagctgtcagaaaaaggttatataaggccaagcacctcgccttgggctacccctgtcctgttcatggagaagaaagatggcactaggaggatgtgcatcgattatcgagctctgaatgaagtcacgatcaagaacaagtaccccttgcccagaatagaagatctgttcgaccagttgagaggggccagcgtgttctcaaagatagatctaaggtcattttatcatcagctcaggattcgaccctcagacattctgaagacggcattcattaccaagtatgggttgtatgagttcactgttatgtcttttggcctaacgaatgcaccagccttcttcatgaatctgatgaatagtgtattcatggattatcttgacaagtttgtggtgaaagtggcagacattctgaactcgaaagcgccaacagatgcccgaagaatcaagagctttattggaatggccggatattatcggcgattcatcgaagggttctcgaagattgcgaaaccaatgacagctttgctaggcaacaaggttgagttcaagtggacccaaaaatgccaagaagcctttgaagcgctgaaagagaagttgactacaacacctgtcttagtcttgcctgatgtgcacaagcccttcttagtgtattgtgatgcttgttacactggtttgggatgtgtgttgatgcaggagggaagagttgtggcttactcgtcccaacagctgaaggttcatgagaagaattacccaatccatgatctagagttggcagcactggttcatgcactgaagacatggagacactatctgtatgggcagaaatgtgatgtttacacagaccacaagagtctgaagtacatattcactcagtcggagctgaatatgaggcaacgaagatggttagagttgatcaaagactatgaattggagattcattaccatccagacaaagcaaacatagtggcagatgctttgagcaggaaaagtcaggtcaatatgatggtcgctcatccgatgccttatgagttggccaaagagtttgataggttgagcctcggatttctggacaatatgcgaggagtgacagttgagttagagccaaccctagagcgggaaatcaaagaagcacagaagaatgatgagaagatcagtgaaatccggcagctgattctggaaggaagaggtaaagattttcgagaagatgcagaaggtatgatgtggttcaaggaccgcttgtgtgttcccaatgtccagtccatttag

SEQ ID NO: 88443 - DNA, 230 bp, Zea mays
  Clone ID: MRT4577_18065C.1
gctttcgcatcgaggtatgtcccatggtcagcactatcgacctgactctcactctgtgctatgctcataggatgctcgggtagctgatgaacctgatcccgcttatgcagcaattagtcgtgatcaacgctccatcgagttcgcttgctgctaccttagctgttgccacctgtggagctttaaggcccatacagaaattcatgcgaactgtcctcctgcagatactgaga

SEQ ID NO: 88444 - DNA, 275 bp, Zea mays
  Clone ID: MRT4577_180660C.1
tgagtcgctggcgttcgctcgattatgatctcggcgccgctggtcctgctgaggtctcctaggtctatgattgcggcccgctctcgcgccattcttctgtccctgcgtctcacgcagtcggtgcctatgccattgcccgtgtccatatttatcatcatgatgttgtcgactatgacgtattaccagatttaggtcgtcctctataagcgtctcagcatcactgtcgactccatacaagctcgctaatatgtattcgatactttcccaatttacac

SEQ ID NO: 88445 - DNA, 1416 bp, Zea mays
  Clone ID: MRT4577_180661C.1
atggccggatattatcggcgattcattgaagggtttttgaagattgcgaaaccgatgacagctttgctaggcaacaaggttgagttcaagtggactcagaaatgccaagaagcctttgaagcgctgaaagagaagttgactacagcgcctgtcttagtcttgcctgatgtgcacaagcccttctcagtgtattgcgacacttgttacactggtttgggatgcaaagcgaacatagtggcagatgctttgagcaggaaaagtcaagtcaacctgatggtcgctcatctgatgccttatgagttggccaaagagtttgacaggttgagccttggatttctgaacaatatgcgaggagtaacagttgagttagagcctaccctagagtgggaaatcaaagaagcacagaagaatgatgagaagatcagtgaaatccggcagctgattttggaaggaagaggcaaagattttcaggaagatgcagaaggtgtgatatggttcaaggaccgcttgtgtgttcccaatgtccagtccattcgagagttgatcctcaaggaagctcatgagtcagcttattctgtacaccctagaagtgagaagatgtaccaggatctgaagaagaagttctggtgttcagcttatcatccacagacagacggtcagactgaaagaactaatcaaatcctcgaggacatgttgagagcttgtgcattgcaagatcagtccggatggggcaagagattaccctacgcagaattctcctataacaacagttaccaggccagcttgaagatgtcgccatttcaagcgctctatggaaggagttgtagaactccattgcaatgggatcagcctggagaaaagcaggtgttcgggccagacattttgctcgaagttgaagagaacatcaagatggttcgggagaacctgaagatagcgcaatcaaggcagcgaagctatgcagacacaaggagagagctgagtttcaaagtcggagacttcgtctatttgaaagtgtcaccgatcagaggagtcagaagatttggagtcaaaggcaagctagcgccccgttatgttggtctgtaccagattctcgcaaggcatggagaagtggcctatcagctcagtttgccagaaggcttgtccgcagtgcatgatgtcttttatgtgtctcagttgaaaaagtgtctgcgtgtgccagaagagcagttgccagtggaaggtctggaggtccaggaggacttgacctacatagagaagccagcgcatattcttgagacggcggatagagtcacccggaggaagactatcagaatgtgcaaagtcagatggagtcaccactttgaggaagaagcaacctgggagcgtgaagatgatctgatggccaagtaccctgaactctttgttggccaaccttaa

SEQ ID NO: 88446 - DNA, 379 bp, Zea mays
  Clone ID: MRT4577_180662C.1
tatttttttttagttttttcgtaaggaggccatgggagcttgttgattagggaactacaagcattacatgaaaataaatgtaccaactatgtcttttaaacaggaatgcaacagacatttctcccaaatgtgcgttattccggagcattccagacattcaagaccccctatttatcgaaaccatcactttttcaaatcccacaaacagatattaaaagggacccaactatgcctggggagcaatttttatgtggcgacaaaaaaggatacattccccggttgcgagggcgattcagattcctatttacctacttggggacagcaaaaccagagatacactctcatgctttaagggcaccaacccttccaaatgccttga

SEQ ID NO: 88447 - DNA, 743 bp, Zea mays
  Clone ID: MRT4577_180663C.1
ccggccgggctctcccatccatctccctccgcacactccgccgcctcaccttctccccctctctctccccgccgccgtggtccccgccgccacgctgtggcccttcttcgacgccgtctgctccgacaccgccgtcaccttcggctcgctcgtcgcgctccacgagtacctttgagaattcgtcgttcttgtttcttacaagtggtgatggtggtagtggtctggtctctgtgtgagcattggtctagaggatcgtgaagctatgcggctcttctttcatgttcaagatgaagttcatgaagcttggatcgaatctggatacctttaatgatgatggcaatgaagtcagaggttataatcactcctgagcacaacgaagaagggatttacacgatcagattctacattcagcgaagatgcaggctatctcctgctaatgttgctgccgaagaaatgaacttcttacttttatgtagaggcaacacttactaatatgatgctcgaatttgcaatgaatgatgtgtgtgtgtgctatttttggaccactggtatttaaaactgacaaccatgaagttttggtacacatgaatcccaagcaatttgtgtaaaatatggctaaacaaaacattgatgcctgatttatgatccagctgattttgatgtcaaaaaaaaaaaaaaagggcggccgccgactagtgagctcgtcgacccgggaattaattccggacggttacctgcaggcg

SEQ ID NO: 88448 - DNA, 743 bp, Zea mays
  Clone ID: MRT4577_180664C.1
ccggccgggctctcgccgcgcaccttgtctctgtcctctccatccatctccctccgcacactccgccgcctcaccttctccccctctctctccccgccgccgtggtccccgccgccacgctgtggcccttcttcgacgccgtctgctccgacaccgccgtcaccttcggctcgctcgtcgcgctccacgagtacctttgagaattcgtcgtccaggtagtaccattgtatcattgcactggattaaatcgatgctattcagtcctatatccccgaaggagacgccttgaagttgatagccggacagttcatcaggtctttactatgactgcaactttgaagtttggtattcatataatcaataggctcaacagtatgtcccttgtaaatgttcttgtttcttacaagtggtgatggtggtagtggtctggtctctgtgtgagcattggtctagaggatcgtgaagctatgcggctcttctttcatgttcaagatgaagttcatgaagcttggatcgaatctggatacctttaatgatgatggcaatgaagtcagaggttataatcactcctgagcacaacgaagaagggatttacacgatcagattctacattcagcgaagatgcaggctatctcctgctaatgttgctgccgaagaaatgaacttcttacttttatgtagaggcaacacttactaatatgatgctcgaatttgcaatgtaaaaaaaaaaaaaaaaagcggcc

SEQ ID NO: 88449 - DNA, 383 bp, Zea mays
  Clone ID: MRT4577_180665C.1
cagacagcagcgaggagcagtacctgttggctggattctctgcagtctagcagctagtcgagttaagtttcagatacacatggtgagcattggcaaaggcacagccacctggaccaccgtgccgcagtcggcgccgtcgacaaggaagctcatcacgatcctgaacatctatggcggcggcatcagcggccttatcccggagaccatcattgcgtacctcgacgccaacctccagtagctgtacggctcggacgctcggatcgccgactactacgatgtgattgcccggaccagcacggtcgtcctgatcgcgtcgatgcaggcggtgccggacgagaacaatcaggcgctgttcaccgccatgggactcatcacgttctacc

SEQ ID NO: 88450 - DNA, 388 bp, Zea mays
  Clone ID: MRT4577_180666C.1
gggacgtaagagcttatgggcgtatatattgacaggtttcttaactaaaccgctgatatagaaccagacaattttcccatgcacgttacgtacgtgaagggacgttttagagagagagagaaaaaaaccagcaagccgtaaaacttgttaaaaaaagcagaaacactccagcaaccagcatcatataccgtcggacttcaatttcataccgccgcggtatatatagggcacgcgtgcgctagattatactacctccgttaggttatatataacgctggtcaattcaattttaaactaagcagggtcatataaaaaatgggagggagtattagctagtttattggttcttcatcactcatcagggatgttgcagcatctattatgctcg

SEQ ID NO: 88451 - DNA, 463 bp, Zea mays
  unsure (1)..(463): unsure at all n locations
  Clone ID: MRT4577_180667C.1
cttcctcagctcagtttggcaacttccanaacatacgcctgaggtgcgcaacgtctgcttcggagcgagggagcatggcatgggcggcatttgcaacggtgggcacagcccagggctccgtttcatggccaacgactgctatgcaagcagtccttctttacaagcgtgcaagcaaaccatgcggtccattagattacgatccaaccacagatataactataatttgttatggttttttataaagattattgagttggtggtgaaaaggtttaagtattaaatgtcacctacggatgaatcacgatctaatggaccagcatggcatgtttatgggttgcttgagctctaggacaaaatgactgctctcataaccctcttcggccccatcatcgcccccatgtctttgcctcgcgtgaagacatgggcctttgctgagcgtctggtctatgacgccgctgttgcg

SEQ ID NO: 88452 - DNA, 310 bp, Zea mays
  Clone ID: MRT4577_180668C.1
aaaaccctagcagccactagggtttctccgatcccacccggcctcctccgtctcttctccgacgggcaagtcaagcaagaaggcggccgccgtggctgcggagccagcggcggtgcccaaggggaagaaacgggaggcggacgaagagatcgcgaaggccgtgagcgccaagaagccgaaggcggcgccaccggcgaaggccgtgccgacgttcaagaaggacgccaagatgctcacgttgcagcctccccacaagaaggctgagagcacaagcagctactttgaagtggactcccagtcctaaaaggag

SEQ ID NO: 88453 - DNA, 188 bp, Zea mays
  Clone ID: MRT4577_180669C.1
cacgcctcccaacaagctgggggcgttttttaataataagggggtgtttcccttacctaacagcatatcatggagcgaaactttgcgctgagattcgacctgctcctacttgcaaggccgtggacacctcaatggggtcggagaccaccgcggagatcctgctggccatcctgcttcctcccgtcggc

SEQ ID NO: 88454 - DNA, 342 bp, Zea mays
  Clone ID: MRT4577_18066C.1
tttttttttttttttttttcagcattctgaaagaacttttgcaacttagccattgtctcctggaagctatcatacttcttgattgcattcctaagccatttggaaatgtagagaacatttctgtcatcctgatatcgctcatcaatcagaattatgcctccgtaatcagatttatgacgaatgcaacgacctgcagcttggtttaaagcacgaaatgcctgatgacagtaccattcactcccacttaacagatgttttgatgatttgtatgaatcattatatctccttttcagctttacttgaacatcgtttatatttggaaaaggaattccacctcgtgcc

SEQ ID NO: 88455 - DNA, 288 bp, Zea mays
  unsure (1)..(288): unsure at all n locations
  Clone ID: MRT4577_180670C.1
ctcgactccaaggtcatcacgggccnccagagggttttttgcgttttctgggnccnccnaaccttctactccgagaactccatgctccacgctatctacaacatgaacggcaaacagctctacggccgtcacatcaccgttaaccaggcccagtcccctgactgctgcatcgcaggcacccgcactagctacagcagccgtcgatgcgaccacggctattgttccgtaccccatttcaccagctatagccgtacctgcggatacagctttcggagcaaaaatcatgcc

SEQ ID NO: 88456 - DNA, 622 bp, Zea mays
  Clone ID: MRT4577_180671C.1
cattgggtacctcgaggccggccgggattcatttctcatccagccgactcgcgctatcttcttggtctatagatttccgccccagttctccgcttctcatgactccccatcgatgctgctcttgcgtgcgctcgccctgctcatgctgtttgccctcgccggatcctccacccgctccgaacaggaggcattcagtgccctgacttgatcgggatcgctggcgtctgccatcttgagacgtgatcgggagtccgtatagactactcttatacctaccatatatactcctcctcgcgttcagcacagtgctagtgagagacagacacagcatgagccagtagtatctgtccttgtggctacgcaagaagcttcgtagtatagcgtgcatcacacagagacggagtgctgggcatcaatgttacatatactcacctttacgacatagtgtgactggcgaatggatagaatctctatcgactgatagtctgggcagaccccttgggaggaccttcaggagctgtaagcattctcactgtagaggatgaagctatggcctaggggtcgctgcttctgcatgcgagagcctggaactcatccctgctacgcaaactttgactccatg

SEQ ID NO: 88457 - DNA, 357 bp, Zea mays
  Clone ID: MRT4577_180672C.1
atagggaggtttaattttaattcccgttccgaaacacaaagcaactaaattatggaggaacggaacagagcccaataaccaaagtcacaacgaagcgacatcggaaagggggacttggctattagaacaaaaccgggcaggggagaaccacaccccacggaacggaacggggaaacccaaacaacaagggggacgaccgaacgacctcatttcagacagaacacaaatggaaatgctgaacggaatgcccttggcggagacgccgggggagacacccatcgtgtcggaggtgctggggtagagcagcgcggaggggaacatggccgggccgtatcggtcctggaggcgagggcccga

SEQ ID NO: 88458 - DNA, 343 bp, Zea mays
  Clone ID: MRT4577_180673C.1
gatgcgccaaaaactagtattacacatccaaaaggttcagggccgaatcaggtacatatccacaaggaccaaaattggagcaagtttgggggtacatatccgttccgttcacataaaacatgcgcggcattcattattgctcaatcctaagagcttcaaccagagttcattccggaggttaaacacacccattttcacaaaaactcgtgcagatcccatctagtagggctccaccggtgcacggaacttgaggccagcgtacaccgcgggatcgcccagctcctcctcgatcctaaaaagctggttgtacttggcaagacgctctgagcggcacggagccccg

SEQ ID NO: 88459 - DNA, 604 bp, Zea mays
  Clone ID: MRT4577_180674C.1
tttcttaagcagtggtaacaacgcacagtacgcggggtcgtcgaccctgctgattccggcccacgccatctattagtatgtctgatcagtacgcatcatctaatttgactttgtacttcagttcttctgatttagtcatgatttatattcagaatttgtaaagccctaaaatttgtataaggtaaaaataataaaagaaataaatacatgtatttttcatgaaagtgtttttgaaattatttaatttccttttgtgcatactcacttaagagaagtaaagtaggcaaataacaaataaataaatatagaaaaatgcatatcatgctagaattcttgtattggtgcaatcgtactcaaattttgagacaagttaggtttgaaaagtagaatttgaaaatagaaaaggaagaagaataccctataaaatatatatattataaataaataaataataggcgtcatcttcatattaggatttttattgaatattttaaaaacttaaagttcaaacagaatttgaatttgaattggagtcttaaatttgaaaaaaaaaaaaaaaaaaaaaaaaaaaaagtactctgcgttgttaccactgcttaaggaa

SEQ ID NO: 88460 - DNA, 530 bp, Zea mays
  unsure (1)..(530): unsure at all n locations
  Clone ID: MRT4577_180675C.1
accttaggcgactkkcagaccttwcaaagccgttccctcgtcatyaatcatgawtttacgcctcacactgtatctctctaantctgcccccactgatgtctattacgacgacttatgatgatagatcacccacgctgccacycacgtcstccctctctcacgcggtcccacyaatgtacctgcgcagykcctctcacatctctcgtaccttccagctcsmtcgattctgcgcacgcgagatcccgccgtcgtagcgatcmtgyaygtcgccgctgcwyctacctctcgctcatcgctgcgccaccaagatcacggccgcggctacgtcctgcaccctcagtgcgcccactccctcttatgyttgccatgccctccattgcctgctccaacgcctccgcctcncggcccatntacctcaycgtcancggcgtggcgacccccgcggggagacgcattcacgctaatgccgtgctggctcgagctcctcwgccgcgytctccgtcacagtcaccatcgcgcgcttcgcatcg

SEQ ID NO: 88461 - DNA, 464 bp, Zea mays
  Clone ID: MRT4577_180676C.1
gggctaaacaacccgggcccccggtttttggtggcttgggaaacattttcgggcgggcccaggggccccattccccccaactaaaactactggtccaggagctggccccaccggttgggtaccgcttttattttgggacccaagggggggtgcctggggcctgcggaccaacccttgcttgagcccaaagctggggggaccccccgcccggcttggggccaaaaaacaccctgatctccccgggggcgaccccatcccggggcgggtcccccatgtcaggggggttgggccccggggcggggcccaagggcttgaacagggcccccttgggcgggccggggccccacccttcttcgggggcgcgggcccccggggggcccccggggcccagggccccggggcacccccacgggggggacccccggggcgggcccgggccctttggggggattccgggcgggggc

SEQ ID NO: 88462 - DNA, 338 bp, Zea mays
  Clone ID: MRT4577_180677C.1
tgccgtggcggtgtgccccaatcggccaatcctccggggctcccccttacctgctcaaccctactgcgacaacagcgggcgctgggagcaaacgaaaactaaaacgagtgagatcgcagcacccgattctgtcgcgcgtcgcgcgggtggccggattggattggatacttggacccccgcgcgcgcgcggagggcaattcggacacagatccccgcgattccgtcgccggaggcgggcatgagaggccgtaaggcatgcctgtggtggttcctggcgcaaaacgagtgaaccgctggcggcggatggaggaggacctgttgcttagagcctaagaggt

SEQ ID NO: 88463 - DNA, 719 bp, Zea mays
  Clone ID: MRT4577_180678C.1
tgatttttcaggcatgtggacctctctggttctttttatacgtcgttagagatttacagttgtttattttttgtttaccgaccgcagcaaataattatgatcataaatacatggacttattgattagtttctagcagtctggcaaattatgttcaatgtttggaacggacgacggttcctctgctacagtacagatgagacaatgtcctatgagtttaattgtaaaaaattcttacttaaatatttcctttcccatttgagatgacctacagagtttactcaaagatgcttacaatatttatcccactttgtgggtgaggttgctcctttcttttcattaaatgtagctatgtgactacctttgtttttatgcgatagacaaactaatagctattacatttgcagagttccttttttgcatattttatgtgccttgaagtacaggcacttgttccagctggttctcctaatgctaataagagtaaatccagaggaaatgacccggatgatgatctgtgtcttatggatccagatggcaacaatctgaaacctgatccaccctcccgctcgctttctagccccgtcgccatggcgtcctggctgacgtcgtggatgccaagcccatgcctgcgttgaaagagagggagaccagagacacccagtggccctggcggtagtagtgccaaggttctattcactgtgagtccgcgacgccccat

SEQ ID NO: 88464 - DNA, 1924 bp, Zea mays
  Clone ID: MRT4577_180679C.1
atggtgcatcgtaggaacccgtcagtagttgaatctgactccgatgatgatcaagaaattcgtgaagaaactcatccgcgttctagatccaagcgtgggcgaggatccagaaatgtgatgcaaggtggtgaggcctcagggtctcatggtgctcgcggtcgaacggaccggaatccctccggtcggtctcgacccgcggccaatccacaggcatgggagccaactagcgatgatgacggaggcaaggatgatgaagttgatctcccctctgccaacacacccattttccaggggttggttcttcacagggcggaggctcgtagatctgcaaatgagcctgtcacagatttcactgccagcggagggtctgcccttctccaggacattcgattccaaaaccctacattacgtattcatgatgctaggatcgatggtaatcggttctggaccctccaacatgtcgatgtttacaattctgtgattcttcccaagaagcatcagcctattctgcatcagagatatattaactgggaaggatgtgaagcaattggtgatccagagatgacacaggctttgagggcctgtgagaagaaaggatgaagaacattatgacattccaatacgattggaatgatgaagttattgctcagttctattctaccctttggatcaagctggctgatgaggaaagtccttataactttccttatctcaatttctatattgaaggcagctggtataaggtgagctaccggaggtttgctcacatccttggattttctgatggagatatttcaggagacaagattaagattcatgactttcgtcctccaccaaggatgaagccagcgatcttcatatctctgagactgataaatattgggagtctaccaatctgcataagttctacagatacattaactctctctgcagaatgactctcattccaaaagaaggtaaccaaatgaatgtcctgggagagagcaaggtcttgctctcatttatgaagccaaatagttcagaaagtatcaatgtatttgacatgatttggcaagaaatcattcatgctgcctgcttccctctcaagggatgtcttcacgcccccttcattatgaagatgattgaagtggtgactcagtttcgctttgacaaaggaacaagacatctctcatacacccccttctggattgatccaaacaatccagcagggcgtctgaggaaagctccctctagctctcgtggacctgctactgccggcccctcgcgtccatctcctggtcgcggatctcccacaccacgtggtcgtggtcgaggtcgtggtcgcgggatgggtgcacgtctgacccatggtattgtagcattcttttccatgtgcaggaacatatcttccgatgtgcatgagctggctaggcgtcagcgggagactgacgacaacctccgtcgtcaagcttcttccatgggtatgtcatttgctccccgctcgcctgatgtgcctcttcatccttcgccaccagaaatcaatgaatggcaccagcagacctatggggtgccctttatgtcagctgaagatgaagaagaagacgaagaatattttgatgaccgtgagcagtttgtcctgcctccccccagggggatccgagtcaatcctcttcatatcctcctccccatgatccttcaggaagctatcctcccccagcttagcctggggaagaaaactttgcggctaacttggcaactcaattctttggtccgcctcctcctaagtggtgatttgtggctgatggttctctcctttttggtgctagttgccaaaaagggggagaaggattctcatcttggcagcgcttttaattgttgtaatgaacacctggcctgtaataattttattcgcctgactatcgtgatgcatgtggtgatggcctag

SEQ ID NO: 88465 - DNA, 1541 bp, Zea mays
  Clone ID: MRT4577_18067C.1
aactttgaatcctccatgggagaggcaagaggaaagggcaacccaaaagacgatgcaaatgaaggtaacatttgtaggcgtcgtagcttggttttgcttcacgagcacaacaagccatccatctatcccgctccctccatccgcaagcaaaagctaatcgatcttcccatgatctccttcaattgctactaataaactataatagaatcagttacctcagttgctcgtatagggcatgttctccaagctactccgtccccaccatttcaaattgcaaataaaactgcaatctcgcagcggctgatggattagcaagcaggacaagagactgagatccatcctccagacacgcgcacgccaaggatcgcattcgccaagcaacggcgggtcggcggcgcgggggcgatggagacgcggctgccgcggcgcggctggaacaaacgcttcgtcctcccgctcgcgctcctctgcctcgccgtgctgctccccggcgcgctgctcccgccgtccgcctcggcgtcgtcttcgtcgccggccgcgggaggtggcagcaggaaacgccggtgggttgggtttgactactatgtactggcgctgcagtggccgggcaccatctgccgcgagaccagcaactgctgcgacaccaatggctgctgccgatcacagcctctcaagtggttcacgatccatggtctttggccacagtataactatgggggctggccatcatgctgcagaccaaccagattcaacataaataagatcttaatgttgatgccgatactcgagaagtactggccgtccttgtactgcggttcttcttcaacctgctttggtggaagggggccattttgggtgcatgagtgggaaactcatgggacctgtgcttaccctgaaatacaggatgaatatgactacttctccacagcactgtatctctacagcaaatacaatgttacgaaagctctgagaaaagcacgtatccggcctacaagcggcagaaaatacgccgttggccatattgttgctgtcattgaatatgcgtttggggcaatgccgtcactcgtctgtaagaacggctcagttcaagaactcaggctctgcttccacaaggattatcagcctcgtgattgcacgcttgaggccggctctgcaccgaacggcagaagctactgccctcgctacgtcacgttcccgtcgtataaaccgtccgtggtggccaatactacggaggggatcaacaaccaatccaatggcgaggttccgagctacacgcgtacgtctgactctgagtagcgtccaggactccaggttctgtgggcctctgccgagccgagtttgtatcaatagagcgcgacgccacggcgtgcttgcaaaattaccggcccggtatggtcctgtatagttctttcattcacagtatcaaatgactggccaccgcgcaccgggatttggaaatgaaatgtgaatgttaatggatattatattcaaaagactaaacaagattcgtacacaaaaaaaaaaaaaaaaaaaggccccta

SEQ ID NO: 88466 - DNA, 465 bp, Zea mays
  Clone ID: MRT4577_180680C.1
tcatcaaatattctcatgaagacgagtcccttgaagaccaagaagagactggatggaagatatacatggcgacgtcttccgtttcccgcagaaaaaatctctttttgcagcaatctttggatctggatctcagcttcttgcccttgcaattttcatcttcctcctcgcgattgttggggtcttctatccatacaacaggggagcccttttcactgcccttgtagtcatctatgctcttacgtctggtattgctggctacacagccacttccttctatcttcagctggagggaacaaactgggtgagaaatctgatattgactggctgcttgttctgtgggccacttttcttgacattctccttcttaaacactgttgcgatagcgtacagtgctacagcagctttaccttttggtactatcattgtcattattctcatctgggcacttgtaacctctcctctcct

SEQ ID NO: 88467 - DNA, 302 bp, Zea mays
  Clone ID: MRT4577_180681C.1
ggttaaaatgctgtttattaagtttttcaaaaaacaaaggtgcccaaactccaaaacacccatgtacactgaaacaaaaaatgtaaaccatttgtgggcgtcaaggaaagcccgctacaaattgggatcgaggcattgaaaagaagtatatctgcttgaaaattttacaaatccttttcacattatacttgcccagcacccattttacggtatctaataaattaaatgctacaacgctctcagaagctcataacgcgcttttcattgatggttcaccaaagctacatgggaaagtaaattgc

SEQ ID NO: 88468 - DNA, 301 bp, Zea mays
  Clone ID: MRT4577_180682C.1
gacactatagaacagctattacgcgcgatgcgcgcgctcgtataccttggtgcggtcgaccggccgcccttttttttttttttttttttgatcgagagcagtatcaggggcatacatatatatgtatagaaacgcaacagatttatacaaagagatgcaacgaaagccgaaccgaaactttggattgtcatagctgctgtatgctagactaatcagcacataaaaaagaaagaaataagctaatgatagatatgcatatgcgtgtgatggctggataatcgaatcaggaggaggagtggag

SEQ ID NO: 88469 - DNA, 762 bp, Zea mays
  Clone ID: MRT4577_180683C.1
tgatccttgtccctacgaccagcgacacgcgcaagcgtcccgatccttgtccctacgaccagcgacacgcactctgcacccagcgcgagaaaaaactacatcgatcatcatcaccagcgagcgagccggccgagcagagcaccgatggcggcgtacatgcgcgtgacgcaccgcgacgaggaaggcaagaaggtgacggagaagatgccggtcccggagacgcggcgcccggacacggccaagcacttcgagcgcaagctggaggagcagggcctccaccgcttcgagcggcacccggcgaacgcgccccggggcgtgggcatcggcgccccgccgcccaagtccgggcgcggcggcaagtacacctgggagggccccggcagcgtcgtcgaggaccagctcgacccggcgccgcccgccatcgaccccaacgaccccaactacgaggagggaggggcggcggacgaggacgacgaggcggccagggaggtggtcgtcggggaggtggaggtcgctaaggtcgccgagagcagggacggcgtcgccagggtcgacgtcgcgccgggcctgctccaggaccagaagcagtaaaaggactgtcttttctggatacgtctagactctaaagactgtgtgtcagtgtgttcgagtttgttccgtgcagagagtgcacgtcaactccgctttaattaatctgcttttgttaatatttctactgatcagtaatatgaaccagtggttgatatttggatggaaagaggg

SEQ ID NO: 88470 - DNA, 311 bp, Zea mays
  unsure (1)..(311): unsure at all n locations
  Clone ID: MRT4577_180684C.1
atgctcgagtttttttttttttttttttattattatttattctnnttgtagtgtggtgaaatgcgacacgagggcggaccggccgtcgggcgaggagcgcaaacctgccgtcgatcgaccacgcatccatccaccatgggcggtggcaacagccagaaggccaagaaggcccgcgagcgcaactgggagaataacaaggagggccaaggggagccagctacgagaaccaacaggaaggccacgaacatccagggcaaagggcgctggcaacaatcatgtgtaccacgactgaaggggaggtgccggggagc

SEQ ID NO: 88471 - DNA, 138 bp, Zea mays
  Clone ID: MRT4577_180685C.1
ttttcaaaagatttgcacactctaaatggaaatgggaacgccccttgtagcggcatttaaaccgcgggggtggtggtgtttacgccacatgtacactttacatttgccagcgccttagccccggcccctggggttttt

SEQ ID NO: 88472 - DNA, 559 bp, Zea mays
  unsure (1)..(559): unsure at all n locations
  Clone ID: MRT4577_180686C.1
cgggtcgacccagcgttcggcttgaatcaggtgttgtctatctaaaaaaaaaaaaaaaaaaaaaaaaaaaaaaaaaaaaaaaaaaaaaaaaaaaaaaaaaaaagggaggacgaattaaaaaaaataaaaaaattaaaaaacacaataaataaaaaggggtggctcttttatagggtcattttttttcaatccattggccgaagttttaaaattttttatttgggcaaaataatttaaattacccaacttaatttttttaaacgacatacctgttaaaaccgttggggtaataaatttaaggcccttacagaaaatccttttttacagttgtggggttttaatgaaaaatgggacacgatttgtcttttgaaaattttcgctacctgttttggtggttacgcacccccttttcctttttcttttattcgccttttttgtggtttttttccctttttncacccccttctctggccagggtcttagggtctcctcctttagctttttttctttgttttttttttgggtttgggtttttttccctttccgggcttttttttgg

SEQ ID NO: 88473 - DNA, 411 bp, Zea mays
  Clone ID: MRT4577_180687C.1
gtcaagtgcatgtttctgaacatcattgtcatactgtactatccaagtgctgttgagacacttttttctatcaatcgtgatgtaacagttggtaaaaaaaaaaaaaaaaaaaaaaaaaaaaaaaaaaaaaaaaaaaaaaaaaaaaaaaaaaaaaaaaaaaaaaaaaaaaaaaaaaaaaaaaaaaaaataaaaaaaaaaaataaaaataataaaaaaaaaaaaaaaaaaaaaataatttgggggggctcttttataattacaaatttttttaatgcgtgatagaatatttaatttttttttatagtggaccctaaatatattatagtggggggattttaaaacaagttttaattggaaaaaacatttgttttcaaaaatattattagctttgttaaaaattctaattttttt

SEQ ID NO: 88474 - DNA, 802 bp, Zea mays
  unsure (1)..(802): unsure at all n locations
  Clone ID: MRT4577_180688C.1
gtgcccacacgccgccgccgtgcggcagccaaccggcggcgattgagcgccgcaccgttgcttgtgttccctacttccctcccgcgcgtcgtctgggcttgcaatgcttgcgacgacgcctcggtacccgctcacttgcttccatgctccacggcacgcgcaggaggacggcgccgctcgcagccgctttcttcgcttccaagccccagcctcagcctccgccgcagctgccaacgccgcagatagtcgaagccgccgtcgctcgctgcccctcagacggcatcgcgctctccttcttcctgtggtgtgcccgccgccccggctatttccacccgcctntctccttcgaccgcctcctccccgccgcctcccgcctcgcctctcgcctcggcactgccaacaagcttatccgcgagctccaggccctcggcgtccacgtcaagccccagactttcctgctcctgctcaggctctactggcgcggggggctctaccctatcgtactcgatctgttctatcaaatgcgcctttggggattccaacccaatgccttcgcctgcaatgtcgtcctcgacgtccagctcaggacaggccatctcgacgcagcgcgacacacgttgcagtactacccggcacccaattacctcacctacgccattgtgctcacccatctctgcagggctgggggctggtcaggagcccgnagttgttttattgaaatgctacagctggnngtttgtcccaagtgcagcttctctcactgcggtttttgcctgctgcagtaaggctggaactatgtctg

SEQ ID NO: 88475 - DNA, 530 bp, Zea mays
  unsure (1)..(530): unsure at all n locations
  Clone ID: MRT4577_180689C.1
ccacgcgtccggagatgatgcttggagtcgttttgctatatgaagtgacggatacaatgggaatttgcagcaaaaaaaaaaaaaaaaaaaaaaaaaaaaaaaaaaaaaaaaaaaaaaaaaaaaaaaaaaaaaaaaaaaaaaaaaaaaaaaaaaaaaaaaaaaaaaaaaaaaaaaacaaaactaaaataaaaaaaaaatacaaatttaaaatattttttttttaaatacattaaattaattttattttacccaatttttaaaacttcaaaaacccttaaattacccggcgttttttaaccaaaccttacttgcactacttacccattttccctagctgctttttatgcccaacacaacccgttcttttccacccttccccccaattccaaagccttattaaaaaattccttttccccctttttttagcgctttaaccccaatgggttcctttttaacgccccgctaaaacggaacactccctancgcccttccctcatttattttccctttttcccttcctttttcgcccc

SEQ ID NO: 88476 - DNA, 306 bp, Zea mays
  Clone ID: MRT4577_18068C.1
cgacgacgtggccgtggactgcctggcgcgcgtaccccacgcctaccaccgtgcgatgcgccgggtctggcgcggctggcggagcgccgccgcggctccagtcttcgggtaggcacgcgccgcgtgagtcgccaacgaggacctcgtgtacctgatgcagttggggaacccgtacgccgtccactggcccaatgtcggcgacgaccggcccggcaggaccccggcgtacagcgtggccgcgtacaacgtcgccactggcgagtgtctgcaggagctcggtgcgccccccgtggtgcctgtgttcga

SEQ ID NO: 88477 - DNA, 337 bp, Zea mays
  Clone ID: MRT4577_180690C.1
aagggggtcttttcaccaaacatggagatttctcacgtactacatgcaaagcgggattgccacaaccccaaaccaagagcaaaaaagggaacaacacagatagacctcaaaaacacggcaaccaaagaggaagaaggaggagcgacagcaaacagagggggtggacaacaggcccgagaaaaaaatatcgaaatgcgctaaggccgggagggcctgccacaaaggcactcccgcccaggaccacacccggaccgccgaaacgcacatgtccctggggacgacgaaaaggcccccggagagggccacaaaggcagctacctgggagctaccacggcgc

SEQ ID NO: 88478 - DNA, 193 bp, Zea mays
  unsure (1)..(193): unsure at all n locations
  Clone ID: MRT4577_180691C.1
aaacccaaactgccatgcatgagaattgattgaccgaaagaacaggaaccaaccaacacaagacacaacaaggtgtaacagcggtaggtatggggcaccgcgccatttacaccgggccctaccaccatttccacccgacgcacactttatttagcccacgtnttttggagtccgcaccggacacgttcacgcg

SEQ ID NO: 88479 - DNA, 2263 bp, Zea mays
  Clone ID: MRT4577_180692C.1
gccggggctaggtctagtctgtctctcctctttcttggtttgaccagccttcccctctcttctctgctctttgcatctctctcttgttcctcccttcctctctaaaaaaagggttctgatccctttctagaagctcctgggtttctgttgccgacccgagctccccaggggcgctcaggaggcgccgagccggcgaccgctccggcggatctgaggagccgccgcggtcgctttgcctccggttccttgtaaactattgattgggaaacactctgaagaagagtttgttggctgcataacatctcctgaagctggtttgaagtttgctgataggaaagatcatgggcgctctctgtgatttctgtggggagcataggtctatggtttactgccgatcagatgcagcatccttgtgtttatcatgtgaccgtaatgtgcattcagctaatgctctttctcggcgtcatacaaggacacttttatgtgaccggtgtgcttcacagcctgctatggtccgctgtctagcagaaaatgcctcgctttgccaaaattgtgattggaatggccacattgcaggatcctcatctgccggacacaaaaggcagactataaattgctattcaggatgtccatcgtctgcagaactttctagaatatggtccttcgtttcagatattcctaatgtagcacctgagccaaactgtgagcaaggaataagcatgatgagcatcagcgacagtggtgtcagtaatcaagataatgctgcaggggacagtattttgttagatatagctagtgcaacacttgtaagtgatattggtacttgtgacaagcttttggtaggttcctcttcaggagctggagtgaacctacttccactggctactggtcaaacagaaacagctggatctgtggattccacaccagataaggttccctatacgccagataaagatatgttcagtaaggacagcatatatgaagatttttgtgtggatgacgctgaccttgctttcgaaaattatgaagaactctttggtacctctcatattcaaacagaacaactctttgatgatgctggaatagacatttactttgaaatgaaggaagcacctgctgggaattccactgagtccaagctgaagcaacctgcaaatagcaatgcggtatctgccgactctgggatgtcgaaccctggagtgaaaggtgattccagtgtttgtacccctttgaggcaggctaggtctagtctgtctctttcctttgctggtttgactggtgagagtagtgcgggagaccaccaagattgtgtggtatcatcattgcttcttatgggtgagcctccttggcagcctcctggccccgagggctcaattgctggaggtagtagagacagtgcactcacacgatacaaggagaagaaaatgagaagaaagttcgacaagaaaatcaggtacgcttctcgtaaggctagagcagatgtgcgaaagagggtaaagggtcggtttgttaaggctggtgaagcatatgactatgatcctctctgccaaacgaggagttactgaagcatatgatctttatccagttttaaattagcaaactgcaaccaaggctcgttgcagctagaacaaaagcactggcaatccaagctattgggccaaactgtgccttcgaaaagaaaaaaaaaaggagaaagctgtcggcatgataaaatatagagaaatatttggatgttgcagaagtttttgggtgaggatcctcctttttcctcctgtacagtggttggaagcggtttgagtctctccatcttttgtgaattagcctgaatccagctaaacagacttgttgcattttgatctccattctgcattcctgctgactgccatcagtctacgtacacgggctggcggctgcggtgtttttggaggtgttcgtccagattagacaagatggctagatgtgatctgtgaaatatccttctattataataatgtaaaatttgctgggacctggatgtttctgctattatcaatgtgcaaataccaggtcgtagccaaactggtcgtcagtttgttctttttaagttggtgatggaacccatccaactggacagtggacaccaactttctgtgctcattctgtccaaaccaacctccaaactgactcgatgttagtactatttgtattatgtgactcctgagcaagtgagcttgtgctcaaacctcaaatacgtcctcttgtaccaaaccacgatatggagggt

SEQ ID NO: 88480 - DNA, 366 bp, Zea mays
  Clone ID: MRT4577_180693C.1
tttttttttttttttttttttttttttttggttttttttttttttttttttttttttttttttttttttttttgggaggcccccattgggggcgtataaatttacgagctaaccaaaacataattccccaggggaacggccaaaaattatgttcagtacagcagtttaaacaggggaggccccttggagcctaacgttagaaaaccaatttacaggggttacctaggggcaccagcgttgaaaaaaacccttggttttgttagctcaactcaaaaagaagggctgggcagagccttcaaaaagttgcagtttttaaaagggcactttggggccctaaaaggccgggtatgggcttcgaattttttg

SEQ ID NO: 88481 - DNA, 281 bp, Zea mays
  Clone ID: MRT4577_180694C.1
tcatctgacagcaagttggtacgtgtcctcgcgcgttcgattggacgatccagcccacggcacacggacatacgtgctgcctctgaggagcatgaacgacgatcatccatccacctgacgaagacaccatcaatacgacgaacatggcgatgaggtcgctagcactactggtcctactaatcctgatggtagtaggacgtggctcagacgatgctgtcataaatagagcagagagcctgctgatgcgattgccattactatggatcatgatccgccgaagg

SEQ ID NO: 88482 - DNA, 601 bp, Zea mays
  unsure (1)..(601): unsure at all n locations
  Clone ID: MRT4577_180695C.1
gtccctttttangncaccgggggggggggggggcccaactacgttaagttacgatcaaggaaaattcatgatgatactgagaagttagaaacataaacgatgcgagaactacgttaagttacgatgaaggaaaattaaatccatagcggcggatgtgttacgcctgtcagaaaaacacagcggtaattgtcccgttggcggcatgcggtggcctggtcccttccacgactaggtccttaataagcctacgccgagccagctcgtgctgatatggcaagaccactattgcagacgaccacacctatggcagggtgggtgctaagcaagtagccaacaacctatatagcaaacttacgctgctatcgcgcgttgcacctgtgctagcagcatccggtggctatagttgttgacctgttgacggttgtcatagctgctttagctggagagctttaatacatcgctcgacacgggcaacaccttgcgatccggcgaccatagtgcaagctatctcctttagtaaatgggcctgcgggttgtgcctctcttactttgtgtcctaataagtgctgtcgacaccgtgtgaagtggaactttcatcagc

SEQ ID NO: 88483 - DNA, 209 bp, Zea mays
  unsure (1)..(209): unsure at all n locations
  Clone ID: MRT4577_180696C.1
aaatttnnccaataaatccatcgagaggccgccgacagggggaataatggggggggggggtaacagtattcaccgtcgtcttatcctcgcagccgccgtcctgctcttcgtgcttggggctggcagcgccagctccgggacctcctgcgtgccagggtgggccatttccgacaacccagttccgaagctgcggtggtacttgaccaacc

SEQ ID NO: 88484 - DNA, 422 bp, Zea mays
  Clone ID: MRT4577_180697C.1
cctcgaggcggccgggaaaaaacttcccggacccgagcgacacaacagacagaggacgaaggagaaggatatgggaggcgaggcgggaatggggctccgcgtccgcgcctcctccctcctgctgtcactggtcctcgagctcgccgtcgcgctcgtctcagttcttccgagttctggcacgacgttgcgtcccggtttcattctccgtatggacagcactgcaagaagccgcgaacgaagaacatggaggcgtgattgattcagctcggttgctaactcagctctgacacgcatccgtccatggccattacatgattttacatctctatctagctagctgtttcaatcatagcattttgcctctcccacagatgaatgatcattccgtctgcttccccaaaaaaaaaaaaaaaaaagcggcc

SEQ ID NO: 88485 - DNA, 733 bp, Zea mays
  Clone ID: MRT4577_180698C.1
ccggccgggaccggtcggtcccgagcgacacaacagacagaggaggaaggagaaggatatgggaggcgaggcgggaatggggctccgcgtccgcgcctcctccctcctgctgtcactggtcctcgagctcgccgtcgcgctcgtctcaggtaactccagtcgcagtcgccggctcggtcggtccctgctcgcttgtatgttgtatcactgtggattctccctctctctccttgctcgtgctctgctttctgccgtcattgctctctttgctgcgaatcggtgccgcgtccgcctgtcccagtgagacgacctcagttgctatgtcagttcttccgagttctggcacgacgctgcgtcccggtttcattctccgtatggacagcactgcaagaagccgcgaacgaagaacatggaggcgtgattgattcagctcggttgctaactcagctctgacacgcatccgtccatggccattacatgattttacatctctatctagctagctgtttcaatcatagcattttgcctctcccacagatgaatgatcattccgtctgcttccctatacattattattgagtgtagctatatacgaaagcgactttgcacctaaaacactttatgatcgctgtctgagaaaaaaaaagggaattcaatcccctcgaacgaaaatatatacaaagcagcatcaactcttcgactgcgtaaaaaaaaaaaaaaaaaggggcggccc

SEQ ID NO: 88486 - DNA, 641 bp, Zea mays
  Clone ID: MRT4577_180699C.1
ttttttttttttttttggccgtaacaatcagtcaatcagaatgtagaaatgaggccagtaaaaattcagcctagctaactgggccaagccgaccctgccgcgtagaaaacacgtgctgcagcccaggattgtcaccagcatcctcagttttatatggcccaaacaaggcaaaaccgctggcaacaccgcatgattatgtgcccaagcccaatgatcggcaagacgagcggggtgtccattcttgggaacttccagcaggagaatatgcatgtcctctaccacctgcgccggggcaagatcaccttcaccaaggccatctgcgactccttgcaacagataggttccgcatggactggaaacttggtctcgtgatcttgtactccgtgacaggattttagagaatttgtacattgagattggggactagacatcggtgctctatattagcatttgtcagaaattcctgaagtgtatttgcagaaaagcgtatccattcagtaatcagagtagcgaaaggagggagcagcgctcgaggagaaactctataactgctgataagattggtcgaatatgaaatccgtttattaacaccgatagtgagataaacctggaaagtctacaatgatgtaaacttttttttt

SEQ ID NO: 88487 - DNA, 168 bp, Zea mays
  unsure (1)..(168): unsure at all n locations
  Clone ID: MRT4577_18069C.1
cttttcagcggacatcaccgcatacacagctgcccgcacgcagacgcgcagatgcatcaacaccgccgccggcacgccgcacactcacatctccttatacccatccggccatcaacacactgcagaacactctcgaagcaccgcacacacaccgnatcctgaagcaac

SEQ ID NO: 88488 - DNA, 519 bp, Zea mays
  Clone ID: MRT4577_1806C.1
acaaacaaattaaattaaaccagataaatgttatttacagcacaacattgtttaattacatggcaaagtagaccaaggtgtcaaacttattatatagttaattgcagctattgcatataacccattccttcccctttatttctttttctgcttttggtataatttttcataacgttaaatagaagacctcgtggaagaatcgctccctgccatcttcagagtactggactgtttcaccaaatcaaatgatgtgaacgaacgtggtgggactgtaacattcatgtcctttccaacattctgaagtagactttggattggcaccaccttctttggctgtgagaaggagttctcatccattacatttgcagatgtaagcacagtctttgttgacccagataactgcaatgagtttggttctagtccgtcaagagagaatttgaggttcacggcagtggtaccgaaattcacaacctttattcgtatgtaattttttctatctcagaattttgaaatgtaatt

SEQ ID NO: 88489 - DNA, 1008 bp, Zea mays
  Clone ID: MRT4577_180700C.1
gtaaggtcaggaattcccgggccgacccacgcgtcgaaaacaaaaaagagagaaaagaagggggcaaagctcgcggcctcgcgtcgcgccggtcgttccggtccaacgcggcgacgcccaaggctgccgtccctgggcttcctcctccccctcaccccttcccctcgccaaaccacaggaagaagcgagcagggcaccgagttttctcgagcgatggcatcggcgcctgccgattcctacgggtgcgcggcgtgcggcgcgcccctgaacctgtcggcggcgcacctgtacccggcggacttctacttcgaggccgggaacaagggcacgctgtccttctcgtgggtggacgagtcgcgcctgcggttcgcgcccgaggaccgcatccgccccttcttcgagacccgcaactactggggcatccagcggaagcgcacgcgcatcagctgcgacgcctgcggccacctgcttggccacgtctacgacgacggtccgccggccatgcagggcaccggccagttcgggatggggcccagccaggtcatcccgcgccgccccaggtaccgcttcaagatcaaggccatcgccgccagctcctcggcacctgccgccgccgcctatgaaaagtgatgctccatagatttcttcatctggttgcgtgtcctgtgtgctgtcggtgctgtggttcgtgacttcctgtaaattacgtagcttcctgcaattcgcgtcctgcgttgttttctttagaaacagtgtgtttgaaatggcatgcgactgaaactatgattgaaatggcatgcaacttctaatatgcccccaagacggaagatataaataaaaaactatgattgaaatggcatgcgactgaaactatggcaatctcgaaggcggcgatgaaaccttttggatggtacacaggaattttaacagcatgtataactcaattaaatgggttgtcttgatgagtatctaggagacatgtttttcacgaagagtttgtttctatct

SEQ ID NO: 88490 - DNA, 427 bp, Zea mays
  Clone ID: MRT4577_180701C.1
gggtacacgggcccccccctcgagcttcttccccttcctcctccccctcctctcctcttcctttttttttttttttttttttttttttttttttttttttttttcggccgccggaatcttttttaatttggcaaggggggaaaaggtataaaaggagaacggcccggaaccgggccccaaaaacctccttcgggggaaaaaagcccggaccccaaaaccaacaagggcaaggcccggggggggcccaaacaaaaccctaaggggccccccgggtttgggcaaacggggggccagttagggaggaaaaagggcccccaacccgtaaaggcatcttctcccaaaaaacgtgggcctcgcccgccccccatcagggggggggaaagttaaagaaatttttttcccccccccggccccaaagggccaggcc

SEQ ID NO: 88491 - DNA, 596 bp, Zea mays
  Clone ID: MRT4577_180702C.1
atttcctctgactgccgcctcccctgtgtcgaacgagactgctgggatactatgggaacaaatcccgtatcgattatggctctagcggaggatcgcacgaacaactgcgcgaacatacattttcgagaacctctaatcatctccgcatgaggtcataagggcgcgtcttaactggcttccggctgcctgctgcggagacatgctgatggccaccctacagaaggcaaatctccacctcacaaaaaaagggatgcccatcgtattcacacgccggtgcaaggcgtgcttcagaagggacggagtgtacctgtactacaaaaatcaagctggactgattgtcaagccaactacagagatgtccatcatcatggataactgtacctatcccgcatgagtgtgcatcatctttgctctaggatcctcagagaagcaaatggcatggtcatgtagcttgttgtaatgcgtataaacttaagcatgatcatcttagttgtcggatggatttgtgatgaagggtgatattgcgaatagaagtctccatgtaaaggttgcgcactcatactgtgtattgaagagaagtttctgaatgcccatga

SEQ ID NO: 88492 - DNA, 314 bp, Zea mays
  Clone ID: MRT4577_180703C.1
ggggattcccattcttaaattttctgcaacaaagttttaatagcaaacttccaaaacaggcccccaaacaaaagtccttgggcttcacataacccccctttggggggaaccgaaggggaacattttatgctggcgaccaaatctcggaacttgccccccaggaattgaaccccagccccgggtttacccttgtgctcacggagcgttctttccgcgatctttttgtccagctcaagcccaatagcgataatttcgacatcggcggggttgatctttacagcagccaattttttttccctcaacctcatcgggtt

SEQ ID NO: 88493 - DNA, 1811 bp, Zea mays
  unsure (1)..(1811): unsure at all n locations
  Clone ID: MRT4577_180704C.1
tattagaatgcctgagacggttggtaggatatttgctttggcgactgtcttaagctcggtaattatctaccacgtgtctggcagagtgaaggggcaagatgttgcttttgagccagcaaagcttctctggcttatccagagggatttcctccaaggaaaatctgttcaacaaatggtcaatgaagcccttcaacgggtgcctaatgataatggtgacaaatatattgatgaggtcaatcaaatacgagattcgttggcagttatggggaacaacagcactgcttttagcttgcctcagccgcatcttcaaagaacaaaattatgtgatatggaggacaaagaacttgaacccttatatgtaaaacggcgggagcaattaaagcagcttgtttcgtctattgtaaaaccaaaaattgtgcagggcagaactctaaatgggaaggactttgtgtctttcttgcagcagattcttgaggctttgaataaaggcgaaattccatcaacagggtctctagttgaaatttttaacaaagccattcttgatcgctgtctgaaggtgtacagggagaaaatggatggcttaggcctaccagtaccggtagacaaactgcagaaacttcatgagatggcaaatggtgatgctagaattctctttgataagcagcactttggcaaacatcatgctgctcagtcagcactcaagcttgaagatgatattaaaaaggtggcaatgtacagaaacttacttctagctaatgaatatcaatcgtcaaagctgtgtgaagctcgcttttctgagtgtgaagataagatggatcaccttcaagtcttgaaacttccttcgatggcaaaattcaatgcaggctttactcactgcaaccaaagtttcgtaaaggaatgtgttggacctgcaaaagaaagctatgaacgtagaatgtcaaagatgcttgccaagtctcgtgctcttttcatcaaggagtacaataacaagcttttcaattggttggtgaccttctctttggtcatggtggtcatcgggcgctttgtcatcaagttcttcctacttgaaatcgctgcctgggtgatgttcatcttcctagagacgtacacgagaatgttctggtcagcggaatcgctgtactataatccagcttggcacatcattgtttcttcctgggaaaccatcgtgtacagcccaattcttgatctggacagatgggccgtcccaattgtcataatgctattatttggggttctttactggagatgcttcggtggtagaaggaagcggggaaggggttcgctcctcccattgtacaagaattcttataactcgagtcgtcgctcgagatcagactagttatacacgcaatgttcaagtttttttcttttaaagaatggtacaaaatatctgcctgtagaagaggctaaactgccgaatgtggatcatctgtaagtgcttttggatgggcatgttttgatggtgccctgccaatgtatctccaattctttttggtggatgaagagaggcggtgaagctgctagtatggggcggggcacctgcacaaagcctcatttgtaattcataccagggtaccttttctgtagctagattatccttacatgtcacggtcccaattgattgattattgtttacgcctactgcaattttttttggcaagaattttgttttttaacgtcatagatagaaggtagctgttagagcgtgtaccgagtcaatcatatgttcaaagttataatctggtggtgggatttggaaaaaaaaaaaaaaaaaaaaaaaaannnnnnnn

SEQ ID NO: 88494 - DNA, 301 bp, Zea mays
  Clone ID: MRT4577_180705C.1
atgatcttcagggcgacgaggatcaagcttacaggaaaatcaagctctgtgctgaagatgtgcagggcaggaatgtgctcacaaacttagggggtatgaatttttccactgataaactgagatccctagtgaagaagtggcagacattaatcgaagcccatgttgatgtcaagactaccgacaactacatgttgcgttgttctgcatcggctcacgatgaggcgccaaaccaggcagagaacctgtaagtcaggatccagatcgtcagaccgcgaaagatggtgagatatgacaacaggct

SEQ ID NO: 88495 - DNA, 322 bp, Zea mays
  unsure (1)..(322): unsure at all n locations
  Clone ID: MRT4577_180706C.1
cctcgacatgagaccacgatgttcagntcccatatgatcaccctcagagatccttatcaccaccatatgctttctgagagaatccggtgagtcgacataatgatagattccacatctcccatataaaaactgcttgtgtcatggctgtgggatgcatctccatcaccaaatacccactggatgaatgacaatgtccaaatagccgataggataagatgattgacacctgttgcgtctgaacatatgcataaaagaaacccattccaaatacgaaataccttttccgagaaaaagcaatacaaagcgccctgatgctcggcga

SEQ ID NO: 88496 - DNA, 393 bp, Zea mays
  Clone ID: MRT4577_180707C.1
cccacgcgtcggcagactcgtgggaggcagcgtgggatccacatggaagtgtgagactgcttgttgccactgttgtcggcgaagggcacgtctgcgccaatggctaccacacactcatcattgcgattcaatagctactagggatgctgccatgcacacgttcattgccaatcggcagagtcttttggcaccctgctgacgatacgacaccatcccgaaagctcagtatcctgtacaaacttttcccgatatcattcgtaatgaaccaggcaggaggacaatcattcacaggcaagcaaaggcctcttgatgtggtcccagccaagatcgacgataggtccccgatattcctcggaagctacaacgacgtggaggagatcatagcgttgtacg

SEQ ID NO: 88497 - DNA, 392 bp, Zea mays
  unsure (1)..(392): unsure at all n locations
  Clone ID: MRT4577_180708C.1
cgtgcgttaacttggnatcctctacacggccgcgcttgttggtttttttttttttttttttatattttttttttttttattttttaaacttatttttttttttttttttatttttttttttatttttctttatatgctataccctcgcctgagagacgtagcaacaccaacaagcccatcctcaaaggggggggggggggagaaaaccctggtaaagtgaataccgatcggttctacatattctgcccctttttcacccccttcttttattcttggggggcccccccctgccccccttttctgaaagaaaaaaaaggtttctttaccgggtcctgggtcccccgccccccggtggccgtttggttttccttcttggggggggttggccccac

SEQ ID NO: 88498 - DNA, 1582 bp, Zea mays
  Clone ID: MRT4577_180709C.1
gccccagtgtactacagactcgacaggtacggtgagcataaaagaggagagccgataagcacaatggcgcctgaggaaaggatgaagcagacagagggcagtcacaaggtggtaacagcagcagcagcaggtggcaagatggcggtgctccactctccggtcggagtgaggagcatcgtgacctccctggtggctttcttcatcctagccagctccgtggtgttcctcctcctcgacagagaagccgggctccaagaagaaccggcgataagagccggcggcggcggcgggcgacgaggagtgcagctggtctcgggggcgctgggtgtacgacaacgtgtcccggccgctgtacgacgggctcaagtgcgccttcatcttccccgaggtggcctgtgacaagtatggcaggaaggatgtcatgtaccagcactggagatggcagcctcatggtcatggatgcgacctcccaagattcgatggcatcaagctgcttgaggagctgaggaacaagagactggtgtttgtgggcgactcggtgaacaggaaccaatgggtctctctcgtgtgcatggtggaggcctcgatacctgacgacaggctcaagaggcgcatcttcaatggctcgctcatctccttcaaggcactggagtacaacgcgacgatagatttctactggtcgccgctgctggtggagtctaacagcgacaaccccatcatccaccgggtggagtaccggatcataagggcagacaggatcgagaagcacgccagcgtgtggagggacgccgacgtcatcgtcttcaactcttacctgtggtggaggaagcagaaggatgacatgaggatgaaggtcatgtacggttcatttgaagatggtgatgcaaagctagacgagatggaaatggcggatggtttcgagatagctatcaagaaactgacggaatggcttgcagagaacattgacaagaacaagactaggatatttttcgcaggatcatcaccaacacattcctgggctagcaactggggcggacaagacaagaacaagtgcctgaacgaaacggagccgatcagctacagacccggcggcggctacaaggcggcaaccacggactacagcctgatggccatggccaggtcctacttccggcggacgctggagccgagaggcatacgcgtccagatactcaacatcacggagctgtccgactaccgcaaggacgggcatcccacggtgttcaggaggcagttcgttcccctgaccaaggagcagatcgcggacccggccagctacgcggactgcacgcactggtgcctcccaggcgtccccgacgtctggaacgagttcctgtatggctacctggtgcacgtttagattattattagggatggacctgctgttacatgtagagagagagagacagacaggagatctgtcttgcccaacattaattctagtatctgtaaatcttgttcttcttgtccaacattaattctaggatctgctgctaaccattttttttttttttggatttatgtaaagaatgatctgagtttgctgttccagtattgagcaagt

SEQ ID NO: 88499 - DNA, 229 bp, Zea mays
  unsure (1)..(229): unsure at all n locations
  Clone ID: MRT4577_18070C.1
ccggggccgggcggttaaaacaatctcgtattattaccgacacggtgtaatagcatcttgttgtnngcggagaaaatcacaangtcttcagacggatagtaaatcctaggagtgggtgaagacaanctgatagannagagatgcggcnnctatgccttcactagcaacccaagcttgtcatatgagttgtcagctggcgcggacgccgtgggntcgacttcttagtagt

SEQ ID NO: 88500 - DNA, 1513 bp, Zea mays
  Clone ID: MRT4577_180710C.1
agcagacagagggcagtcacaaggtggtaacagcagcagcagcaggtggctttcttcatcctagccagctccgtggtgttcctcctcctcgacagagaagccgggctccaagaagaaccggcgataagagccggcggcggcggcggcgacgaggagtgcagctggtctcgggggcgctgggtgtacgacaacgtgtcccggccgctgtacgacgggctcaagtgcgccttcatcttccccgaggtggcctgtgacaagtatggcaggaaggatgtcatgtaccagcactggagatggcagcctcatggtcatggatgcgacctcccaagattcgatgccatgaagctgcttgaagagctgaggaacaagagactggtgtttgtgggtgactcggtgaacaggaaccaatgggtctctctcgtgtgcatggtggaggcctcgatacctgacgacaggctcaagatgcgcatcttcaatggctcgctcatctccttcaaggcactggagtacaacgcgacgatagatttctactggtcgccgctgctggtggagtctaacagcgacaaccccatcatccaccgggtggagtaccggatcataagggcagacaggatcgagaagcacgccagcgtgtggagggacgccgacgtcatcgtcttcaactcttacctgtggtggaggaagcagaaggatgacatgaggatgaaggtcatgtacggttcatttgaagatggtgacgcaaagctagacgagatggaaatggcggatggtttcgagatagctatcaagaaactgacggaatggcttgcaaagaacattgacaagaacaagactaggatatttttcgcaggatcatcaccaacacattcctgggctagcaactggggcggacaagacaagaacaagtgcctgaacgaaacggagccgatcagctacagacccggcggcgggtacaaggctgcaaccacggaccactgcctgatggccatggccaggtcctacttccggcggacgctggacccgagaggcatacgcgtccagatactcaacatcacggagctgtccgactaccgcaaggacgggcatcccacggtgttcaggaggcagttcgttcccctgaccaaggagcagatcgcggacccggccagctacgcggactgcacgcactggtgcctcccaggcgtccccgacgtctggaacgagttcctgtatggctacctcacgcagcagagcaaatgacgatgcattattacaagaatggccttgttatatgtagtagtgtacagtgcagtacagattgccagctgctccgtttagattattagggatggacctgctgttacatgtagagagagacagacaggagatctgtcttgcccaacattaattctagtatctgtaaatcttgttcttcttgtccaacattaattctaggatctgctgctaaccattttttttggatttatgtaaactgagtgattatctgaaatagaatgatctgagtttgctgttc

SEQ ID NO: 88501 - DNA, 473 bp, Zea mays
  Clone ID: MRT4577_180711C.1
aaaaaggggcactggggggatataaaatcaaaaggggggcaaaaaaaagggaaagggggcgatggaaacccaaagctaaaaaactcgggtttaaaaaaaaactgggccacaccagaggaattgggaggccaaaggcaccactaaaaggagcccgattttgggggcaaaataaaaagcataataggggggagtaagtttaacgaaagccttttttttccaataaggccgaaaaaaggggggaacctttttggccggaaggaaaaaaattttttggagggaagcctgaatctttttttgggcggcctgggggcaaaaaaaaaaaaccaaaggggggtaatttaaaatttttttaatcgttgattcgggggaaagggggacctgaaaaattgggaactgaaaaagctggttccttccggaagggctgattcgggggacctgggggccccaaccctttttaagggtcggggggcgga

SEQ ID NO: 88502 - DNA, 1154 bp, Zea mays
  Clone ID: MRT4577_180712C.1
cgtcatcgtcttcaactcttacctgtggtggaggaagcagaaggatgacatgaggatgaaggtcatgtacggttcatttgaagatggtgatgcaaagctagacgagatggaaatggcggatggtttcgagatagctatcaagaaactgacggaatggcttgcagagaacattgacaagaacaagactaggatatttttcgcaggatcgtcaccaacacattcctgggctagcaactggggcggagaagacaagaacaagtgcctgaacgaaacggagccgatctacagacccggcgggtacaaggcggcaaccacggactacagcttgatggccaaggccaggtcctacttccggcggacgctggagccgagaggcatacgcgtccagatactcaacatcacggagctgtccgactaccgcaaggacgggcatcccacggtgttcaggaggcagttcgtccccctgacgaaggagcagatcgcggacccggccagctacgcggactgcacgcactggtgcctccccggcgtccccgacgtctggaacgagttcctgtatggctacctcgtgcagcagcgcaaatgacgatgcattattacaaagaagctagacgtcaggttcgttttacatggccttattatatgtagtgtagtacagtagagtacagattgtctactgctccgtttagattagggacgctctcatgctcttgtgcagagaatggcggccggacctgctgttacatgtagagacagacaggagatctgtctggcccaacattctagtatctgtaaatcttgttcttgttgtccaacattaattctaggatctgctgctaaccattttttttggatttatgtaaactgggtgattatctgaaatagaatgatctgagttggctgttccagtattgagcaagtaaaaaaaaacaaatcgcccaccgtggggcttgaaacattaattctaggatctgctgctaagtgctaaccatgttttttggatttatgtaaactgggtgattatatgaaatagagagatatgagtttgctgttccagtattgagcaagtaaaaaaacaaatcactaaccatgttttttggatttatgtaaactgggtgattatatgaaatagagtgatatgagtttgctgttcc

SEQ ID NO: 88503 - DNA, 1858 bp, Zea mays
  Clone ID: MRT4577_180713C.1
cgataggtggccataaaagaggagggacatcaagcccggtccgcctgaagagaggatgaagacagaggccagtcacaaggcgatagcagcaggtggtggcaagatgacggtgctccactctccggttggagttaggagcatcgtgacctccttggtggctttcttcatcctagccagctccatcgtgttcctcctcgacagaggccaggaagagcaagtgcaagtggcagtcgagcatggacgccaagaagtgcaggtgaagctggaatccgggctgcaagaaccggcgataagagggacaacccaagagggggacgccagcaacgaggagtgcaactggtccaggggaaggtgggtgtacgacaacgtgtcccgcccattgtacagcgggctcaagtgctccttcatcttccccgaggtggcctgtgacaagtatggcaggaaggatgccatgtaccagcactggagatggcagcctcatggtcatggatgcgacctcccaagatttgatgccatcaagctgcttgaaaatctgagaaacaagagaatggtgtttgtgggcgactcagtcaacaggaaccaatgggtctctctcgtgtgcatggtggaggcctcaatacctgacgacaggctcaagatacgcaccttcaatggctcactcatctccttcaaggcattggaatacaacgcaacgatagatttctactggtcaccactactggtggagtctaacagcgacaaccccattatccaccgggtggagtaccggatcataagggcagacagaattgagaagcatgccagtgtctggagggatgccgacatcattgtcttcaattcttacctgtggtggaggaagcagaaggatgacatgaggatgaaggtcatgtacggttcatttgaagatggtgatgcaaagctagacgagatggaaatggtggatggtttcgagatagctatcaagaaactgacggaatggcttgcagagaacattgacaagaacaagactaggatatttttcgcaggatcatcaccaacacattcctgggctagcaactggggcggacaagacaagaacaagtgcctgaacgaaacggagccgatcagctacagacccggcggcgggtacaaggctgcaaccacggactacagcctgatggccatggccaggtcctacttccggcggacgctggagccgagaggcatacgcgtccagatactcaacatcacggagctgtccgactaccgcaaggacgggcatcccacggtgttcaggaggcagttcgttcccctgaccaaggagcagatcgcggacccggccagctacgcggactgcacgcactggtgcctcccaggcgtccccgacgtctggaacgagttcctgtatggctacctcacgcagcagcgcaaatgatgcattattacaagaagctagaccgacgtcaggttcgttttgcttacacatggacatggccttgttatatgtagtgtacagtgcagtacagattgccagctgctccgtttagattattagggatgtacctgctgttacatgtagagagagacagacaggagatctgtcttgcccaacattctagtatctgtaaatcttgttctttttgtccaacattaattctaggatctgctgctaaccattttttttggatttatgtaaagaatgatctgagtttgctgttccagtattgagcaagtaaaaaaaaaacaaattatctgcaaatcgcttgttgtccaacattaattctaggatctgctgctaaccattttttggatttatgtaaactgagtgattatctgaaatagaatgatctgagtttgctgttccaaaaaaaaaaaaaaa

SEQ ID NO: 88504 - DNA, 211 bp, Zea mays
  Clone ID: MRT4577_180714C.1
atcgtactatcgccctcatgctgttcgtcggttgcgcgttagtggatgtagctagctcgttctcgacggtacagtcgggaacgtactcgcatgggagcgttgccgggctggcgggcggctacgtggcggataacatgctcggcctggctggatgccaagtcctctcctcgagatcatggccttcaagctcccgtccatctgcccttaatcg

SEQ ID NO: 88505 - DNA, 416 bp, Zea mays
  Clone ID: MRT4577_180715C.1
aaaaaaaaaaaaaaaaaaaaaaaaaaaaaaaaaaaatttaaaaaaaaaaacggacctgcggcctccagatctccggctcttttatccctgtatagaggctcaactgcgcgcttgacggaacatagggtgcatacctgggtgcctgtgtgaaacggtcacacttccacacttcctcccagcatgcaagcccaaaagcaaaaacctgaaagccctaaggggggagcgagctaacatttttttttatggctcactgcctccttgccagttttcaaaccggtaaacccggctggccaaatgaattaaccaaccccccaacgagaggcggataggcgattggcggatgttccgctttttcgcttactgactcactgacttcgtgcgttcggctgttgggatcgggataacgtcactaaatg

SEQ ID NO: 88506 - DNA, 270 bp, Zea mays
  Clone ID: MRT4577_180716C.1
ctccgcgtgcggtactcgctatcacacgcttaatagcaaaacatactacgcgacctgatctagctatatttatagcggacaatctaaaaacgatagcgtatacactagcacaaagcgacgactacaagacacactttctcttaccacggggtatctctgatctatctgatgctccgtgagagcatgggcggcgaggcctaactattactcttgctgctatgctcgccgactactacgaacgatcccaagatctgaagcacctgattacaa

SEQ ID NO: 88507 - DNA, 175 bp, Zea mays
  Clone ID: MRT4577_180717C.1
aaatatatatatatatatatagcagtagtataacatagcgtatgtttttagcggggggatcagtagtacacgtttgatgtgaatgatgtactcaactgaaagagagattgcacggcgaacctttgcgtctgttcttggccggacaggataattttcgattttctcgacccaaaaa

SEQ ID NO: 88508 - DNA, 244 bp, Zea mays
  Clone ID: MRT4577_180718C.1
atctggatgttctctggttcgcatggaaactgttcctccatggtcgctagtgtggtggcttgtgaattgtgatgtgtagaaccagaatgaatcgtgtttgtggcgtcattgcattggattcggacgagttgaaatcggaagcttctctgtctgtgagagaggctggtgcaagtttgcatcaccatgtctcgaatggatattattctttggtctttggtattcaaaggggttccttttgaatcaa

SEQ ID NO: 88509 - DNA, 1455 bp, Zea mays
  Clone ID: MRT4577_180719C.1
aagcgctaccaaacgcagcctaaatacctccgccaaggagctaggagtgtggcgtgaactaaccagcacgggcgctgagggctgaggccgcgacgacgacgaccatgatgaggctgaagcagcacatgggcctggtctcctcccctacccctgccatcgtcgtgaggctcggcaacaacacaccccaccgccgccgagcaactcggtctcggatcgtgtcgtcctccgcctccgacgccgcgccgttcgagaagcccagggccgtggtcaagaaggtcctcgcgcagtcgcagcccgagggtcagggtgccaccgtccgtaggagcatcggcaggcacgagctccgcaacctggacccgttcctccagctcgacgagttcactgtctccaagcccgccgggttccccgaccacccgcacagaggattcgagaccgtcacccacatgtttgagggggccatcatccaccaggacttcgctggtcacaagggcaccatcaggacaggggacgtgcagtggatgacggcggggcgaggcatcgtgcactcggagatgccggctggggacggcgtgagcgagggcctgcagctctggatcaacctctcctccaaggacaagatgatcgagccgcgataccaggagctggagcgcaaggacatcagccgcgcggagaccgaggacggcgtggaggcccgcgtcatcgccggggaggccttcggcgtggcgtcccccgtgtacacgcgcactcccatcatgtacgtggacttcaccatgcgacctgggtcccgcctgcaccagcctgtcccggagggctggaacgccttcgtctacgtcgtcgacggcgagggcgtattcgggcgggagacggccacggcacaccactgcctcgtgctcggctccggcgacggcgtcagcgtgtggaacaggtccgccaggccgttaaggttcgtcctcgccgccgggcagccgctcggtgagcccgtggtgcagcacggacccttcgtcatgaactcgcacgccgagatacagcaggccatggaagactactcctacggcaagaacggcttcgagagggccggccagtggagctcctccgcctgatcggcgaggctatcgcgttaaattaaataaatgtgtgtaatacacacagctcaacgcttcccttaagttatgtagcaacgccatttgttggtgattaacgagtgatcgagcaagcttaaaaaagttccactccttttaaacttatatatttatcggtattttagctaatacaatagtttattgagactattgtattcgtgtatcgaaagttatgtagcaatgccatttgtgggtgattaccgtgttttccggtcgaagtatcagctagttcaatcattaaaaaaaaaaaaaaaaaaaaaaaaaaaaaaaaaaaaaaaaaaaaaaaaaaaagaaaaaaaaaaaaaaaaaagcggcc

SEQ ID NO: 88510 - DNA, 372 bp, Zea mays
  Clone ID: MRT4577_18071C.1
ggcaaaagcccctcaaattaaacaaaaacttttggggcccgggggggctttatagaacctagcaggggcaaacatcccaaccgggggaaattttgttttccagcttgcacccacaaccctgtcaggccaaaccccatagccgtcccatgctcaaaagacatccaatggggatgggaggggtactatgggtggtggcccccccccccgggggccaagatttgcccccggtggaacaccccctgcggccggaagggacccaaataaaccctggcccccccctcaaacgctggggggccggggaaacccaagtggttgaaaagttggggccccgggtttgttgtcccgggaggccaaaaaggggctcacatcccg

SEQ ID NO: 88511 - DNA, 646 bp, Zea mays
  Clone ID: MRT4577_180720C.1
gccggccggttcggagattaccctccctaatcaccaaagcctcgcgaccccctgtcctcgtctaccctccgtcggccgctcgcttactgcaggtcaacaacctcacatgctccgcctacacctttgtgtgccgcaacaacgcccgctgatcggaccgtcaagcagcactccgtgctacatctcatgcttcctgccgctaccccatacgaactgcaacgccgcctcgtcgccgtcgtctccgcgatcgactctggctacggaggacatccatccttctccatgggaacccgcaactccaacgtgctccagtggatctgctgtgctggatgcggccggacaatgatgccctacataggtggccgccctcgcgacgctgctgcatctggtggagctgctgccaaggatccctatgaagagaacaaggaacaggagaaggaagagatcgacgaccacgtgggattctccctgctcgactatagtggagtgtgtcatctgtatctcaaaaatgtgggaccgcacctgctaccgtgaactgttttgctgtcctgaatgtgaacctgaacagctcacggaaattgctacgaaccacctggtccacatatatgagatgacccatatgttgtttggaatcggcccctagggccgc

SEQ ID NO: 88512 - DNA, 1497 bp, Zea mays
  Clone ID: MRT4577_180721C.1
gtacgggccaaacagaggagaacaacacaccccatcgccgccgaacaagtacatcaactactactcatatcacccaaaagcagttcctgctcctcgtgatcctcctgctcctcctcctcctcctcctcttctccgtcgtcttcttgatccccaccgtctcgttgcccccagctcggtctcggaccatgtcgtcgtccgcctccgacgccgcgccgttcgagaagcccagggccgtggtcaagaaggtcctcgcggagtcgcagcccgaggggcagggcgccaccgtccgcaggagcatcggcaggcatgagctccgcaacctggaccccttcctcctgctcgacgagttcacagtctacaagcccgccgggtttcccgaccacccccacagaggattcgagaccgtcacctacatgctcgagggggcattcacccaccaggacttcgctgggcacaagggcaccatcaagacaggggacgtgcagtggatgacggcggggcgaggcatcgtgcactcggagatgccggcgggggacggcgtgcacaagggcctgcagctctggatcaacctctcctccaaggacaagatgatcgagccgcggtaccaggagctggagagcaaggacatcagccgcggggagagcgaggacggcggcgtggaggcccgcgtcattgccggggaggccctcggcgcggcgtcccccgtgtacacgcgcacccccaccatgtacgtggacttcaccatgcgccccgggtctcgcctgcaccagcccgtcccggagggctggaacgccttcgtctacgtcgtcgacggcgagggcgtgttcgggcgggagacggccacggcgcactactgcctcgtcctcggccccggcgacggcgtcagcgtgtggaacaggtccaccaggccgctgaggttcgtcctcgtcgccgggcagccgctcggcgagcccgtggttcagcacgggcccttcgtcatgaactcgcgcgcccagattcagaaggccatggaagactactactatggcaagaacggcttcgagagggccggacagtggagctcctccgcctgatcggcgaggcggggagccgatggcaccaaattaaatctcacgtgcaaactaaatatttctattaaatttgtttgggtggaaggctacatcgttccacgctctgagtttgactattttttttagcaactactacacttgcattggtagtatgtcatctagtatggcgaattggttattgtaataaacagtaaggaaaattgatagtctcaataaaccattgtatttgtagcatatggaaaattgtatatcaaggccatttgtgggtgattgctgtttttcaaaaaaaaaaaaaaaaaagcggccaaaaaataaaaaaaaaaaaaaaaaaaaaaaaaaaaaagggcgaacatatctaaagaaaacaaaaatacaaaacacatgcatccaacgataaagcttttaaataggagaacctaaatcaaat

SEQ ID NO: 88513 - DNA, 175 bp, Zea mays
  unsure (1)..(175): unsure at all n locations
  Clone ID: MRT4577_180722C.1
ctcgatgttgtctgtgagaggtagttcgtgaacgatggcttgcctgaattcaagtggttcgtcaatcagaagtgtaacagganntaataaatagcaggggcgcccacccactaccatactgtgctaagcagcgagtaaacaaaagaaggaggcggggccgccccatacggtgaac

SEQ ID NO: 88514 - DNA, 1012 bp, Zea mays
  Clone ID: MRT4577_180723C.1
ccggccgggtaaatttgcattcaacagtttcagtggtaccatcgagctcagctcgttcttcaaaatgcccaacatagccagattgaatctttaaacaacaagctttctgtagtagacggagaatacaatgcttcatgggcatccatcgcagattttgatactctatgtctagcatcttgtaacatatccaagctccctgaagccttgaggcacatggattcctttgcagttcttgacctttcaaacaaccacatccatggcactctacctcagtgggcatgggataattggatcaactctctcatcttgatgaacatatcacacaaccaattcagcggtggtattggatatggctctgtcatttctgccaatatgtttgttttttgatattagttataacctatttgaagggcctatacctataccaggaccacagaaccaactgtttgattgctcgaacaaccaattctcatccatgccattcaattttggttctcacttaactggtatttcccttctcatggcttccggaaacaatttgtccggagaaattccacaatcaatctgtgaagcaacaagccttatgctccttgatctctccaataataatctgcttggctccatcccttcttgtttaatggaggatatgagtaacctcaatgtattaaatttgaaaggaaatcaacttcatggaagattaccaaatagcctaaagcaagattgtgcattcgaggcattagacttcagcgataatcagattgaagggcagttacctagatctctagttgcttgcaaagatttagaggtttttgatatcgggaagaatcttattaatgatgcatttccatgttggatgagtatgcttcctaaacttcaagtccttgttctaaagtccaacatgttcactggggatgtggggccatctatttcagaagatcaaaatagttgtgaacttggaaaacttcgaattatttgattggctttaaacaatttctctggattattgcgaaac

SEQ ID NO: 88515 - DNA, 619 bp, Zea mays
  Clone ID: MRT4577_180724C.1
ttcccgggcgctaactcccgttactatacgttaagctacggtgtcgaggagggcgcgggaaaggaaaccaaaaggttccatcagccccacattggtggggaacgctctgcccaccccctgagacaagcaccccaagatctaccccatgaagctctgggccaccaaccaaggccgcgccaacaacaagttctaatacttgctgggggaggggaaaaagttaataaaatcactaacatgtcctggccatgaactaaatcttctagcgtaacccgacgactatcaagaactaccgcatctggctgccctaccagaccataaccagataccacatcatgaacaaggagtaccgccacacaacccttaacggtgctgtttaacagatgtacaatgaaatgagttctctccaccgcatgagggccctctgcatccagatcatcaagaccgtcacggtgcacttcaaactgtgcaacgaggacaacacaaagcacttacacaacagtgagatcaagttcctacttgtgtaccgcaaggacatgccgccaaccaggaagctgaagaccaccttcaaggcttctaggccaaacctgttcatgcgatttagctgtggtcagcgtatgag

SEQ ID NO: 88516 - DNA, 544 bp, Zea mays
  unsure (1)..(544): unsure at all n locations
  Clone ID: MRT4577_180725C.1
gcggcaggncctggatgccagagcaaaccataggtccagtccaaatccaatccctgttgccatcagaatttcaggggcagccatggccgaaaaggagagcaacggagtgcaggtgtgcgtcaccggaggagccgggttcatcggctcctggctcgtcaggaagctcctcgagaaaggctacaccgtccacgccacgccattcgggctcgatagcgccggctcccagtataagagcacggcggaagctgtggtggacgcggtgcacgcgatcctccggcaatgcgaggagtccaggacggtgaagcgagtgatccacacggcctccgtagcggccgcctcgccgctgctggaggaggaggtccccgcctccggcgtcgggtacagagacttcatcgacgaatcttgttggacttcgctcaacgttgactatcctctacgaagcgcacacttcgacaagtacatactgtccaagctgcagtcggagcaaaagctcctgagctaccacaacgggcgagagttccgccgctccaaggcgctgacccct

SEQ ID NO: 88517 - DNA, 598 bp, Zea mays
  Clone ID: MRT4577_180726C.1
ttttaaaaaccttttttttttttttttttttttttttttttttttttttttttttttttttttaagccaaaaacttttgggaccaagggggatttaaaaaaatttttgtttcactacaaaaactggcaacatttttgttcaatccgccccaaaaaaattaacaatttacccgaatttttttgtttaacctaaactaaacccagcctcggaacattagggctttactacccccagcactgttttatggggggggggggggtctcaccaaaatgttttaaaaaaaaaggactggataaggggactttgcagttccccgccccttataaaaaaaattcaccattttttgttcctgtttgacgaccttttcaaacatttttggataaacccaaatcctgatgaaacacaaaaacggcctcatggcaagggaaggtttttatgggggtatgcgaaattattggcaccgttcaccatttgcccgctcccttgaatgaaccagcgcgttgttaaaaaacctttaacccccacgggcccacgagcatgtttaccccctgggtttatgccaccctcagcccccaatccaaaacgagccccgtaaaaa

SEQ ID NO: 88518 - DNA, 936 bp, Zea mays
  unsure (1)..(936): unsure at all n locations
  Clone ID: MRT4577_180727C.1
cattgggtacctcgaggccggccgggatgccagagcaaacccataggtccagtccaaatccaatccctgttgccatcagaatttcaggggcagccatggccgaaaaggagagcaacggagtgcgggtgtgcgtcaccggaggagccgggttcatcggctcctggctcgtcaggaagctcctcgagnaaagctacaccgtgcacgccaccctgcggaacaccggtgcgtctgatggcggctcctcagctcgatccgcgcgtcgcgaaaggcgaaacacgccaaaggcgaaagccgaaaggagtgggtcgggtctcgtgtgtggctgcctgatgattcgggaatcttagccggatgggggtgctggtgggtgtgcaggggacgaggcgaaggcggggctgctgcgtcggctggtccccggcgcggcggagcggctgcggttgttccaggccgacctcttcgacgccgccaccttcgcgccggcgatcgctgggtgccagttcgtcttcctcgtcgccacgccattcgggctcgatagcgccggctcccaggtgaagcttgccgtcgcgttcgctcccttcactgttttactagtcaacgagtggtcaggcggcgacgcgccgtgctgtctcttcttaattttaagttgtggaaaattactgtccttgcaaaggaaaaatttgatcagactgagtatgagtaaagaccagtaagacagcacaaggattgcgagctgcgactgcgagcagaggaaacgtcttcacagttattcttgtctgccttgtttttctctatctgaagcaaaatcttgtggtgcccatcgaccgcgtatagcagtataagagcacggcggaagctgtggtggacgcggtgcgcgcgatcctccggcaatgcgaggagtcccggacggtgaagcgagtgatccacacagcctccgta

SEQ ID NO: 88519 - DNA, 1733 bp, Zea mays
  Clone ID: MRT4577_180728C.1
cccagctcccataggtccagtccaaatccaatccctgttgccatcagaatttcaggggcagccatggccgaaaaggagagcaacggagtgcgggtgtgcgtcaccggaggagccgggttcatcggctcctggctcgtcaggaagctcctcgagaaaggctacaccgtccacgccaccctgcggaacaccggggacgaggcgaaggcgggggctgctgcgtcggctggtccccggcgcagcggagcggctgcggttgttccaggccgacctcttcgacgccgccaccttcgcgccggcgatcgctgggtgccagttcgtcttcctcgtcgccacgccattcgggctcgatagcgccggctcccagtataagagcacggcggaagctgtggtggacgcggtgcgcgcgatcctccggcaatgcgaggagtcccggacggtgaagcgagtgatccacacggcctccgtagcggccgcctcgccgctgctggaggaggaggtccccgcctccggcgtcgggtacagagacttcatcgacgaatcttgttggacttcgctcaacgttgactatcctctacgaagcgcacacttcgacaagtacatactgtcgaagctgcagtcggagcaagagctcctgagctacaacaacggcgagagtccggcgttcgaggtggtgaccctgccgctggggctcgtggcgggcgacacggtcctcggccgcgccccggagacggtggagagcgccgtggcgcccgtgtcccgcagcgagccctacttcggcctcctgcgcatactgcagcagctcctggggtcgctgccgctggtgcacgtggacgacgtctgcgacgcgctcgtcttctgcatggagcggcgcccctccgtcgccggccgcttcctctgcgccgccgcgtacccgacgatccacgacgtggtcgcccactacgccagcaagttccctcacctcgacatcttgaaagagacgacggaggcggtggcgacggtgcggcctgcccgggacaggttgggcgagctgggcttcaagtacaagtacggcatggaagagattctggatagcagcgttgcctgtgcggcgagattgggttcccttgacggatccaagctcaacgttccagatactgtcagtagcaaataaacctgaattgtgtagtgaacctgactctactttcatggacgttattagctcaatcttcataaggatatggacatatggtgggtgtgtgtgaacacggtgtccttgccgtaagagaaaaatctatctacacggcatttgttgcatttgcgagagagagagaaatgtatctgagcgctagctgtctttttataatttgtggaatttcgcagtgcctgcgtcgaagtagcagctcagtatcaaaaagaaaaatctcgagcaaaaacaattcgtcggcgtatcgaggataacgaaagggatggggtgagtccccgtcgacgctggctaggactagctaggaggatgacgaacgtgctgggtgccgtgccgtgtggtgtggatcggaagcgtcacagatgagccgaaagcgcgacgacgatcacgaccaggcgctagttaccgcgaagccgtctatcccttccacgggccggccggtgggatacggtttttgcaatgcgtgccaccctgcgtcgctcacgtccccgtccccgtcccgtaagctgaatcgatcgccaccgttccgtctcccggcccggccggcctcgag

SEQ ID NO: 88520 - DNA, 649 bp, Zea mays
  unsure (1)..(649): unsure at all n locations
  Clone ID: MRT4577_180729C.1
cattgggtggctcgctcccggccggggtgctgctccgcccctcgatcggctggctctactttgcatggtccccggccgggcctcctcttgcgtgctctccgacctcagtcacggcgcccatcacgggcccttaaaaccgcatactacacagaaacatataccaccaagcttgcttgtcgcctcacaagctacggcgagctactaggcgaagtagaattattcctggggccgcgcggcagctagctcctagctcgcagccggccatggcgaagccgcaggaggtccgcagcgtcgactccttctcgcagctaccgttcatccggccggcgccggcgccgagggacgccaccatccgtctgtttggccgcgagttccccagcgaccacaaccagcagcagcaggacgccgcgtccgactcccccgacgctgccaacaacggcagcacggtcacgtgcgagagcaacggcgcggccaagagcggcgccgcggccgagaggaagttcgagtgccactactgctgccgcaacttcccgacgtcgcaggcgctgggcgggcaccagaacgcgcacaagcgcgagcgccagcacgccaagcgcgcccacctncaggccttcctcgccatgcaccggttcctgcccggacacatgta

SEQ ID NO: 88521 - DNA, 1092 bp, Zea mays
  Clone ID: MRT4577_18072C.1
atgcacgaattgagttggttgcatgagttatacattcagtacatccttcaaaatttaccaagtgtgttaaaaaactgtgtaaaaatctgacaatgaatttgtggtatatttgattatatttctcagtgtaattagagctactagaagatttgctcttcacatcattgcttgccagtggtttatttagcaatttataacactcaaagatccatttatgatcatgaaggttatttgtgccttacgaatcctctaatacttaatatgctgatcggttgatgagtaactgattagcaattcagtgggacctctctcttgcaaagtaaacttctgctattttatttgttcagaactgttcctccaaaatccaatggtgtgcttatttcaactatcatgtctttaaaaaatccccatatcttgttgcttctgattatcagagttaaagttttgcttccaacatctttttgcagccaccttgtactcggcactgccatgactgtgataaatgcgtccttcaatttgatcatcactgcatatggcttggaacatgcattggcaaaaagaaccattgtcgtttttggtgagtttttaatgtacgtcttcacctatatgttccattcacttgcacataagttgcagtgctgtgttataaactaccataatttttacagaaaaattacagttttttctttgattcagacattgataaactttcttagtatggcgtttagatctgctatggtgtatggtgcagaatgttggatcacaaaaagatgacatgttctgcagataagtgttgcgaaaatgcttatattgtgttgaatttgtggccatacaagaagggattgaatccggaacaatgatatatgtgataggatagaagtagcaccagttgaaaaaaaaactctcaacttattcaacaccggttaagatggtttagacatgtccaacggagacctttataagcactagtgcgtagtaggatcctaagatgcgataacgatttatttttgataggagtgcatggaataccatatccatgtgcccgatccttgattttgtttcattggggttcaactgtacctaccctacttg

SEQ ID NO: 88522 - DNA, 437 bp, Zea mays
  Clone ID: MRT4577_180730C.1
ggaacataaagggcccgtttttaaaggccccaacgggggattttagttaaaaaaaccccaaatgggcaacaagacaaaaaaacaacccttcagccccaatggaggaatcttttttaatcatccagaggggaaaattaagttcacaactaaaaccctaacgatccaaaaaatgcttttggcgccacaaactcaggcataatttcactcctttgactaaccccaaaaactttttttattgcccttccttgagaccccaaagtccctaaaaaactgggggcccttttaaaagcccccaaaagaaatctttattagatcataaaccccagcccaaaccgggtttttaggcaaacagcccccgcaaacgggaaataaaaatgaattttcagcaaagtccaatttttatgtcaaaaaaaggcaggtaaaaatagccaatttta

SEQ ID NO: 88523 - DNA, 1081 bp, Zea mays
  unsure (1)..(1081): unsure at all n locations
  Clone ID: MRT4577_180731C.1
nnctctcccaagggcgaaaatcagatgaatgtcctttgggagagtcgaattctccttcttctccttgctcctaacagtcttgcccgcataagtgtgtttgacatgatctgggaagagaaccttcatgcttcctggtctcctctcaaggggtgtctccatgcaccctttattatgaagatgatcgaagtggtcacccagactcacttcgagaagcctgtcaaacactcccgctatgtaccgtactgggttgactccaacaacccagttgcacgtacaaagcgggctcccgcaggggctggaggccctgcttcttccgatgagccgcctcctcagcctcctcatcatgagtcctcctctcgcgccgccgctgcttcacgtccgatggaccatagtgggagaggtagaggtcagggccagggatagggtcaaggccggggactgtttattcgtttggccaagggtattgctggtgccttctccatgtgccgcgattgggcaatcaaggagtccgtgcacaggcgccggactgaggcgctgcatgaggactttcatcgttatgccgcctccacgggtcatcctctgccttctgggtctcctccgcctccgacccccacctaccctgaaaaccttaatgagtggcaccaataggaatatggtgtgccattcattactcctaaggatgaggccgcgaagtttgatgactcctactatacctcggctcctcctcctccctattcgggtcagggacccattcccggtgaaccccggccacccggccccggtcactttccccctactccctacccaggccagggacccattcctggtgacccgaggctttctggctctggttaccaccaccatcctcctccttcaggagggtattgattcctgtgctctctctctcctcgtttttggtccttgctaccaaaaagggggagaaaatctaaaatctaaggttagccaagtcatttttttgtttctttttttgtttcttgtttatttttgtttttggccactgtggtggcttgtatatttttattaatggatgtaataaagcagttggtatattaaaagaaaa

SEQ ID NO: 88524 - DNA, 188 bp, Zea mays
  Clone ID: MRT4577_180732C.1
gcgttcgctccaggaaccccaaatccagttccgttccaatcgccgcgtaaggcagcaaaggggagtaaaaaaaaaggaaatctatggcggcggccggcggcgagaacagcggcgctggcgagggcgagggcgagttctacctgcgctactacttgggacacaagggtcagctacggacactattttct

SEQ ID NO: 88525 - DNA, 609 bp, Zea mays
  Clone ID: MRT4577_180733C.1
gggcgacaggcgtcagtcagttaaaacgatgcaaaaccgtagaggcaggctgtcgccacaattttcaggcagaagcacctttgcatgcatcccctcagctcagacttcagtgtaggtacccggatttttttttataaaaaaaggatgaaaaggttagcttttgtaaataaataaaggcaaaaagggacatcagcatgttttttcgtgtcaagtgcttctttagtgggccccggcagacttgaaactgggaagtggttctcttctggattcgggttctagcagtacaaaagaaggcgtggaaaaactcgcatggtttctctagaagaggaacctcgactttctgttacgcacacatgcattaagaaaacacgaagaatcctgccactgatatacgtgtcaaagaaccaccggtaggaattcgaaccacaaaagtgctggtgatagacaaggataagattccaatctcagcagcagcagcagcagattaatattccacgcatgacctcgctcgcccacatttggcaaatcaaaatgcgccaccagattaaaaaaaacacacaaccacgcacacccaacgccagctaacgaaccagacaaacgcacgcaccc

SEQ ID NO: 88526 - DNA, 459 bp, Zea mays
  Clone ID: MRT4577_180734C.1
gccgtttttgaacccgtacaagaactggcggagggcggtcaacgtattatccggcgccgacgcacgctcctggcagtgccagctgcagcggtatgcgcgtgcgtgttaggccgctaagatgagcaggatgaagaggagacgctcctgcaggagagaggacattgtcagggcagggagaggggccgttgtcgccaccccgggggtcattgccctatagctaggctacctccttgtccatgagcctgatctcctgggtgagctgttatcaccagtacctgaggtactcgtaatcgactctcaacatgcttcaatttggtatctgtctcgccagttttgtaacgactacatccacctagtcctgcatgtaggagctagaaacactgtccaacggtgccttatgctcttgagggccgttgtgtgtgcgttactaagcacttctttagccagctgcctgctgct

SEQ ID NO: 88527 - DNA, 1197 bp, Zea mays
  Clone ID: MRT4577_180735C.1
ctagttgtcatcgccggagtcagagtctccggtgaaaacatccttcaggaccgcctcgggtgactgatacccgaggtccggttctcccgcagccacctcgccactgtcgaccctttccttgccaggccagtgacgaggaggggacccgtccatggttgtctgctcgcgtcgttcgctgacgcgcttcgcgagttcgatgatctcgcgacactccgcggcgctatggcgactgttggggtgtacagggcatgggtcgttgttacccctatgcagccatgggcgcttgttgcgctcattccggcccctagtcacagctacgactatcggagcggcagacggcggcctctcggagccgcggttcttcttcttcttctttttgccgtcctgagtgacggcacccgagccacccatctgggcaaccctggtctgtggtgctgagtgccatgcgcggccctcaacggccctaacgcacttgtccgccagagcgaagagcgtggtgacagtttccacgtcatgcgtggccaacttctccagcatcttttcatcacgcaccccctggcggaaatcggtgatgatggaagcatcgaagatacggggtatagttcctcgtaccctggtgaagcgggagatgaaggtccagagagtttccccaggctcctgcctcactgcatggaggtgagcctccacgccatgccattgataagcactggcgaagttcgctgcgaaccgcgcacagagctcttcccaggagtagattgatcctggggtaaggttcatgagccaagtccgggcaggcccagacaaggcaacatgaaaatatgttgccatcacggcggtgtctccacctgctgccgtaatggtggtgacgtacaccgcagcaaagtcttgatcgaggttgcgaccctcgatgtttagccagcgctcacgcgccctctttagagagactcgagcgtcttcacgaccctcgaagttttgtcggtgttcccgcgccctctctagagagacccgggcatcctctcccgcacgcctacggttgagctctgcccggaggtcgtcggtctgtgcacccctcaccgagggtgagcgcacagacgtcgttgcctcatgttggcgccaggatgaccgcggcctagacctggtcgagccggagtgcgccatgccgagcagtcggtcgacgtcgtcacgccactgcttcat

SEQ ID NO: 88528 - DNA, 428 bp, Zea mays
  Clone ID: MRT4577_180736C.1
cggggttggtttttttttaaaacagggaaaaaggctaattttttgtccaaaggatgggttaccccccctggccttttttaaagaaaaaattttcctttaccaaaaaaaccattgccattccttagcgacccttgctaccaaaaaaaaggcgacctttcccaatctaaaattggttttcaagccaccattcttttaccggatttggtttgagggggggctaaacaagggcaaaccaaagggttttgcaaaccctttgcccctgatagaacaaacctgttgataaaaaggctcttaaaacccccatcaaaaattactttccttgccaaaagaaggtggtcccataaaaaggtggaggacctcccccaggttgctgagggtaaccctcccccggggtaggggctggacccactgttggccctggggctccc

SEQ ID NO: 88529 - DNA, 476 bp, Zea mays
  Clone ID: MRT4577_180737C.1
gaggcaggagaaattaaaaaaaaaagcttttgtttttacaaggaaacaacccaacgggaccccctaccttggggggttcatcacggggaattgaaacccagaaaagcacttacccgcgccccccgagacccacaggcacggggaaaagaaaacccccccaatttatggccggggcccgaagaagaagccagaagcctttttctttttcttgccgaagaaaaacccgccattgccggggttgagggggggaaaaaaaaaaaaaaggacgttgaaaaaaacaagcggttttattttgggggggggccccccccttttgatgttgagttgggccagggcccccttccccgggaagaactcccccatgaaggaaaaggccacccccaggtgggccatcccccccaaaaaaagtttgtttgatttggggaacccaaacaggggccctccctttttgaggcccagggccccggagaaaccct

SEQ ID NO: 88530 - DNA, 215 bp, Zea mays
  Clone ID: MRT4577_180738C.1
gacctctcaccagcggtgtcttcggtgtgtgaaaacccaattcttcaaccctatgggatgcaacaggcagtgggaggtggggtgttacgttgatgacgctgggggctggagcggtggtcaggcctatgacaggacgtaccttgggggcgggcattggctctttttctgggggggcggcagctgcggcggctgggggctgtgggaccttggtgggt

SEQ ID NO: 88531 - DNA, 923 bp, Zea mays
  Clone ID: MRT4577_180739C.1
ctcgaggccggccgggacgcgccgagcctggccgggcttgaccaacccatacgcccccaccctccgccgccgtttttctctccccatctcgcccgccgttttcgtccttatcgatctcctcgcacctcgtggcggcacctctccccttcgatccaccaagggtttaggatcggcggcgatggcggcgaggctggcacagctgcgcgctcaggcggtgcaggcggcggagttcgcctcgaagcacggcggctcctactacaaggagctcatggagaagaacaagcagtacgtcgtgcagccccccaccatcgagaaatgccaggagctctccaagcagctcttctacacccgcctcgcaagcctaccaggtcggtatgagtcattctggaaggagcttgatggtgtcaagcaggtatggaagaacaggaaggacctcaaggttgaggaccttgggattgcgactttatttggagttgagctttatgcatggttctgcgtaggcgagattgttggcagaggtttcaccttaaccggctataaggtctagttgatttccagtgatttaagacctgctttataaatcgacactttagctgatgcttgtcgaaacgacgatgatacctgccttccttcacaattttgtttcttgtaagagtctacctagtgctgaatgccagcaaagacgggcacatggttgcaacattgcctcaataatttgcccgcgcaattcttgattttgatgcatgtaattctttgtcagttgcatgtgctgcagtccctgcgtgcagactcatttcgtgtctttcgttctgcccacaaaataaattctttctgcgttacatatgaaaaaaaaagaaaaaaaaaaaaaaaaaaaaaaaaccgcaaaagagtgggaaaacaaaaaaaaaaaaaagtagagtaac

SEQ ID NO: 88532 - DNA, 193 bp, Zea mays
  Clone ID: MRT4577_18073C.1
cctgcctacacgacttgttgagctcgtgcgctactcttctcgagcgcggcgcggagtacggggacatcaaatggcggcagcggcggttatcggtggtttcgcggtggctagagtggtaggtggcgactctcatgccggttgctcacccatccccggcggcggtggtggtcacctcattcttatgagggcggtg

SEQ ID NO: 88533 - DNA, 293 bp, Zea mays
  Clone ID: MRT4577_180740C.1
tttctctcaactctttcctcaaatacagcacgcttcttttattaacagagggggctcttatatatcttttcccttacttttctaatatctccttactttatatcctagtcacacacaatacatctattactcttattttgcaatattcttactccaacttaactttttatcttctttccatattctattccaaattttttatttttacattttatctcttaactttaaattcttttctatcaacacttatctaatttttctatttattttttttctaacattctttttttttt

SEQ ID NO: 88534 - DNA, 328 bp, Zea mays
  Clone ID: MRT4577_180741C.1
gttggctctatttttttctttttttttttcccaaccttaacaaaagggcctgtcttttttcaactgtttaaaggggttttttttcaacaaataacacccacatttcctttgcaacgtttaaactccatcccttaattgatcaacgggctctgccccgaaggcaacctttaccacccccccttttgctggtaaccacattttgttcaggggcatacctgggggacccaaaaacatgggccaaacccacttgttccttaaccaacaacttctttttgtttgtgtacccaccaaacaaggttgggcaccgtgtgcccataatcatcccctt

SEQ ID NO: 88535 - DNA, 297 bp, Zea mays
  unsure (1)..(297): unsure at all n locations
  Clone ID: MRT4577_180742C.1
gccgccggcggaacgggccccactggntgctggccttcgaatctgcggttggtgcgagcttgcatggatctctgcttctgcactctagcaggggcgcgaagaacagggtagctaggacatgggtgctctcagtgcaccgatgggcatggcagggagccacccacagatgttgttcacggccagcgcactgctggacacggggctatatgagcctcccatatgcgggggcaacggtcaaggccgaggtgctgagccttgctgctgctctgcgtctgtgcggtcgtggttccaaagatg

SEQ ID NO: 88536 - DNA, 235 bp, Zea mays
  Clone ID: MRT4577_180743C.1
ggggccctgaatttttcattctttccccggggaaaaaggaaaaaaaaaatgcaatcttctttttccccccccgaaattccccatctgatccccttggggggccaccaatttccatccaaagtcccgccctcccccttcgcatacatctggtgaaactggttttcgtgatccaaactatcccccgctccccatttccctcgatgaatgatggcattctccctcgttacgagccccc

SEQ ID NO: 88537 - DNA, 405 bp, Zea mays
  unsure (1)..(405): unsure at all n locations
  Clone ID: MRT4577_180744C.1
acccacgcgtccggacgtctgacaataaaatgaagcttattgccttcgcatgcagttagcatcatcactggacgacaacattgttggttttattagaacacttaatttgtgatgtctcgacataattgccggtcacttaaaggaggagtgggctgctgcatttctatgaaaactcatatgtgagcaaatgctactctcctagtgacatctttaatcattatggtctcaaaaatattggacgtaagctatgacaacatttttcttttgaagatagacactgtcgtcatttgatcaaccctatctacatgtgggttgcgatatttccatattatgtggacagcttacacacagttaaatcagactggatcaccaatngatgaatcataagcttgctctgaacgggaa

SEQ ID NO: 88538 - DNA, 389 bp, Zea mays
  Clone ID: MRT4577_180745C.1
tcttcagctccaacctttctttttcacaaaacactactctcacaccgactccccttcctaaaggcggacggaccattcttctcaacctacattcctcccacaatcatcatagatattctacaccactatctgttcatgtttctttacccacaccctaatctctcataccaaataatatcaccataaattaactatacatagtcaccaatatctaccacaatatatagaccaaaatctgaattcacaaccctgcaaaagaattgtgaatatcaatacaccactccttgcagccatctccactgaccaccttcttcctctcacgtctcttaaccacatcatcatcctttaccattctaagtaggcatcacttctcttctacacagacattc

SEQ ID NO: 88539 - DNA, 303 bp, Zea mays
  Clone ID: MRT4577_180746C.1
cttcttcgtccggccacgcgtccgtttaaataaaccggcgtcttctgccctggctgggacgccgctgctgacagggcacctgatggatcgatttcctggagcagtcagcggcgctcaagagtcacgagcttactggttgcaagcaacgatcgacgaactaggggtgtagggagtggattgaagaggttaacatgcacatggacacaccgacggaggctgatggggaagtgcatgactcaacccacccatcggtgcgtgggacgagatccaaccgggaggtgcactgactaccttgaagaacat

SEQ ID NO: 88540 - DNA, 376 bp, Zea mays
  Clone ID: MRT4577_180747C.1
tgcttgtttatgtgcttgtttatgtgcttgttttgcccattctcctaatcttaacttacggttcgtgtggactgtcttatgttggtggaggatgagtaatagtagaagtgtttgctctctcctctgttgcattagacgttttgtccttgttctatttattgggcggcgtcggtgttgacgattaggcgtagggtgtttgatgtgactttaggttttgtgtctgtggagcatcatgtgtagtggcctatggagggtggtccgtctactcttgagggtattactactctgttgcttggtttcgggcctttctgccgtttcgggacacataactcagaatagatcgacgtacggaggaaaggggatgacgtcgtctacg

SEQ ID NO: 88541 - DNA, 344 bp, Zea mays
  Clone ID: MRT4577_180748C.1
cccacgcgttcgaagacgcgtgggcagccagaaaaaaaggacatgagctctacaggcggcgcaccaaggtcggagtgtggagtggagaggtagggtcgtcacatgacataccgactacggagccgcctgggccattgcagagactgagctgtccgagctggcgttggtccgtactccaacgagtttacctacagtaccgacacatgtggtgagacgcgctccaaagggcaatggggtggacttggcggcaactttccggaagtctgatcttggcgacactatatacgtcaaggaagtcgctggaacatacggcgcattctaaggtgcgactaccttttaccttg

SEQ ID NO: 88542 - DNA, 410 bp, Zea mays
  Clone ID: MRT4577_180749C.1
gggaggggggcaatcatattaccaggggttgttccttacacgttcttggccccgggaaaacaaaacacccaacatatttgtttatgcaagagagaaaaaattaattaacaggggggtgaggaggagcggaaaaaacccactccccagaaaaaagtgaaaggtccctggcggctaatgccgtctgcccgtctccggggcaagaaaaacggacagcggacaagaaaaatttacttgcggctgcggcggcggccctttttttcccccaaaagccgtcctcctgggcaaagcaaaaggggttgccggccccggccccacccccggggataacaaaatggccaaacaacggggtgccccttcccgcgacgcggttctcgtcgaacaggaactccctgctaaacacctgctccacc

SEQ ID NO: 88543 - DNA, 661 bp, Zea mays
  Clone ID: MRT4577_18074C.1
tggtaactcacatttatgctagagttccagagagcatgcaatctgcattcagggggaggaagcattatcctacacagaatgtattagctgcagttgattttgatttgaagttcacatatgtactagctgggtgggaggggtctgcacatgatgccactatccttgctgatgcacttgagaggcaggatgggttaaaagttcctgaaggaaaattctacctagttgatgctggatatgcatgtcgcccaggattcttacccccatacaggagcactaggtatcatctaaaggagtatggtggtaggaaccaccccacaaatgcaaaagagttgttcaatcttaggcactcaagcttaagagtgactgttgagagagcatttggggctttgaagaatagatttcgaataattgacaataaacctttccacccattcaagactcaagtaaaacttgtccttgcatgttgcatattgcataattggatcctaagtcatggtgttgatgaggtaatacctctagagtctacctggcagccaaacaaccatggaaacaatggtcatggagtggccatggaggacaataatgcatgggcttctatcagggatgtgtgggcaaatcagatgtgggagaacaggggccagtatcacatttagtgcatacc

SEQ ID NO: 88544 - DNA, 293 bp, Zea mays
  Clone ID: MRT4577_180750C.1
gtcttctcttgtacaaatgatgtattttgaagaccgttagtgtataacagagttgatgtttgtttcctgtttgattttaaacagagaaaataaaaggagttatgtgctccttttttctttctttttttcatttcaaagtttctaccagtgtatcagtgatggacaacggagagacatgctgtagagtgtttgcctagttgacaaagctgattttgaatgctggtggttctgttcctttgacactacgcacttttataatatgtgttaatgctctatgacaaaatgctctgact

SEQ ID NO: 88545 - DNA, 337 bp, Zea mays
  Clone ID: MRT4577_180751C.1
ccacagcgacgggctggggggtgaacgtgaacttttgggtgccgaacgcggtgacggcgcccgtgaggtttgtgacaacggacttactgtggaacgttcgttccgcatgacaagtacaaccaacttgaggagaagtgctcgctagtgctatgcgctggcgttgagtgtacatagttgattaacgttattcttctttggagccatcgactacaagttgttgatgcacatcagcttatggacagacgggttgatcgattactacctcttcattggcctgaacacgttctacgtcacaaacaaggagctagccgccaagtatcccatggacaaagtggaa

SEQ ID NO: 88546 - DNA, 232 bp, Zea mays
  unsure (1)..(232): unsure at all n locations
  Clone ID: MRT4577_180752C.1
cggactcctggttccacaaatcccatctnatttccccgcatcctcttctactcgaccatctgttccgtctacaaacccgcgccgccgttcnccnaaaccccacttcgcatcgcttacattccttgattgctcacacaaacatcattaaccagcttctgnnaagaattgtncagaaatatanncataatccatagctgctttcttcatttcggggaaatcatgaacagtcctc

SEQ ID NO: 88547 - DNA, 511 bp, Zea mays
  Clone ID: MRT4577_180753C.1
ggaattccagcgatacctcgttaaatcaaccgagcagccgctcctccccctgtcttcttccccagccggcgttcttccttcctggcgttttcctcctctctgattcgcgcaggagcaagggagctcccatggctacctccctggcgccctctccacccagcacgcagaagcttccagggagccgtcgctcgcctctacagctccctccggcgtcggctctccaacaggcttccctgccttcctctctttcgagcccccctggttttcgtctgtaagcttgccggcagccatcttccccaagtgctggcgtatgggagccatgtcccctctgtccagaaaatgcagagctcgagcacacctctctactcccatccatggtgccccaaatctccagccggagctccgaaagccgcctccctggtgcacctcgccagtagcagggatcctttccctctcccatggcgcgcaagccgagagctcccccacgtgcgttcccttccccaagcgcaag

SEQ ID NO: 88548 - DNA, 274 bp, Zea mays
  Clone ID: MRT4577_180754C.1
gacaaggtgttttttgcctcagtccgctctgggggcagcagccaagtttacttcatgactctgaaccgtaactgcatcatgagacggtgacgtggccctgggctggggctgtcccacactggacccagctctccccctgcagccaggcttcccgggccgcccctctttcccctccctgggcttttgcttttactggtttgatttcactggagcctgctgggaacgtgacctctgaggcctcatgccttcgtgatcacgtgaccatcctcttccc

SEQ ID NO: 88549 - DNA, 584 bp, Zea mays
  Clone ID: MRT4577_180755C.1
gctaggtcctatctaccagggatggggcgtcggaacccgttaaacctaacaagggagcttgtcgtactgcctgcacgaactccgcccccccccccacggggtccgccacctgcccccgcctcgccgcccgccccccccggcccccctccacccccgggccctactccacctcccggctgcgcacccgacatccccctcggtcggctccccgcacctttccgccccccctcgccgctggttccgccctgtcggcaccgcagtcgttaacccccgggggggcccaaggtccgaacattagtggaagaagtaacatctaaggagatccaggaaggaaaggttctatacacgcgttaggttgtgttagtgtattacagaacttctaaggtaaccctgtaagacagtaagacatttacggaggttttaaaagacctcttcagtgtggagataacctgttctacatcctctacctagttgacccgtgtcttacagataacaactacggtcaccgaagttaaaggtagtgagattgtccaagactttactgccaaggacggtagttccaagaggttcgaaggggtgacgag

SEQ ID NO: 88550 - DNA, 1425 bp, Zea mays
  Clone ID: MRT4577_180756C.1
atgatgagagagggtgatgcacgtgttacgcttctaagaagcaagctccatggcctggtcgaaaggaaccgagatctggaagaggaaaacaagcaattgagacaccaagtgagccaattaaaaggtcagatctcctctctcgaaggccaggaaactaataagaggatgctgtggaagaagctggagaattctgcaaccggcatcagctactccaaggaaaagcagtttgtccagagcaacgatggtgctaaggaagccgtagatctcaacagctcattgtctcacagcaggcagcaattctccagggtaaaccaagtgagatcaagggcgccaagggttccaaatcaacctcccaatccgacaagcacccaaccaaaggcaactgtgagaaaggaaggatgcatggcccctcctcctcctcctcctctaccttccaagttgcagaggagcacaaaggcgatacaaagggtaccagaggtagtcgagttgtaccggtcgctagtgcggcgtgaaggcaaaaataatgcaaagtctggatccgtaggaattccagcagcaacgaacagcagagagatgatcggggagattgagaacagatcagcttatgttttagctattaaatcagacgtagaaaatcaaggcaacttcgtgaacttcctcgcaagtgaagttcaaaacgcagcatacaaaaagatagctgacgttgaagagtttgtgaagtggcttgatggggaattgtcataccttgtggatgaaagagcagtgctaaaacaattccccaactggcccgagaagaaagcagatgccttgagagaagcagcattcaactaccgcgatctgaagaacctagagtcggaagcatcatccttccatgatgacaggagagtggccacacctatggctctcaagcgcatgcaggcattgcaggacaaaattgaacaaggtattcataacactgaacgagtaagggacagtgcaagcggaagatataaggatcttaagataccatgggaatggatgctcgactctggagtcataagccaagtatgatcctaaactccttctaaagaaggcttccttgaagcttgcaaaagagtacatgaaccgcattgtcaacacactgaagtcagatccatttgcgaatgacgaggagctacttctgcaaggtgtccgctttgccttccgcatacatcagcttgctggtggctttgacgaaggatgcagaaaagcatttcaagaactaaaaacttatgcaagcaagtcagagtgatcagaattcaagtgcgtccaaataaagttgagatcacacatagattatatgagacacatagattattaagttttgccgaggttggctcaaaggggactccaccaaatcttgaggacaacgctcaattttataaagtttaatttatttggcgcatc

SEQ ID NO: 88551 - DNA, 304 bp, Zea mays
  unsure (1)..(304): unsure at all n locations
  Clone ID: MRT4577_180757C.1
taagcgcggaattcngctcgagctcttcggtttgatacatgaatttggaaacccaaccagtggcggggtcttattggtgctacggctgcacccctttcgtgcacctctctgtccaaagcaccatcgtctgcccccactgtcaaagcggtttcttcgaatagatccgtgccggcgccggagccgaagcctctccacgccatcgactaaatcctttccccgatgatcctcttttgctccggcgacagggcttccgccgccgtatgagagaagctttcggcaaccgctccccgttcaaccctcttat

SEQ ID NO: 88552 - DNA, 295 bp, Zea mays
  Clone ID: MRT4577_180758C.1
agcttgtctttgtacacaggtgagcacgacgatgggatccctggctaataacatcatggtcgtgggcgccgcccttgcgccgcttgtcgacggcgggtcgagcgggccccacgaggtgccgaccgcccccaacatcaccaccaactacaacgcgacgtggctcaccgccagagccacctgttacggtcagaccaaccgtgccggcgctcctgacaaccgcggtgcgtgcgggatcaacaacgtgaacctgccaccctacagaggtatgacggcgtgcggcaacgcccccatcttt

SEQ ID NO: 88553 - DNA, 189 bp, Zea mays
  Clone ID: MRT4577_180759C.1
acctggaccgtcgtcggtgttggcgtcttgcctccatgttgagggtcagcagattaacaagtataagtgtttcgtcgtcactatcacttgaatccgaatcatgttgcctacgacttggagacatttggagcaatggttttgttgtggaacaagtgctagatggaagtacctgcccgggcggccgctcga

SEQ ID NO: 88554 - DNA, 270 bp, Zea mays
  Clone ID: MRT4577_18075C.1
tttattttttttttttttttaataacaaaacccggcgtcatttaaaaaatgaggggcacaaaacaaacacatatatttccaaagttaacactatccaatgacatttaaaccaaaccgaactacaacactaacccaaattacattcatacccaaaaacgatcgatgaacacacgcccaacacacattcaacctcaaccaacccaaactaaattccctcctcaaacacaagatattccccattaacacagggcactcaaaccacgctacatc

SEQ ID NO: 88555 - DNA, 325 bp, Zea mays
  unsure (1)..(325): unsure at all n locations
  Clone ID: MRT4577_180760C.1
ggaaaattggggggccccgggctcattggtaattgaaaattggggtttaacattcgcacggggggccattaatggccccaaaaaataccttatttaacgggggagggtttggtaaaaaaaaatacctgttcctaaggggtggctcccaagtttacaatcacaaaccggttttccacgggttgccctgaaaaaaatatacactttgaattaaagttttgacccttcttgcaacgggaataaaaaaaaaaatacactccggggtttgttgggggngaatccccggggccttttttgggaggggaaaattcctagaatttgattttgg

SEQ ID NO: 88556 - DNA, 213 bp, Zea mays
  Clone ID: MRT4577_180761C.1
tgctattagtgactacaaatgggcaatgcgttgctggggctggcatggctggagccatcgatttttataaacccgtagagcttgggacactggacatgcggaacgagtccctctctctgagtgacacatctgggaggacgtgccctacactattgtccggcccatgatacttgtgatcaatgtgatcattcctgtgccacacaggcgtgacac

SEQ ID NO: 88557 - DNA, 478 bp, Zea mays
  unsure (1)..(478): unsure at all n locations
  Clone ID: MRT4577_180762C.1
cggnngaggaaaaaaaaactattggacaaattgtatttatcagaagcacgaaacacagaagagttttctttgctggcccacaaggcgggcaacctccttactttttatttagtgacggggacggaacctatttttttttgactacttctccgatgagggtactctgggggctctagcttcttagtaataccgctggggctcgtcgacgtatatatacgtatcagcgcagattgttatttaaacggtgagcctcagactctcgcaagcttaaagagggccatggactggtggatacataaagggggtgagcagcaccggctgcccgcatggttcccggggttggagacaaccccccggtggggcaggatgtcatcgacccggggtggccatttgctagagcccacaggataagcggcggcgccgtcgtgccagatttgggcctcacccttattatgctttttgggcgccttggattgct

SEQ ID NO: 88558 - DNA, 651 bp, Zea mays
  Clone ID: MRT4577_180763C.1
ggacgcctgcggtatcggtccggaattcccgggtcgacccacgcgtccgaaaagaccttcctgccttagaagaaaaaccaagaaatgtagtttttgtagatatgggacattctgcctatcaagtttctgtatgtgcatttaataaaggaaaactgaaagttttggccacagcttttgatacaacattgggaggcagaaaatttgatgaggtgttggtaaatcacttctgtgaagaatttggaaagaaatacaagctagacataaaatctaaaattcgtgctttattacgactgtctcaagagtgtgagaaactcaagaaattgatgagtgcgaatgcttcagacctccctttgagcattgagtgttttatgaatgatattgatgtgtccggaactatgaatagaggcaaatttttggagatgtgtgatgatctcctagcaagagtggagccgccacttcgaagcgtcttggagcaatccaagttaaagaaagaagatatttatgcagtggagatagttggtggtgccacacgaatccctgcagtgaaagagaagatcagcaagttttttggtaaagaactcagcacaacattaaatgcagatgaagctgtcactcgaggctgtgctctgcagtgtgcaattttatcacctg

SEQ ID NO: 88559 - DNA, 513 bp, Zea mays
  Clone ID: MRT4577_180764C.1
gttggacgggacaacctggatcccctggctaggattcgggggcccgggcacacaacagacgcaaggacaaaccctagacgagaagatgatcagaaggaccgacgaacaggaggaggacccagagactggagccccaccaccaagtcaagacttagctaggactccactttgtaaccacctccaccacgaataagagacctgggagcctctcctccctctatcgcctgcttgtaacctgcactacgagttttgatcattaatggtgtcggtagtgcaagtcgtcaatggctggaagtagggatattctgctcgaaccagtataaatcttgcgcctaccgtgcacaccgtccgaagcctgaaacgcacacaacaaatgtatttgtcggagcaagattcgaaacaccgatattattatttatcttttttttgcatcgtgctaggtaagatttaacttagaggctctcttagtggactcaagtttgaaatatgaagacatcatgtattttcatcctt

SEQ ID NO: 88560 - DNA, 284 bp, Zea mays
  Clone ID: MRT4577_180765C.1
cggctcgagcaccgagtaagcgtggatcacccaaaattataagaatgttttattttgatggcatgaattctcggtgttactctgcataattttgcttctcctgggcttccagaagcgtttcgaatgctttttctttttatgcattattgattcccttcccggcattcgtcatgtgtaacgatcaagacttgtttctttttcttctcctttgaatgttctgactattatcctatataaactatatggccgtatatcaaagtgatcaatgaaaacgttatcaggtt

SEQ ID NO: 88561 - DNA, 235 bp, Zea mays
  unsure (1)..(235): unsure at all n locations
  Clone ID: MRT4577_180766C.1
ggnttggaagaaaaatgaataatttttttgnagtnattattttanatttatagnganatgatggtatataatggttacggggggtagtttttnttagtaggtnaaaatgtanataaggggttgtttggttattnggattagatatgaattggatatgagtggaaaaaaataagaagtttgatttggttggaatttaattatatttaatgagagttaatgtagatggattgagagt

SEQ ID NO: 88562 - DNA, 178 bp, Zea mays
  Clone ID: MRT4577_180767C.1
caaaacttgaggagcatcagcacatctgagatggactgggcttgggcagctaatcggttaatcgagaaggatgaagcagaaacttcagacgatacttctttgcattatttaccgcggaagaggctaattttgacaacccagttgattcagcaacttctcccttctataccagcaacca

SEQ ID NO: 88563 - DNA, 567 bp, Zea mays
  Clone ID: MRT4577_180768C.1
ataaaaaaaaaaaaaaaaaaaaaaaaaaaaaaaaaaaaaaaaaaaaaaaaaaaaaaaaaaaaaaaattaaaaaaaaaaaaaaaaaaaaaaaaaaaaaaaaaaaaaaaaaaaaaaaaaaaaaaaaaaaaaagttttttcctttgggccgaaaccaccttaggggcaatttttgaaaatttccttaaaattgggggccgtttaaccttttttttaaggggccaatttccccttttagggggtgtttttaaaattaattggccgggttttaaaaacttgtgaattggaaaaaccttgggtttcccaaatttaatccctttgaaaaaaatcccttttttccaagttgggtaaaaaccaaaaaggccccccccaatcgcctttccaaaaatttgcccaccctaattggaaaatggcccccccttttaccggccatttaaccccggggggtggggggtttcccccaaggggaacctttaattttgcaagccccttaacccccgttcttttggtttttttcctttcttttttccccactttcgcgggttttccccgtaaattttaaaatggggg

SEQ ID NO: 88564 - DNA, 2556 bp, Zea mays
  Clone ID: MRT4577_180769C.1
cccacgcgtcctttaacctcgaacctggcatggcagatggcacccaccaggccaccacctccgccgacagcgagcacggccaccagcatcacccctgccatactcgctttgaccccggccccgggcgcctagttaatctctgatttctctctgcctgcccagaatcccgccagttgccttccacttccgccagactccgcgttcctcctgagcagctgccgccggcccgagagtgagggggaggcaggcgcccaggcggccaatgggacggggagcgcgacggcggcgcaggccctggcgctcgccgccttgctcctcgcctgtccggcgtcgccgtcgtcacggcgcaggacatcagcagcagtactgaaaactggttatgcagagatcccacgaccgcccgcggatcccaggaagtgccggcgacgtgctggaggacgacccgtcgggcggctccaggtgtacgtgtaccagctgccccccaagtacgacaaggacctgctggcgaaggactcgcggtgcctgagccgcatgttccccccggagatcgtcatgcacggcttcccgccggccagcgcggtccggaccctgaacccggacgaggcggactggttctacaccccggtctacaccacgtgcgacctcacgccgtggggccatcccctcaccgtcaagtccccgcggatggtgacgagcgccatcgggtaccactccacgccctcgccctactggaacacgaccgagggggccgagaccctggggggatcgcctgcggcctcattagaccagaccagacagggagagggttgaggggggaggagaggagagacacagacaacgggtggtcgctgggaagaggaagaagaggcccgcggggaagcggagggatccagaagaagatgaggcagtgggtcctggccgtcgccattctcgccgctgcttcggcggcggcgctcctcctcggggccgaggcccagcagcagggccaccagacagagaggatctcaggaagcgccggcgacgtgctggaagacaaccccgtcgggaggctgaaggtgtacgtgtacgacctccccagcaagtacaacaagaagctgctgaagaaggaccccaggtgcctgaaccacatgttcgccgcggagatcttcatgcaccggttcctgctgtcgagcgccgtccggaccttcaaccccgaggaggcggactggttctacacgcccgtgtacaccacctgcgacctgaccccgtccggcctcccgctccccttcaagtccccccggatgatgcgcagcgccatcgagctcgtcgccaccaactggccgtactggaacaggtcggagggcgccgaccacttcttcgtcacgccacatgactttggcgcttgcttccattatcaggaagagaaagcgatcggacgcgggatccttcccttgctccagcgtgccacgctggtccagaccttcggacagaagaaccatgtctgcctcaaggacgggtccatcacaatcccgccgttcgcgcctccccagaagatgcaggctcaccttatccctgcggacaccccgcgctccatcttcgtctacttccgcggtctgttctacgacaccagcaacgatcccgagggcggttactacgcgaggggcgcacgcgcgtcggtctgggagaacttcaaggacaacccgctgttcgacatctcgacggaccacccggcgacgtactacgaggacatgcagcgctccatcttctgcctgtgcccgctggggtgggcgccgtggagcccgcggctggtggaggcggtggtgttcggctgcatccccgtgatcgtcgccgacgacatcgtgctgcccttcgcggacgccatcccgtgggaggacatcggcgtgttcgtcgcggaggaggacgtccccagcctcgacaccatcctcacgtccatccccaccgacgtcgtcctgcggaagcagcgcctcctcgccaacccgtccatgaagcaggccatgctgttcccgcagcccgcccaggcgggagacgcgttccaccagatcctcaacggcctcgcgcgcaagctcccgcacggggacggcgtcttcctcaagcccggggacgagagggtcctcaactggaccgcaggaccgcctggcgacctcaagccttggtagcatcgtacgttcgtgcgccctataagttaccatggctgcatgcatatacactgctgacaacaagccaattaagtgtacatttttttggtatcttctttcttccttccttccttatatatagctgcaataccgtatacgttcatctctctctctatctccttatatatagatgatgagaaccatgtggataccgtagtcgaaatctacaacagtttacttattcgtatcgctttgaatgtctggatttgattggcattggcatcgatggatgttggatcacacattagtttttttagcgcgcggcccggtgttctcctgcagattttacttgaaatgaaaataacgagctaaacattgcacatgctgcactgcggggtggatctgataagcaagaaaaacg

SEQ ID NO: 88565 - DNA, 453 bp, Zea mays
  unsure (1)..(453): unsure at all n locations
  Clone ID: MRT4577_18076C.1
tttttttttttttnnnnnnnntttttttttttttttttttttttttaaaagcagtcggagccggagccgtttttaaaggaaccggagccctggcgaacagggccatagtctttggctcatttatctttaacctcttaaaacgggacaacgtgtcactccaggcactatttgacttataaaaaaaagttcggtttttatctgtttacttggggaaggacaaaagggggcttctgtaggaaaaaaataaaagttacccgagctaatcctccctaatgtacaaattcacgacatcgtaggacgttcatcaaaaattaacaagaggggtctaataaaggaggacccgaggtatgtgatgccggcttacggaaagcatgaacggggtgtcaaggacggggcggggggggcaaatgaggcaggcgagcttgccgttgtggagcttcttgaaggaatcag

SEQ ID NO: 88566 - DNA, 436 bp, Zea mays
  Clone ID: MRT4577_180770C.1
cttaaaacatcacacccgagactatcctaatgactacaatctagtcactggcttcaagctgcctaacaatcaacaaattagtgcaatctcgcatacatctcatccttgttacatctaactcctgacaaactattgaactgcaactacaacaacaacaacaatttctgccatcactgaaccaccataccgcttacaaccctgtcacctacttgcaacagcagttgtttgcatccaaccaacttgctctactgaacgtagctgcataccatcaacaacaacaactgcaacagtttatgccaactgctcagtcaactagccatggcgaaccctgccatctacctacaactactttatctacccctcgcggtgtgcaatgcacctacctacctacaacaacagttgctgcaacaaattgtaccagctctgactcacctag

SEQ ID NO: 88567 - DNA, 941 bp, Zea mays
  Clone ID: MRT4577_180771C.1
attgggtacctcgaggccggccgggaccccggccgggtttccggccgggaaaggtgtgcgggaaaagattagatgaaggcaggaggaagaggggagatgcatccatcatgcgtgcgtactcctatttagcaaacactaccatacagcaaaaaaagaagcatcagccgcagggactgcctccctagtcccctaccctcgctttctttctcgctcacccctttcttcccgtcccgaagctgtctgtcctgctcctgcgcgcgttggaaagccaccgctcaccttctcgctcgctcccccaccgaacgcctcttggtgggagaagaattggccgaaaagcttcgcgttggctggccgggatctctccgtctttaattaccggacccctggggggattccctgctgcctcattagaccagaccagacagggagacagggagagggttggggagggaggagaggagagacacaaacaacgggtggtcgctgggaagaggaagaagaggcccgcggggaagcggagggatccagaagaagatgaggcagtgggtcctggccgtcgccattctcgccgctgcttcggcggcggcgctcctcctcggggccgaggcccagcagcagggccaccagacagagaggatctcaggaagcgccggcgacgtgctggaagacaaccccgtcgggaggctaaaggtgtacgtgtacgacctccccagcaagtacaacaagaagctgctgaagaaggaccccaggtgcctgagccacatgttcgccgcggagatcttcatgcaccggttcctgctgtcgagcgccgtccggaccttcaaccccgaaggagggggactggttctacacgcccgtgtacaccacctgcgacctgaccccgttcggcctccgctcccttcaagtccccccggatgatgcgcagcgccatcgagctcgtc

SEQ ID NO: 88568 - DNA, 842 bp, Zea mays
  Clone ID: MRT4577_180772C.1
ccggccaaattccatccaatgccaatgccaatatagtacatgtttatttatatatatgccatggttggtggatggtcatgcatgcaggggcgctcgcgcgtcggtgtgggagaacttcaaggacaacccgctgttcgacatctcgacggagcacccgtcgacgtactacgaggacatgcagcgcgccatcttctgctgtgcccgctggggtgggcgccctggagcccccggctggtggaggcggtggtgttcgggtgcatccccgtcatcatcgccgacgacatcgtgctgccgttcgcggacgccatcccctgggaggacatcggcgtgttcgtggcggagcgggacgtccccaggctcgacaccatcctcacgtccatccccaccgacgtcgtcctgcggaagcagcgcctcctcgccaacccgtccatgaagcaggccatgctgttcccgcagcccgcccaggcgggggacgcgttccaccagatcctcaacggcctcgcgcgcaagctcccgcacggggacggcgtcttcctcaagcccggggacgagagggtcctcaactggaccgctggaccgcccggcgacctcaagccttggtagcatcgtacgttcgggcaccctataagttaccatggctgcatgcatatacactgctgacaacaagccaattaagtgtacatttttttggtatcttctttcttcctctcccttccttatatatagctgctataccgtatacgttcatctctctctctctctctctctctctctctccttatatatagatgatgagaaccttgtggataccgtagtcgaaatctacaacagtttacttactc

SEQ ID NO: 88569 - DNA, 1200 bp, Zea mays
  Clone ID: MRT4577_180773C.1
acaccgatttattgcctcagagcattgtttacaatttacaagcctgagggatagaggaaatggaagattgtattagtataaatctagatcaaacacaccacatattcaatctgggaatgaataaatcaaacctacatgcacaagaatcaacctccattcttctttcacaacttttataccttggcatagtgctagactaatcctcgtctaccacaggaaagaccgtgcttgtaatcatgcgctgcatgacagcgacctaccataatattcatgttttttagaagacttaataccagcagaaggaaccttagatgaaataaatggcgtttctctgagggccaagcattctagaggaagatacatcaaccataggctttgcaacttcctcatacacagttttttgtgaagcactttcactgaagacctcatcaaatttataggactcgcagatccaattatatttcttcagttcaggcttttggactctggttgcaaccaatgttttaaatcaccggagatcgctgccgctatcgccggagatcgcttctggcaaacaatgccgctaggagattacaattctgccgctattgcttgctgaccgctattagccgctattagccggcgaaatccgttaaatgggccatcttctagcggcagctaaatcaaacctgggccattttcttgcgcgcgtccgacccagcccattatctccctctgccttttcttgtgcaaaactgcaaaccctagctcagactctcatttccaaaaggcacttgcggctggcttcaacctgatggcggcggctagcttcaacagttcaagttcaacacgttggttccctttagagaagatgaccagttggtgaccaccgccaccgcacgcctagggactccatcgctactacgaggcacgaggagcggaggggaagccggggcacgtcgagacgtagccgtccccaccatgccatcgtgctagaagccaaggcaggagaccgtcacgaggatggctaggtgcaccagcagcgactgctcctgggcagcactgcggcggaggatcacgaagagggataacgaggaggcgcgacgggagaggagcctctatacaacggcagcgactatggtggcaaaaccctagcggggagggtggggagtgtgcagcgggatgagacgcgaatcccggccggcctcgaggtacccaatg

SEQ ID NO: 88570 - DNA, 894 bp, Zea mays
  unsure (1)..(894): unsure at all n locations
  Clone ID: MRT4577_180774C.1
gccagcccgcacaggttgcaggcgcacctcgtggaccncggcacgccgcgctccatcttcgtctacttccgcggcctcttctacgacatgggcaacgacccagaagggcggctactacgcgaggcaagtcggctcgggtgcattccaatttccaactacgacatggtgtgatggtggtggggtggctgatggatcatgcattgcaatgcatgcaggggcgctcgcgcgtcggtgtgggagaacttcaaggacaacccgctgttcgcatctcgacggagcacccggcgacgtactacgaggacatgcagcgcgccatcttctgcctgtgcccgctggggtgggcgccgtggagcccgcggctggtggaggcggtggtgttcgggtgcatccccgtgatcatcgcggacgacatcgtgctgccgttcgcggacgccatcccctgggaggaccatgagcgtgttcgtggcggagcgggacgtgccgcgcctcgactccatcctcacctccatcccgctgcccgacatcctgctgaggcagcgcctgctggcgagggactccgtcaagcgggcgctgctgttccaccagcccgccaggcccggggacgccttccaccaggtgctcaacgggctggcgcgcaagctgccgcacggcgaggacgtgttcctgcagcccggggagaaggcgctcgactgggacgccggactcgagagcgacctcaagccctggtagtgggccagtacctagcggttgacttcttcatgttccttctttcttttgttctctttcatttgacatgacatcgatggatggatggatcacgcattagtttttgtaccacggcccgtttacatgcagcagcaatatactcccatatagtgtattttccctgctaaa

SEQ ID NO: 88571 - DNA, 520 bp, Zea mays
  unsure (1)..(520): unsure at all n locations
  Clone ID: MRT4577_180775C.1
ccggccggggacgactccaaaaaaccaccctcacgagactcgacttcccgtgccaaaaccgccaatatgagaccgactcagatgctccgaagcggcgctgccgaccccaagaacggacactacattggtaactggggccactttggtggtgagaagcagcgaggtatcatcacctacggtctgtccgccaaccgacagaacccctgggctggctccttcaacgacgccatcttcaacactttccgccgcaccaagggccaaatcttcttctggctccctcccatggttgccggttactggatgatgagctgggccatcgagcgaagcgagtaccttaactccaaggctggtcgtgccgagttcggtgacgaggaggagtaaattggttagatactggcagcaaaaccacggcggatgtttttggggtaggtcctctggactcattgtacatcatcaatacctnagatcaggaggtgcaatagacatttgtcacaaaaaaaaaaaaaaaaaacccgcggcc

SEQ ID NO: 88572 - DNA, 1965 bp, Zea mays
  Clone ID: MRT4577_180776C.1
ggacccgtacacaccgcacccggactcggtcggtccgtcggccgctcccgcttgcctgtctgcgtcacgccatccgccgcgtgcaggccatgtagtaaactgtaaaaagcaacaaggaaccccttccgcccgctccttttccctttcttgctccctccgccgccctgctggctgccgtcagtgctgcgtctgcgtgcgagcggagcgcatcagcagcagctcccgaattctccgccattggctcgccaccgccgcgcccttgactagctcgcctcgtctcgtctcgtctcgtccctaatctctctctctcccgaggatcaggaccgtgcgtgccatcgggtcctgagtcctgacggcgacagcctaccgcacacgcagcgcagcggcagccgagaaacaaacaggggaggggaggaggagagcagaggacgggcgctcaagcaagcaaagcgagcgagtaaccagcagctcctcagtcagcggcaagagggatcagggcgcttcccctgccagctttggtcagctctcgggcgcctgcggcagcagcccaatgaggccgctcgtcgccgctgtcctgctcgtcaccatctgcgtcgtggcggcggcgccgctacagcggcatcacaagcccggcaggacctcagggaacgcggtgggcgtgctggacgacgaccccgtggggaagctgaaggtgttcgtgtacgagatgccgcgcaagtacaacaagatgctggtggacaaggacagccggtgcctgcagcacatgttcgcggcggagatcttcatgcaccagttcctgctgtcgagcgcggtgcggacgctggacccggaggcggccgactggttctacacgcccgtgtacacgacgtgcgacctgacgccgcaggggttcccgctgccgttccgggcgccgcggatgatgcggagcgccatccggtacgtggcggcgacgtggccgttctggaaccggacggacggcgccgaccacttcttcctgaccccgcacgacttcggcgcgtgcttccactaccaggaggagcgcgccgtggagcggggcatcctgccgctgctccggcgcgcgacgctggtgcagacgttcgggcagcggaaccacgtgtgcctgcaggacgggtccatcaccgtgccgccctacgccagcccgcacaggttgcaggcgcacctcgtgggacccggcacgccgcgctccatcttcgtctacttccgcggcctcttctacgacatgggcaacgacccagaaggcggctactacgcgaggggcgctcgcgcgtcggtgtgggagaacttcaaggacaacccgctgttcgacatctcgacggagcacccggcgacgtactacgaggacatgcagcgcgccatcttctgcctgtgcccgctggggtgggcgccgtggagcccgcggctggtggaggcggtggtgttcgggtgcatccccgtgatcatcgcggacgacatcgtgctgccgttcgcggacgccatcccctgggaggacatgagcgtgttcgtggcggagcgggacgtgccgcgcctcgactccatcctcacctccatcccgctgcccgacatcctgcggaggcagcgcctgctggcgagggactccgtcaagcgggcgctgctgttccaccagcccgccaggcccggggacgccttccaccaggtgctcaacgggctggcgcgcaagctgccgcacggcgagggcgtgttcctgcagcccggggagaaggcgctcgactgggacgccggactcgagagcgacctcaagccgtggtagtgggccagtacctagcggttgacttcttcatgttccttctttcttttattctctgatttgattggcattggcatcgatggatggatgtatcacacattagtttttgtatactacggcccgtttacatgcagaagcgctatactgtatactcgaaaaaaaaaaaaaaaaaagcggcc

SEQ ID NO: 88573 - DNA, 170 bp, Zea mays
  Clone ID: MRT4577_180777C.1
ggagtttcagaaggccgtggagctccagccaggctatgtgacagcttggaacaacctgggtgacgcatatgagcagcagtaggtactgacatcggctctcaaggccttcgaggaggtcctctctttgatccaacaataaggttgcaaggcacgcgtggatgacctcaggc

SEQ ID NO: 88574 - DNA, 1682 bp, Zea mays
  unsure (1)..(1682): unsure at all n locations
  Clone ID: MRT4577_180778C.1
aaaggggtcatcttgaaaacaaacgcagggaacgggaacctggcacggcagatggcacccaccaggccaccacctccgccgacagcgagcacggccaccagcatcacccctgccctatactcgctttgaccccggccccgggcgcctagtctattctctgatttctctctgcctgccaagaatcccgccagttgccttccacttccgccagactccgcgttcctcctgactcctgagcagctgccgcctgcccgagagtggagggggaggcaggcgcccaggccaatgggtgggacggggagcgcgacggcggcgcaggccctggcgctcgccgccttgctcctcgcctgctccggcgtcgccgtcgtcacggcgcaggacatcgagcggatccaaggaagtgccggcgacgtgctggaggacgaccccgtcgggcggctcaaggtgtacgtgtacgagctgccccccaagtacaacaagaacgtggtggcgaaggactcgcggtgcctgagccacatgttcgccacggagatcttcatgcaccgcttcctgctggcgagcgcggtccggaccctgaacccggacgaggcggactggttctacaccccggtctacaccacgtgcgacctcacgccgtggggccatcccctcaccgtcaagtccccgcggatgatgaggagcgccatccagtacgtctccaagcgctggccctactggaacaggacggagggggccgaccatttcttcgtcactccacatgactttggagcgtgcttctacttccaggaagagaaggccatccagcgaggtgtcctcccggtgctgcgccgcgctacgctggtccagacgtttgggcagaagaaccatgtctgcctcagggaaggctccatcaccatcccgccatacgctccgcctcacaagataagagctcatatcgtcccgccagagacgcctcggtcgatcttcgtctacttccgcggcctgttctacgacaccgcgaacgaccncgagggtggttactatgcaaggggcgctcgtgcgtcggtgtgggagaacttcaaggacaacccgctgttcgacatctcgacggagcacccgtcgacgtactacgaggacatgcagcgcgccatcttctgcctgtgcccgctggggtgggcgccctggagcccccggctggtggagacggtggtgttcgggtgcatccccgtcatcatcgccgacgacatcgtgctgccgttcgcggacgccatcccctgggaggacatcagcgtgttcgtggcggagcgggacgtgccgcgcctcgactccatcctcacctccatcccgctgcccgacatcctgcggaggcagcgcctgctggcgcgggactccgtcaagcaggcgctgctgttccaccagcccgccaggcccggggacgccttccaccaggtgctcaacgggctggcgcggaagctgccgcacggcgagggcgtgttcctgcagcccggggagaaggcgctcgactgggacgccggactccagagcgacctcaagccctggtagtggactggactcgttgtacatctcttcgtgttcctttgtactctttcatttgacatgacatcgatggatggatggatcacgcattagtttttgtaccacggcccgtttacatgcagcagcaatatactaatatatagtgt

SEQ ID NO: 88575 - DNA, 818 bp, Zea mays
  Clone ID: MRT4577_180779C.1
ccggccggggtgcgggaaaagattagatgaaggcaggaggaagaggggagatgcatccatcatgcgtgcgtactcctatttagcaaacactaccatacagcaaaaaaagaagcatcagccgcggggactgcctccctagtcccctaccctcgctttctttctcgctcacccctttcttcccgtcccgaagctgtctgtcctgctcctgcgcgcgttggaaagccaccgctcaccttctcgctcgctcccccaccgaacgcctcttggtgggagaagaattggccgaaaagcttcgcgttggctggccgggatctcctcgtctttaattaccggacccctagggggattgcctgcggcctcattagaccagaccagacagggagagggtttgggggaggagaggagaggagaggagaggagaggagaggagagacactgagaagaggaagaagaggcccgcggggagcggagggatccagaggaagatgaggcggtgggtcctggccgtcgccattctcgccgctgcttcggcggcggcgctcctcctcggggccgaggcccagcagcagggccaccagacagagaggatctcaggaagcgccggcgacgtgctggaagacaaccccgtcgggaggctcaaggtgtacgtgtacgacctccccagcaagtacaacaagaagctgctgaagaaggaccccaggtgcctgaaccacatgttcgccgcggagatcttcatgcaccggttcctgctgtcgagcgccgcccggacgttcaaccccgaggaggcggactggttctacacgcccgtttacaccacc

SEQ ID NO: 88576 - DNA, 546 bp, Zea mays
  Clone ID: MRT4577_18077C.1
ccatacgattatgatatatatgaaagttccaaacacggcaatgcggcgctcatatcttactgccgagacagtggtttagcagcggcctaacccaacaaccagctaacaataagcactacctgatatagtaatactgcgaaactaaccacgttatccagaatactctcgatttcttgaccgcgacccaagacttttgccacggacaccaacgggggtagcgcctctcaggcgccgaatccttagagggagcacaccctggcgcttgagggcatacacgacgtccatgggggagacggctttgctgcgggcgtgctccttgtaagttacagggttcaggatgacattctagaggaagatcttgagcacgcacgtgggtctacttgtaaatgaaccacgagatgcacttcactgccgcccctccttgccagcctacggatcgccggctaagacatgccctggatgttatatcggaaaaccttgcagggactcttgccgccgactttgcccaaacacttgctgcacttgtcacgcccggacatggtaatt

SEQ ID NO: 88577 - DNA, 533 bp, Zea mays
  Clone ID: MRT4577_180780C.1
ggtttttttttttttttttttttttttttttttttttttttttttttttttttttttttttttttttttttttttttttttttttttttttttaagccaaatccccgtcttagggggccccccataaatggggcttacacaacaaagccgggattgaaggggatttttaaaccgccccgatgcaggggcgggaaaattctggggggggggctacacaagggggccccgggccctggattgcccaacaacaaggttggggccccaaacctggaaaaaaaaggcccggggggcaaggcaccatttccccttgacgagttccccgggtttaaaattttcctgaccccaaccggggggaaccccccctaaattttggcgagcttgtttgccttcccccccggtttagccttggcaatggcgtccctggcagccgtccgggtgtccaacttgccgtcgtgcttttcgggtttccgggggggccccccttccaagttccccccccgggggttgaatcccgggggcccaaccctttttat

SEQ ID NO: 88578 - DNA, 406 bp, Zea mays
  Clone ID: MRT4577_180781C.1
agagcatcatattgttcactcacgattcgtactgaagcatcaaaacagaaacctaaagctagacataatatgataataaagaactaaataaaattaagggttcagaacgaggttgttactcagcattaatcaaataaatgaagcccttggctggagttccaaactaaactactgcatcttgttttcctttatcatgcccgtacttgcttccttcttttattcataccattgattttatttagttcttaatcattatattattgatagatttatgtttatctattcttttctatattcctttattgttttctttttcattttgatctcttttttttcttttattgtgtttcttatttttttttattttcttacttattattgttatttatttttttctttccttttt

SEQ ID NO: 88579 - DNA, 161 bp, Zea mays
  Clone ID: MRT4577_180782C.1
cgcaaacccccaccagagagacgagtctacgaatcagtcggaggaagatggacctctccgaccgctccccccagatgctgctcgccagcttcctctacggatcctcgagccactgtttcgctgccacaggagacgccgcagcgcttccaggctcgtccccg

SEQ ID NO: 88580 - DNA, 136 bp, Zea mays
  Clone ID: MRT4577_180783C.1
tttcctgatggacttcatccccaacacggcggctctctaggactgagagggccgcctccacaaggagaccatcgaaatgctagcggcactcaccatggccgatctcccggacggacagcgccagactgaggtcttc

SEQ ID NO: 88581 - DNA, 176 bp, Zea mays
  Clone ID: MRT4577_180784C.1
ttttctttttttttttttttttttttttttttttttttttttttttttttttttttcccatcaggagacagggcacataactggaatactgttttagcaaacaagtatcactggggatgggttttgcgcctatgcctgattacaacaattgccatccgatgctgggaggggggggg

SEQ ID NO: 88582 - DNA, 802 bp, Zea mays
  Clone ID: MRT4577_180785C.1
gcctctacagttcgacccagggacctgccggccaggcgctgtacggcgacggcgagtactacttcttcagcccgcgggaccgcaagtaccccaacggcatccgccccaaccgcgccgccggctccggctactggaaggccaccggcaccgacaagcccatccacgacgccgccaccggcgagggcgtcggcgtcaagaaggcgctcgtcttctacaagggccgcccgcccaggggctccaagaccaactggatcatgcacgagtaccgcctcgccgccgtcgccggctccaccagccccctcgccgcctaccgcccgccctccaagttcaggaacgcctccatgagggtaagtcgatcgacctcgatcatccctgaatcatatccattgcatgacctgtacatatgttcttcccattatctatcctatccatggtgtcatgttgagctgagctggtgatcacacgcatgcacgggccgctttcatctgattcgttcgtaacgaccgcaacaatattcgtgggtcacgccggtcgcatgcacgccacgcccgcccggcggtgtgcagtgtgcggcggcatgtcgctcgttcgtcgtgcaccgccagccgccgttggtttggctgcttttccatatcgatgaccaaactgccctcaccggccgaattcgtcgttctccaaaagcgccgtagctagagctagccatgcatcaatcagccgccaaaccagcagcgcgtcacatctaccggcactagctagcatcgcctcgcatcgcatcgccgtggaggtgaatggcagcttaccg

SEQ ID NO: 88583 - DNA, 357 bp, Zea mays
  Clone ID: MRT4577_180786C.1
aacacaaaaaggcaaggcaacgcacccgagaaaaaaaacccgcacaaaaaacccaaaccccccggaaaaaatgggcttacaaaaaatcctaaaagccccagggggggcaataagggaggaaaaccccccaataaaaagggccccggttttggggggggggttcccaggactcccccaaaaccgccccctacaagacattacccccgggaggaaacgggggggcacccaaaggggacagggcaaagaccaggtggggggcctgatttttaacctcaattaaaagaaaaaaacggggacaggccccaaatgggccataaggaccttgacgaacccctggaattgatctggcccgcccca

SEQ ID NO: 88584 - DNA, 542 bp, Zea mays
  Clone ID: MRT4577_180787C.1
ataaaaaaaaaaaaaaaaaaaaaaaaaaaaaaaaaaaaaaaaaaaaaaaaaaaaaaaaaaaaaaacttaaacctaagaacgaaaccacactaaagggcaaaattctgaaaatatccataacaactgacggccagataaaacatacattttgggggcccggggggccccctcttggggggtttttctgttaattgcctccccctttggcggcctttggaccttgttttacgggggccctttccccctttttggggttggtttacaatccccttgccccggtttttccaatggcgaagaggggaaaaccctggcgccctcccccacttttttgccccttcctgaatggccctttttccccccttggggcgacccattaagggccccccctgtggcgctttcccacagtgtgcccgctccatttgccaagggcctcccccctgttcctttccttttattcccttggtttttgggctccccccccggtttcccccttcattttctaaacccttggccccctttctgtttcctttttaccgtttttt

SEQ ID NO: 88585 - DNA, 104 bp, Zea mays
  Clone ID: MRT4577_180788C.1
tttgggtgttcttacacacacggcgtggacaccctgccaacatattaacgtaggttacttaattgacaccttggggagcacgtttgtgaaacaaccacctgctt

SEQ ID NO: 88586 - DNA, 344 bp, Zea mays
  Clone ID: MRT4577_18078C.1
ctcttccttccgatacccctagcaccaactcgacggggatagcagggacggcatcgaccgggggtgtttgaaagaacaagacgatctccaaaggaaacaagggctgcaagaaaaagaccgtccaccctttatctaacaaggattggtatgacataaacgctccgtccgtgttcagtgtgcgctacatctggaagactctcgtatccagcacacagggcaccagcattgcttctgtgggtctgaagcacacattctttgaggtttgcctatctgatcttaagagcgacgaggatcaagcttacacgaaaatcacgcttcctgctgaatatgtgcaaggcaagaat

SEQ ID NO: 88587 - DNA, 606 bp, Zea mays
  unsure (1)..(606): unsure at all n locations
  Clone ID: MRT4577_180790C.1
ttctgatcgcgagcgccgccctttttttttttttttttttttatacaaaatgtattattatttttgtggtttcagcgtcaacatcaatccaattctttttcagtggtcaacacacaagcacaaatggcaaaacccaatccttgtttggagcaacaccctatagttggaagtccaaagcttctaaaatgaaggaaagtaatgagagagagagagaaaaaacaaatggtcaaaggcactgcacattgtggatagcagaatggggtgagcattaggtttttttttttgaaattttagaaggcctaatactcccgtgtggacagtggacccagacgacatcttgaaaatcgcagttcagtcttcaccgcctgcaaacncatcaagaactccacaaaagctncaccccggtgctgngggacctcccgaacgagcggcaaccctgcgtgngccgtggcgccccccatggagaacatgaactgtgctntgtgcttcattcccngctttgngcccgtntcaaaggactgaagttcctcccctctccgtgaacggtttccttcgtccgcagagccagcaagttctttngtttgttgccaatggttgtcggcaata

SEQ ID NO: 88588 - DNA, 465 bp, Zea mays
  unsure (1)..(465): unsure at all n locations
  Clone ID: MRT4577_180791C.1
ggcacgagaaagaatnncaagcgcttgaaagagctggatgctagtggtgcagagccatataagatcgattcaacccgggcctcaattagggcactgctcaccagaatcaacatttccatcagatcagctaaagttatttctaggaggatccacatactacgagacgatgagttacacccacaccttgttgcgcttatccaagggtttgttagaatgtggaagttcattcttgagtgccaccggaagcaattccataccatacttgaaactaaatctcacattctgatccctaagaatggaccggaaagaagctcgtccaaggttacactggaactagaaatggagctcctgaactggtgttcctgtttcaggaactggatcctgtcccaaaaggcttatatcgaagctctcaacgggtngctagtgaaatnggcttccccaggnaaangaggagactccggacgg

SEQ ID NO: 88589 - DNA, 721 bp, Zea mays
  unsure (1)..(721): unsure at all n locations
  Clone ID: MRT4577_180792C.1
aacgggtggaagactattgccctttcagttgccggccggggcccgggcacacaaagaagctccataattaattattgccctttcagttcgccatcggcagccgagcaccatgagctccacaggcggcgacgatggcgccaagaagtcttggccggaagtggtcgggctcagcctggaagaagccaagagggtgatcctgtgcgacaagcccgacgccgacatcgtcgtgctgcccgtcggcacgccggtgaccatggatttccgccccaaccgcgttcgcatcttcgtcgacaccgtcgcggaggcaccccacatcggctgagaatcaaatctataaaatgaataactcggacatgtcatgcgtgcatgtccgtcgccgaataatggatgtgtgtgcttcgttccaataaattgctagtaaaaataatggcatcgtcggtatgcatgaataaaatgtatcagaatgttcatcctttcacgattggatatatgaaaatgtgctcagttgtttggtttccaaaaaaaaaaaaaaaaaaaaccccaaaaaaaaaaaaaaaaaaaaaaaaaaaaaaaaaaaaaaaaaaaaaaaaaaaaaagccctcggggggggaaaaaaaacaaatttcgccttatgggggggcgatttaccccccatcattccccttaagtggggaacgtggggatgggaaannnnnnnnnnnnnnnnnnnnnnnnnnnnnnn

SEQ ID NO: 88590 - DNA, 328 bp, Zea mays
  Clone ID: MRT4577_180793C.1
cccgatcgacaccatgagggtgttgctcgttgccctcgctgtcctggctctcgctgcgagcgccacctgcacgcatacaagcgggggctgcggctgccagccaccgccgccggttcatctaccgccgccggtgcatctgccacctacggctcacctgccacctacggcgcatctgccaccgccggtccacctgccgacgccggtccacctgtcaccgccgatccatgtgcacgacgccggttcatctgccgccgacccatgccactaccatacttaaccgtcccggacttagatctatacgcagtcacacgcatgcccgtgccaacag

SEQ ID NO: 88591 - DNA, 572 bp, Zea mays
  Clone ID: MRT4577_180794C.1
gcggcggccggtggggggaaagaagctccataattaattattgccctttcagttcgccatcggcagccgaccagcatgagctccacaggcggcgacgatggcgccaagaagtcttggccggaagtggtcgggctcagcctggaagaagccaagagggtgatcctgtgcgacaagcccgacgccgacatcgtcgtgctgcccgtcggcacgccggtgaccatggatttccgccccaaccgcgtccgcatcttcgtcgacaccgtcgcggaggcaccccacatcggctgaggtttaaatctacaaaatgaataactcggacatgccatgcgtacctgtccgtcgccgaataatggatgtgtgtgtgtgcttcgatcgttcctataaattgctagtaaaaataatggcatcgtcgttatgcatgaataaaaagtatcagaataatgttcaccctttcacgattggatatatgaaaatgtgctcagttgtttggtttcccaaaaaaaaaaaaaaaaaaggcccctagggcctctgagcctggtgggtggccccgggccccattttggcctatgggg

SEQ ID NO: 88592 - DNA, 519 bp, Zea mays
  Clone ID: MRT4577_180795C.1
gctccataattaattattgccctttcagttcgccatcggcagccgagcaccatgagctccacaggcggcggcgacgatggcgccaagaagtcttggccggaagtggtcgggctcagcctggaagaagccaagagggtgatcctgtgcgacaagcccgacgccgacatcgtcgtgctgcccgtcggcacgccggtgaccatggatttccgccccaaccgcgtccgcatcttcgtcgacaccgtcgcggaggcaccccacatcggctgaggtttaaatctacaaaatgaatagctcgatcggacatgccatgcgtacctgtatccgtcgccgaataatggatgtgtgtgtgcttcgttccaataaattgctagtaaaaataatggcatcgtcggtatgcatgaataaaatgtatcagaatgttcatcctttcacgattggacatatgaacaaaaaaaaaaaaaaaaaaaaaaaaaaaaaaaaaaaaaaaaaaaaaaaaaaaaaactcgagggggggacccg

SEQ ID NO: 88593 - DNA, 212 bp, Zea mays
  Clone ID: MRT4577_180796C.1
gtcttacaactgcagcaattgcagccattcaaccaacttgctttgacaaagccatcggcattctaccaactacccatcattggtggtgccctcttttagatatgttatgagttatcgttcaatactatagtgtctcggcgtgatagcgacagtctgtcgcagttcatggcgcgttagtgtctgatggtcgtccggtctacaggatccatgct

SEQ ID NO: 88594 - DNA, 544 bp, Zea mays
  Clone ID: MRT4577_180797C.1
gccggccggggctgcgacacaaagaagctccataattaattgttgccctttcagttcgccatcggcagccgagcaccatgagctccacaggcggcggcgacgatggcgccaagaagtcttggccggaagtggtcgggctcagcctggaagaagccaagagggtgatcctgtgcgacaagcccgacgccgacatcgtcgtgctgcccgtcggcacgccggtgaccatggatttccgccccaaccgcgtccgcatcttcgtcgacaccgtcgcggaggcaccccacatcggctgaggtttaaatctacaaaatgaataactcggacatgccatgcgttcctgtccgtcgccgaataatggatgtgtcatgtgtgtgtgcttcgatcgttcctataaattgctagtaaaaataatggcatcgtcgttatgcacgaataaaaggcatcagaataatgttcaccctttcacgattggatatatgaaaatgtgctcagttgtttggttaaaaaaaaaaaaaaaacccacgcgtccgcggacgcgtgggtc

SEQ ID NO: 88595 - DNA, 318 bp, Zea mays
  Clone ID: MRT4577_180798C.1
tgcctcacgcggccgcggacgcgtgggtttagagttggtttgcgctgtgctatccaagatcataggctgggtggactgagggagtcactttccgcgcggtggagagcacggtgaggagtggagcaaagctgcatcacttgccacgaaactgaatagacttgctgacttagctgcctgcactaaatcccgtagctctactggtgacaccagaatcagaggtagctgtatcgaaggcggacccactggtggtgatttggatgctggtaggagccatcagagggctgatccctttaggcctgctatcattgggatcggcgg

SEQ ID NO: 88596 - DNA, 3169 bp, Zea mays
  Clone ID: MRT4577_180799C.1
tcgagggcggccggcgggccggggacaaagaagctccataattaattattgccctttcagttcgccatcggcagccgaccagcatgagctccacaggcggcgacgatggcgccaagaagtcttggccggaagtggtcgggctcagcctggaagaagccaagagggtgatcctgtgcgacaagcccgacgccgacatcgtcgtgctgcccgtcggcacgccggtgaccatggatttccgccccaaccgcgtccgcatcttcgtcgacaccgtcgcggaggcaccccacatcggctgaggtttaaatctacaaaatgaataactcggacatgccatgcgtacctgtccgtcgccgaataatggatgtgtgtgtgtgcttcgatcgttcctataaattgctagtaaaaataatggcatcgtcgttatgcatgaataaaaagtatcagaataatgttcaccctttcaaaaaaaaaaaaaaaaaaaaaaaaaaaaaaaaaaaaaaaaaaaaaaaaaaaaaaaaaaaaaaaaaaaaaacctcgaacggccgggacccacaaggaacggaatccgggcatccggaaaagcagccctaatctcaaggccgcggctgcgagcgctgcttcccacctcccaactccagaagtcctccctagacgccgccagccgcgcgcacacccaccgagagctcctcgggctttctttctccgttcctccctcgcgcgctcagggtttcacgatggaggccgaggcggcggccaagagggcgcgggagggcggggaggacgccaccgcgccggtggcgggggccgaggcggcggtcgccggtgctggcgagcaggcgggaatctccgccgtcatcccaggatggttctccgagatcagccccatgtggcccggtgaggcgcactccttgaaggtggagaaggttctgttccagggcaagtcagactaccaaaatgtgatggtttttcagggccctcctccgtggcgagcaaaccctcgcaggcagaaggcaaacgcggctgcgagcgcggcgcccctctcccactccccagcagccgccagcccgcacacccctccctcgcgcgctcagggtttcggaatggaagccgaggcggcggccaagaggacgcgggacagcggggaggacgccgccgcggcggggatctccgccgtcatcccgggatggttctccgagatcagccccatgtggcccggtgaggcgcactctttgaaggtggacaaggtgctgttccaagggaagtcagactaccaaagcgttatggtctttcagtcctctacgtacgggaaggtgctcgtcctcgatggagttattcaggtgacggagagggatgagtgtgcgtaccaagagatgatcactcacctgcccctttgctccatcaaagaccccaagaaggtgttggttattggagggggtgatggtggtgttctgcgtgaggtttcacggcattcctctgtggaacaaattgacatctgtgaaattgacaagatggtggtagatgtctccaaacaatttttccctcatttagctgttggatttgaagaccctcgtgtgtcattacacattggagatggggttgcctttttgaaaaatgctccagaaggtacttatgacgcagtaattgtggactcatctgatccgataggtcctgctcaagagctttttgagaagcctttcttccagttggtggccagagctttgcgtccaggtggagttgtatgcacccaagcagagagcatatggctacatatgcacattattgaagatattgttgtcaattgtcgacaagttttcaaaggctcggttaactatgcttggacaacggtgcctacataccctagcggagttattgggttcatgctttgctccaccgaagggcctgctgttgatttccagcaccctgttttcaacatcgaggaggatgagcatcctatgaaatcaaagggaccccttaagttctacaactcggagatccacacggcatcattctgtttgccttcttttgcaaagagggtaatcgagtcaaaagcgaactagatgtgaagggtatctccaagggctaagtaccttaggcgcgcaacacagaatttgttgtagtgtgaaaagcggatgcctccctcccttttctcccactttgatgaatagtataagcacaggagatgagatgcaacagttatcggagttatcggtctacatggtcctgaccagtcgtatgtctcggctgcctggtgcagctatgaaaacgttttgcaatagcttttttcggcagtcctcacatcatcacggttgtgtttccgcttccatatctgaatggaatacatatacgtatgaaataaaactgtgtaatggctgttgctcggatcttgaagatattttcgtcaattgccgccaagttttcaaaggctcagttaactatgcttggacaacagtacctacataccctagcggagttattgggttcatgctttgctccaccgaagggcctgctgttgatttccagcaccctgttttcaacatcgaggaggatgaacattctacgaaatcaaaaggaccccttaagttctacaactcggagatccacacggcatcattctgtttgccctcttttgcaaagagggtaattgagtcaaaggcaagctagacgtgaggatacttcaccaagtccagtcgattgggttaagtaccttaggcgcaacacaaaatttgttgtcgtgtgaaaatgggatgcctccctcccccaccccccacttgatgaataagcacatgagatgagatgcaacggttatcggagttgtcagtctatacgattctgtctgttgtatgtgccggctgccaggtgcagctatgaaaacgttttgcaatagctgttttcggcagtgctctgatcaggttgagttttggacatcatttattatgttcctgcatccatacctgatactccctccgttcttttttatttggcgcggtttagttcaaaaatgaactagtggtgataaatattcgagagaacggaggtagtaccacagatggaatatataagaaataaaactgtgtaatggttgttgccatcctaaaaaaaaaaaactggttcagccccaaaaaaaaaaaaaaaaaaaaaaaaaaaaaaaaaaaaaattgttacaactgct

SEQ ID NO: 88597 - DNA, 499 bp, Zea mays
  Clone ID: MRT4577_18079C.1
cgagtacaagctttttttttttttttttttttttttttttggttttttttttttttttttttttttttttttttttttttttttttttttttttttttttccccggcccggggggcccaggggaaaggccaatacaaacccactggggggcggtggtaacggacccgggccccagcccaaggttggcaaaatcaaagaaaaagccggttccaaggggaaaatggtatcccgttccaaaccaaaaaaaaaaacgaacccaaaagaaaaaagggaaaggcgggggagcctaaaaaaagaccaaactaaaattaatggggtaacgcccaattccccatttcgaaaaaaaaaaccggccgcgccaataaaaaaaaagaaaccccccacccccggggagagggggtttgggaattgggcccccttcccctttcaaaaaaaaaaaacccccgggcaaaggggtttggctggggggagcggtttcccctaacccaaaagggggaaa

SEQ ID NO: 88598 - DNA, 474 bp, Zea mays
  unsure (1)..(474): unsure at all n locations
  Clone ID: MRT4577_1807C.1
gtccactcagtctttacacactgtctgcctcactcacgtccttcncctgctgccgctacaccgagccatggaaagggaggtgcagctgatggaggggaggcaagcgtggccgctccacatgatggggatggctgccgctggtacgaccgccacctgcttcgacaactacagcagcagtggcagtggcggcggcggcggcgactgcttcgtgctcgggtgggagcagctagcgccggcgccgttcggctgcttcgggctcctcaccgccgacgtccacgacctcttcccgctcttcgccacaggcatggagccggcgctgcccgcgctgccgccgtcggcgcacgacgtggccgccgcgatccccggcgagctggacgaccttctcctgagcttctgggacgcgagctgccacgacggcgacgtgggcgagccgctcaaggcgcagcagcaggccgccttcaattccagctgctg

SEQ ID NO: 88599 - DNA, 373 bp, Zea mays
  unsure (1)..(373): unsure at all n locations
  Clone ID: MRT4577_180800C.1
attattatggtttgtttgcagtgaggagaaaaggatgcgaataacaaataattaataatagattgagctagctggggatatattatatatgatgaatggataatatatgggggggggaacggaagatttcgtggtttctggaaaanggctagncgaggagaagcagggggaaggtagggagctaggggcacgcccagcaaaaaagcaacgccgacaggctgcggccaccgggcccccagccttgccggagccggcacggtgggccttgacctaggccgagcccgccgtggcggtcttgatcgacgtggccgggcacttgtgcttccactcctcctgcgggaagtggcgccgcctgggactcgggggtggggaa

SEQ ID NO: 88600 - DNA, 833 bp, Zea mays
  unsure (1)..(833): unsure at all n locations
  Clone ID: MRT4577_180801C.1
ccccccccccccccccgtccacacccaaaaatcctgtgcggcgctcggccggccggttcgggacacaaagaagctccataattaattattgccctttcagttcgccatcggcagccgagcaccatgagctccacaggcggcgacgatggcgccaagaagtcttggccggaagtggtcgggctcagcctggaagaagccaagagggtgatcctgtgcgacaagcccgacgccgacatcgtcgtgctgcccgtcggcacgccggtgaccatggatttccgccccaaccgcgttcgcatcttcgtcgacaccgtcgcggaggcaccccacatcggctgagaatcaaatctataaaatgaataactcggacatgtcatgcgtgcatgtccgtcgccgaataatggatgtgtgtgcttcgttccaataaattgctagtaaaaataatggcatcgtcggtatgcatgaataaaatgtatcagaatgttcatcctttcacgattggaaaaaaaaaaaaaaaaaaggcccctagttcccccttgttttttaaagagggaaaaggaaacccccccccaaagaggggggggcgccccaaaaaaaagggggccccaaaggggggcccccttaaaaaaaaaaaaagggggggtgggagaaaaaaaaaaaaaaaaaaaaagggggcgcccccccctttttttttttttttttaaagagggggggggggggggagaatattatcttttgtttttttttttccccccccccccccccccccaaacaaaaaaagggggggggggggggggggggggggcnggtgttttttttttttttttccccccccc

SEQ ID NO: 88601 - DNA, 762 bp, Zea mays
  unsure (1)..(762): unsure at all n locations
  Clone ID: MRT4577_180802C.1
gactcttcctccgaccctgccgtctattcatcattctttgcactgtaggcgagtcgtgtatctattggtgaatggaacctctaggcgacacctcgcgtgttacgcgctcgtcccgcgtacgccgatgccgggcgagatcgttcttctggcttatgtctcgcagacgcgaggtatccaaaccagtgggttaggagtcattacgggatcgcataccagggatggtgaaatgttctgctgccgtgtcgccgaacgatgagcccgatgaataaccatgtactcttgctaaatacgaattgctaaggatgatgactattattgctttcttctaatcatatgattgagtgaacgatgacgtcaacctgacgtccatgtctcactgcatcatgtgctatcactctcaccttgcgacgctctacctattgttgtttcatcccacactacaactgcgatgccccctcttttcctctttcagtcctgcagagcaggaacttctcagaatctcactcaacatcattgcgtatacacacgatggangctcattgccgcgccgtntggatgttatgatacgcggacaacataccaccaagtttctgatctcctacaagacaagaggctaactcttcatgacgtgccgtatcacactatgaacataccccgctttatgatggactcatgtgatccacagctctatgacaatgtcgctgaatccttctccggtgatccgcttactgtatattactatgagacctttgcgaatgatga

SEQ ID NO: 88602 - DNA, 1028 bp, Zea mays
  Clone ID: MRT4577_180803C.1
gccggccgggttcgggacaaagaagctccataattaattattgccctttcagttcgccatcggcagccgagcaccatgagctccacaggcggcggcgacgatggcgccaagaagtcttggccggaagtggtcgggctcagcctggaagaagccaagagggtgatcctgtgcgacaagcccgacgccgacatcgtcgtgctgcccgtcggcacgccggtgaccatggatttccgccccaaccgcgtccgcatcttcgtcgacaccgtcgcggaggcaccccacatcggctgaggtttaaatctacaaaatgaatgactcggacatgccatgcgtacctgtccgtcgccgaataatggatgtgtgtgtgcttcgatcgttcctataagttgctagtaaaaataatggcatcgtcgttatgcatgaataaaaagtatcagaataatgttcaccctttcacgattggataaaaaaaaaaaaaaaaaaaaaaactaccctaaagaagctccataattaattattgccctttcagttctccatcggcacgccggtgaccatggatttccgccccaaccgcgtccgcatcttcgtcgacaccgtcgcggaggcaccccacatcggctgaggtttaaatctacaaaatgaatgactcggacatgccatgcgtacctgtccgtcgccgaataatggatgtgtgtgtgcttcgatcgttcctataagttgctagtaaaaataatggcatcgtcgttatgcatgaataaaaagtatcagaataatgttcaccctttcacgattggatatatgaaaatgtgctcgatcagttgtttggtttccaaaaaaaaaaaaaaaaaaggcccctaaaaaaaaaaaaaaaatggactctaggagaaaaaaaaaaaaaatgtttcggccgcttaaaaaaaaaataaaaaggcccctagggccccgggcgccctaaaaccagggggtcccccggggtgggggaattttatataacggttttttataccgctcaacccccaggggggggc

SEQ ID NO: 88603 - DNA, 616 bp, Zea mays
  Clone ID: MRT4577_180804C.1
caataagggaagctaaaagcccgcgcttttttgccatgagcgcatcacaccagactagttttttacaaaactttgccacacgggggaacaaagcccccaatcaatcggcccgggggaaacaacaaccaaaaaattatcacgactcccacgctgttagtacttgcaactcctactgttactaccggttagtaaaaaacacgggggcccccgcgggggaaccagaacggccgccgttaataaggcgctggccttgttgacctttttgccggcaccgaaagcgggggcccgggctggtttggccttgggctgcgcgggccccgggcccaccttcctcgttggtttcgggcgcactttacgtgcctcctttaagggccccaaggaagcggccgccggtttttttttggccggggcgggggcctttttgggcttggccattcccgccgaccctttttttttcgctttgggggccggggagggtttcctttccttgggggggggaagcttgaaggaagccttgaccttgacaagggggcccttggggggaaagccgcgcagttgcactgccagcaccttgtggtaattgggcggaagcacgtcccggggcttctcccccatg

SEQ ID NO: 88604 - DNA, 339 bp, Zea mays
  Clone ID: MRT4577_180805C.1
gccggccatcgtcatcgccaagttcatcgctgccggcatctccggcagctcggccatgctcagtgagggcgtgcattcgctggtcgacacattgaatgaactcctgctgctgtacgggctgcgccgtgccggcaaggcgccggattccctgcatccatttggctacggccgcgagctgtacttctggagcttcatcgtcgccctgctggtgttcgccgccggcgccggtgtttcggcctacgagggcatccagcatatccgccggccggaaccggccaccaaccatgcactgagctacagcgtgctgggcatctccatcctgttcgagggtgcctccta

SEQ ID NO: 88605 - DNA, 799 bp, Zea mays
  Clone ID: MRT4577_180806C.1
acacctcttcccccgccgctctccgttctaccgaccggcaccggaaaagatagagacgccccgcgcgcgtcggctggctcctggttccgtccgccgtccccccactgcccgcttctcccgatccccttccgaggtagtttagttggctggctggctggctggcatggctgctgaatcccagaccgagactggcaactgcagtgcctgggcggcaaaagatccttctggaatactctccccacacagtttcaaccgtaggactgtacgacatgacgatgtctctttgaggatcacgcattgtggtgtctgttacgccgatgttatctggacaaaaaataggcacaatgactcggtgtaccctttagtccctgggcatgaaattgctggagttgtaactgaggttggttcagatgtcaagggcttcaaactgggcgaccatgtggctgtcgggacatatgtcaactcatgccgtgactgtgacaactgcaatagcttcctcgagaaccactgctcaaagtttgttttcactttcaatggtgtcgatacggacggtgctgtcacaaagggaggatattccactcacattgtagttcatgaacggtactgctataaaatacctgatggctatccattggaaaaggcagcacctttggtttgtgctgggatcactgtgtatactccgatgacgcgacataacatgaaccagccgggaaagtcactgggtgtcattggtctttggtgggttgggtcacatggcagtgaaatttgggaaacctttggcctgaaggtgactgttctt

SEQ ID NO: 88606 - DNA, 572 bp, Zea mays
  Clone ID: MRT4577_180807C.1
agacgaaaatctcaagctgataaaaaatggcttgctctgtctggtcacaagataaccagacgacttgttatacatataacaacacaaaatagcgatgaaatccaacgtgaggattttcaagcttcgtcaaaagcgaggactcctggaagtggcttacccttatttatatctccaaactagcaccgcctccggtagagatgtggctcatcttgtctgccaaaccaaccttctcgacggcagcaacagagtcacctcctccaatgattggggttactccctttccgattagttctgcaagctgctttgctacggcctcagttccagcagcaaacttatcgaattcaaacacacccatgggaccattccagatgatggctttggttgtgtccagagcttcgctgaatgtcttgatggagtctggaccaatatctagacccatccagccatcaaggatggcagtggctggcactatcttgctgttagcatcgggagcaaacttgtcagcaataaccacatcggctgggagcaagagagagacacctttggcctttgctttctccatgagagacttt

SEQ ID NO: 88607 - DNA, 151 bp, Zea mays
  Clone ID: MRT4577_180808C.1
gggggaacccaaagtttttttatatttatgcacaagggtgaccgggtttgtacagggaaaaactaaatttacaggtggtgcacaacgcgggcagaaaattaaaaagacatttacattttggaaccaattttgttaacgctggacatttaaa

SEQ ID NO: 88608 - DNA, 342 bp, Zea mays
  Clone ID: MRT4577_180809C.1
ctggctggtctacctaatacaatcacaagtagcgttgcgctggcacacatgctggggcctcacattgcctgctctgatctgttcctctcaacaggcgccatcaccaccgtctgccctggctacaccctcttcctttcttcttccaaatcacctctgtctctctctctctctctctctctctctctcaaaagcgtgtggcagcccgcctgtgagttctttgtctgtgaccagcttactctgccagccacacgcacgcccttgcgcttggagcgttgcgaggatcggctcacaggtcacagctcagtctcagatcgggcaccggccggccgggcaccggaccac

SEQ ID NO: 88609 - DNA, 2579 bp, Zea mays
  Clone ID: MRT4577_18080C.1
ccacgcgtccgagagatgggacccattcggtgttctcgttgcaaagcgtacataaaccctttcatgaaatttgttggccaagggaggcatttcatcggtaacgtatgcggattcagaaatgatactcctacagttgacttgggcgcctcggggcctgttcgggggcgtcgtcctgcgcctgccgggcccgtcttgtctagaggaacagttgaatttgttgctacgaaggaatttctggttcgtgatccaatgcctgctgctcacgccatccctgttgagccgacggtggcggcacggctggctccggatcctccccctgctttatatttcttccttattgatgtctccatgaatgctatacaaactggtgcaactgctgcagcttgcagttgctatttcccagtctatttcagatctaccagaaggtcctcggacaatggttggaattgcaacatttgattctgctattcacttctacagtcttaaacgtgctcagcagcagcctttgatgctcatcgttctgatgttcaagatgtatataacctcttcttattcttcttctgagtgccgggagaatctggagcagttgctagaaagtatcccaaacatgtttgagaataatagggttgctgattctgcttttggagcagcaatgaaggctggcttcctggcgatgaaatctactggcggaaaacttcttgttttccaatcagtgctgccatcacttgggattggttctttatctgctagagaagccgaaggcagagcaaacattacaactggtgacaaggaagcccataaacttttgcagcctgttgacaacaccctcaagacaatggcactagaatttgctgagtatcaggtctgtgtggacgtattcctcaccacacaatcctatgttgatattgcttctatatccgttgtgcctcagactacaggtggccgggtctactactactatccattttctgctctttcagatccagccaagctcttcaatgatctcagatggaatatcagtagaccccagggttttgaggctgttatgcgtgtaaggtgcagtcagggtctccaagttcaggactattatggcaatttctgcaagcgtgttcccactgacattgatcttccagcgattgattccgacaaaactgtgatggtcacgtttaagcatgatgacaagttacctgaaaatgtggaatgtggcttccagtgtgcacttctctatactactgtatatggacaaaggaggatccgagtcataaacctctcactttcatgtacaaatttgcttgccaatcttttccggtatgctgatttggagacacagtttgcatgcttcctgaagcaagctgctaatggcatcccgacctcttcattacctcgtattcgggatgaagcaacaaatacatgcataaatattcttcaatcttaccgcaaacactgtgcatctgtaacctcatcggggcagttgattctcccagaggctctaaaactgctgcctttatatactttggcactggtcaaaagcgtaggcttgagaaccgatgggcgattagatgaccgttcctattggatatctctggtctcgtcagtttctgtagtactagctgttcctctggtgttccctagattgattcctatccacgatctcacgtcaagggatgatgatgattcccttgtaccaagtccccttatgctcaaaagtgaaaatgtacaagaggatggggtctatttattggaaaacggtgaggatggtctagtctacgtaggaaacatggtaaatccggctaccctggaacaaatattcggtgtctcttctttggctgcattaccagcccagttggcgttggagcaatttgacaacgaactctcgaggaaggttaacgaagttgtaaatgaaataagacgccagaggtgctcatacttgaggttaagacaatgcagaaggggtgaaccatctggtgattttttccggtcatttttagtggaggacaaggcgcctggcgtcttctcctacgtcgagttccttgtgcatgtccacaggcaaatccaaagcaagatgacctgagggcccaagatcctggttgtaacatttcggtcagtagatggattgtatgtaccccgggagtttgatttctgcataaggagacagcaaagtggcgattccatatcaatgtggagcataaagagtgctcggataatagaactcaggaatagaggcttgtggtgtttacagcaccgtttttggagtgggtggtatatgtgttgtatacagagatgagaggggtggagctttagtttttgtgttgtcttttatcatcgtgcatccttgtttatctcatgtgcaaaaagtgttggattatgttggttggaaggttatagaggtttcgtaataaaatgcacctagctaatcgatagtatgaatcagatatactataatttaactattatgtttgcctatgtcaaaaaagggatgcattattatgttcagaggaaggttatagaggtttcgcaataaaatgcacctagccaattgatagtatgaatcagatatataatctaatttatgactgcct

SEQ ID NO: 88610 - DNA, 367 bp, Zea mays
  Clone ID: MRT4577_180810C.1
cgaaggccctggcgcagaacagcagggtggtccagcaggagaacgccgcgctgatggccgagaacgcgtcgctccggcacgccatactgaccgggtcctgcctcgcatgcggcggcgcgacgacggcggcagcgcccgccgagctgccgccggagagcaggcgcctggtggcggagaacgcgcggctcaggggcgagtacgcgcgcgccaccgcgctgctcaaccagattctgctctcggtctcggcgccggcgcccccaggcccagcagcagcggcagtcgtcgtcttctccagctccgtcgcccgccccgtggccgaccgcgccgttcggttccgcggccacgcggaggccgccatggacctgtt

SEQ ID NO: 88611 - DNA, 735 bp, Zea mays
  Clone ID: MRT4577_180811C.1
acatctccctccatgatgctcgcaactcctcctagcatcactcaccgccaccttcacagcggcatcatcccgccaccgggtccgggccaccgcaggagactcgtctccactgcacgcgccgccgtgaagcgagatggtgccaccacggaggtagcaggcgatgagggcgcgtcgtcgtcgtcgtcgtcgccgccgccgccggaaagctcgagggtgactaaggctgccgcgacggcgaccccggcggcgttttcgttgcccaaggactacagccatacgctgttccactccgagttcctggaggtgctgggcctgatcgacctcgagtcgctgcggaagcggccgaggctcaccgtaggggtgacggtgaaggcgtccctgccgctcccggtgctcgtggtcctggcggccctgtacctcgcggacgtgaccagcggtcttgttgactggacgcatcatcacctggagggcgacgccgacgacgtaggggactagtgaagaagggacgccctcactgccctgccctgccatgccccggctctccattgtagcggatgcaggcatgcagcagcctcaacttgcttgtgtaaacaatcagcttcaggacataaactgacttttagtttagtggtgtgctttgtaaaccctgcttttatcttactcgctctatttctaactattagatataatgtattcaaacacctcttttaataagaaaacgattttagtctctgg

SEQ ID NO: 88612 - DNA, 796 bp, Zea mays
  Clone ID: MRT4577_180812C.1
gggtacctcgaggccggccgggattattcaagcgcgcgcatcagcgctgcccccaaatagtacatctccctccatgatgctcgcaactcctcctagcatcactcaccgccaccttcacagcggcatcatcccgccaccgggtccgggccaccgcaggagactcgtctccactgcacgcgccgccgtgaagcgagatggtgccaccacggaggtagcaggcgatgagggcgcgtcgtcgtcgccgccgccgccgccgccggaaagctcgagggtgactaaggctgccgcgacggcgacccggcggcgttttcgttgcccaaggactacagccatacgctgttccactccgagttcctggaggtgctgggcctgatcgacctcgagtcgctgcggaagcgcccgaggctcaccgtaggggtgacggtgaaggcgtccctgccgctcccggtgctcgtggtcctggcggccctgtacctcgcggacgtgaccagcggtgttgtcgactggacgcatcatcacctggagggcgacgccgacgacgtaggggactagtgaagaaggaacgccctcactgccctggctctccattgtagcggatgcagcagcctcaacttgcttgtgtaaacaatcagcttcaggacataaactgacttttagtttagtggtgtgctttgtaaaccctgcttttatcttactcgctctatttctaactattagctataatatatttaaacacatctttgaataagaagaaaaaaaaaaaaaaagcaaaaaaaaaaaaaaaaagcgggctcga

SEQ ID NO: 88613 - DNA, 338 bp, Zea mays
  Clone ID: MRT4577_180813C.1
aataattgggtttttttttttttataccttgtattaacaatttgtctatctttatttttattggggcgggccaaccaaactaaaagatttgcccaagaatggtttttaaaacatgggggccagcgttcgcaaggaaaaaagcgacaaaaccccccctgagggggcacgggagggtccagctatataaattttaaaaaggaatgggggaaccgaggctaaatggtgtggaaacatcaaaactggggtgtggggaaattcagacaaccgttatggggcaaacctttaagatgtctttcttttttgggcacattgggttaagaacaatataaaaaacaacc

SEQ ID NO: 88614 - DNA, 237 bp, Zea mays
  Clone ID: MRT4577_180814C.1
atcgtcgggcgcccatacgcccatgaacaggtagctatagtgggccgggcgggctttcaacgacagctgaatggaggcccagggactggattgctgatatggtacccacgagttaccatcatgtcgggacatgcaggggtgcccaaagacttggcctggattaacttacaaacaaaccttgtggatgggcacaacttgacttgattagagcaaaggtccgctcgatcatagaaaatc

SEQ ID NO: 88615 - DNA, 618 bp, Zea mays
  unsure (1)..(618): unsure at all n locations
  Clone ID: MRT4577_180815C.1
ggtccggnnattcccgggcagcataactaaccgaaccggtttcatatcgcacccggcacccggctgctcgctgcttctgctgcggctaccttactccacaggtagaataaatacccttcctcttacattgttactgcttcgggctacaatcttccgaggggtacggcaactgttcttgcagggtagcgcgctggctccttccgtggcgggttcttggtctgccttgaccgacttgctctccgcggcttgttggggaggtgagatgccgtgactgtggagacaagggacgcgtgggaagctgagccatctaaggccaagaggagggaaaggaaacggggggcgcatggacgggcagtggcttatggaggcgatgccctacgacaacctgcaccgcttattggactgcactaccctcaccgtcgagacgcacatattccccaaaacaaatggacgattgcctaccgacacctggcaccacgctgacatggacaagcctatagtacttcaatcttgccgacctgtgctaacagtactattaactggatcgcgtcacagcggcctgaatctacacatgacagctcccacgacgtactagagacatcatggctgtgatccata

SEQ ID NO: 88616 - DNA, 409 bp, Zea mays
  Clone ID: MRT4577_180816C.1
cgcacagtagcaacaaacagcgcccgtctaacaaagccgcttgaagcggaaagcattattaaccgctggacacctagagatgcggatcggactgaatcgtctgccctagctaggcggattttgtgtaacataatgtagcagcatgtaacttagtatccgccacctcaacacccttagagtgatgcagcttagaacaatggcattgcccataactgttcaagtacaactgctcatgttatatatgatatctcgtgggtataactcatcactttgtacatgtccaaatattgcaatggactttggtctaaaaaataaagagggagctgttcgggctgccgtccaagtacaaggactctgtgcgtgctatccgcccgggactgaccctggttgctctacaaatactacacaa

SEQ ID NO: 88617 - DNA, 552 bp, Zea mays
  Clone ID: MRT4577_180817C.1
ttcctccctcttcttcacaccactcagtcacaggtcctccccctcctcctcctcctcccgggctgccattgctgccgcccggccagctgattcaaggtgttccgctcactccctgtctttctcgctctttactctttgacagagatgagggttctagggattttattgcttaaagattacgtgctgacgatttgatctttggccaaacctcttatccccctgttgatgagtttgtttaattgttctgggtggagtgtgttctacgcttcgaacggccccactctgcttcttctctgctgctcttctctgtgcagtgcagatgccgaccatcatcgtctcggtggacctggaatgcagccgctgccgtgccaagatcgagaaggtgctcaacaggatccaaggtgtgtttgcgcttgcagctccgctctgttcgtactgccttgccttcctccacctgtggactggtggtgtcgcgctggttccgttgatggcaactgataccgactgagcgatgggtgtttctttctttctttcttgggacgatatggatgc

SEQ ID NO: 88618 - DNA, 655 bp, Zea mays
  Clone ID: MRT4577_180818C.1
ccccagtcaccgatccaaccatcgcaaagagagagagagagaaaaaaaaatccccgatccagcaccgagctcgcaccggtggagatcgtggtgggaggatgtcgtcggactactcgtcgtcgtgggcgcgcgcgctcgtgcatatctcgccctacaccttctccgccatcggcatcgccgtctccatcggcgtctctgtactcggcgcagcatgggggatcttcatcacggggagcagcctcatcggggccgccatcaaggcgcccaggatcacctccaagaacctcatcagtgtcatcttctgtgaggccgttgcaatttatggtgtaatcgtggcgatcatcctccaaacaaagcttgaaagtgtgccaacatcccgaatgcatgatccagagtctatgcgagctggttatgcaatctttgcctcaggtcttattgtcggctttgctaatcttgtttgcggggtatgcgtgggaataatcggaagcagctgtgcactgtctgatgcccagaattcaacactctttgtaaagatcctggtgattgagatctttggcagtgctttgggcctctttggagtgatcgtgggcataatcatgtcagctcaagcaacatggccaacgaaagtctaattccatccatctgggaatctctg

SEQ ID NO: 88619 - DNA, 183 bp, Zea mays
  Clone ID: MRT4577_180819C.1
actccgcagtccgcacggccgcatccgtcaatatccgcgaagagcaacgaggcgaggcgaggcgagggaaaacaagtgagtgagaaagagagagagaggagggaaaatgctgtgccacgccgcccgtccccttgttttccgctccgtcacttcgctttgcaagcgatgtttgtctagatcggt

SEQ ID NO: 88620 - DNA, 1321 bp, Zea mays
  Clone ID: MRT4577_18081C.1
gcacggggaggatccgagtcataaacctctcactttcatgtacaaatttgcttgccaatcttttccggtatgctgatttggagacacagtttgcatgcttcctgaagcaagctgctaatggcatcccgacctcttcattacctcgtattcgggatgaagcaacaaacacatgcataaatattcttcaatcttaccgcaaacactgtgcatctgtaacctcatcggggcagttgattctcccagaggctctaaaactgctgcctttatatactctggcactggtaaaaagtgtaggcttgagaactgatgggcgattagatgaccgttcctattggatatctctggtctcgtcagtttctgtagtactagctgttcctctggtgttccctagattgattcctatccatgatctcacgtccagggatgatgatgattcccttgtaccaagtccacttatgctcaaaagtgaaaatgtacaagaggatggggtctatttattggaaaacggtgaggatggtctagtctacgtaggaaacatggtaaatccggctaccctggaacaaatattcggtgtctcttctttggctgcattaccagcccagttagcattggagcagtttgacaacgaactctcgaggaagattaacgaagttgtaaatgaaattaggcgccagaggtgctcatacttgaggttaagactatgcagaaggggcgaaccatctggtgattttttccggtcatttctaatagaggacaaggcacctggcgtcttctcctacgaggagtttctcgtgcatgtccacaggcagatccaaagcaagatgacctgagggccaggcgaatgcaaaggcaacatgaactgagggtcaggctggcaaatgcaaaagcaagatgacctgagggcccagatcctgtctgtagcatttcggtcagtagatggattgtaggtaccaaaacgagttcgatttctgcataaggagacagcgaagtggcgattccacatcactatggagcataatgtttgctcggacagtagaactcaggaatagaggcaccgtttttggagtggggtggtatatgtgttgtatacagagatgagaggcgtggagcattagtttttgtgttgtcattgtcgctgtgcatccttattgttttaccccttgtccaaaaagggatgcattattatgttgagaggaaggttatagaggtttcgcaataaaatgcacctagccaattgatagtatgaatcagatatataatctaatttatgcctgcctaaacgccttgaaaaacaagacacggttaaaaaaaaaagggcggc

SEQ ID NO: 88621 - DNA, 122 bp, Zea mays
  Clone ID: MRT4577_180820C.1
tctctttgtttttttaagatctggtgcatttgggacggtttttcaatgaaagggccactttattaaagaatacattgttaaactaagaaaacatgggaattatgctaagctgatctggtgcg

SEQ ID NO: 88622 - DNA, 233 bp, Zea mays
  Clone ID: MRT4577_180821C.1
ccctcgcgttcgtacaaataaaaagagactaaagcgggctgcgctgaagccaaaaagctaattagctaaccgaacctaagaagacagaaccgaacaaataaagtaggggggggtcgcttgtcggggatccaggtttacaaaccgctgggtggagcgctaagcgttgttctgggtgacgccaagctcatttccgtggcagaaatttcaacccgtgtggactgaaaaaacctggg

SEQ ID NO: 88623 - DNA, 3383 bp, Zea mays
  Clone ID: MRT4577_180822C.1
gaacatctactcgagccggtggaggtcagcggggattgaggaggaggaggggaagaggcgaggcaggaaatcaagcgggaatccaagaaccgtaaggatgaccatggtggagaggaggtacggtccctgtaccagccatggttccttcctcctacggctgctgctgctgctgccgttcttcttcctctgcttcatcgatgtgccgccggccggcgccgccgccaccacacagtcgcctccactagacaacacgcaaaaggctatcatgaacgatgttgcgagtctggtgaactccggatccgccaacaccaggtggaacaccgcggagtcgaatccgtgcaactgggaaggaatcacctgcacaagtaacacttcttcctcggccgtgactcggatcgccttgtcaaactatggcctcgccaactcctccatctttgctcccctctgccgtcttggcactctgcggtaccttgacctttccagaaattttttagcagatttgtccgccccgttcttcgcctcttcttcttcttcttgctccatgaaggaagggctgcagtcacttaacctgagcaccaaccggctggctagcccgctcggtgagttggccggcttcccccagctacaagttcttgacctgtccttcaattcctttgccagcagaaatctgagtgcggaattgggttatttccccaagttaaggagcttcaacactagttccaatgacttgaatggtgatgttcctaccagtatggtcggctctttggaggagctggtattgtctagtaataatttgagtggtccaattcctctgcgtttgtttgaatatgaaaatcttactctgctagatctcagccagaataatctgaccggtgctattccagataacttcacgagtctctccaagcttgagactttgctcctttctggcaacaaattgattggggaaataccatcgagtctgtctaatgtgacaacactgtctaggtttgcagctaaccagaacggtttaactggacccatccatagctggattaccaagcatatagggatgttggatttgagttacaacaagctgaatgggacaatcccctcagacttcctctcgcatcaggggttgcagagtgttgatcttaccagcaacttgcttaacggagccattcctgccaccttgtctcaaagcctctaccgcttgaggcttggtgggaaccagcttggtgagaacatcccagggtcagtttgtgataccatgggcttgacttatcttgagttggatgacaaccaattgacaggagttataccttcagagcttagcaaatgcaagaacttgacactgttgaatctggcatcaaatcgtttgcatggtttagtgcccagtattaccggtgaacttgacaaactggtagttctgaagcttcaaaataacaccctcactggacaggttccaagtacattttctgaattaaagagcctaatcacattgaatctcagtaagaattcactcagtggagcgataccaagcggaattttcgagttgccaaagctttcgaacttgtatttgcagggtaaccagtttagcggttttattccgttctccatcagttcatcaaaggatctaatcgagctcaacctgggtgataatgctctgactggtaacatcccaaccatgccaaccactgtgaccacatctcttctgaatcttagtcataaccttcttgacgggtctattccttcaaacatcaactctttaggtgaactagagattcttgatctttctcacaatgccctgtctggtgctgtgccatcttcactatggagcctgcaaagcctgacactgctggacctttcctataataatctgtctgggtctattcctagattcggtccaagtcaaactgtagatattgtcggaaatcctggtcttgtaattgtaaatggtacaggaaacaataatgacactcctactactggtaagaaaaagaggcactatttggtcgtcatcatcttcaccattgccggtactcttgttggattatgtgtgcttgctcttattattgtgatgtcattatcaaagagagtgtatcgtgttgaagatgaaggattaccagctggagaatctgtaccacaaataatcagtggtcgcctcataactatgaacagcatccacacctctgcagttgacttcgtgaaggcaatagaagcagtctccaaccatcagaacatctttttgaagaccagattctgcacctactacaaggctgtaatgcctaatggctcaacatactctgtaaaaaaacttaattctagtgacaagattttccaaattgggagccaggagaagttttctcatgaaattgaggttctagggaaactgaccaattcgaatgtcatggttccattggcctacatcttgactgcagattgtgcctacctaatctatgagcatgcatacaatggcactgtatctgatttgctacatggtggaaaatcagaagttatagactggccgtcacgatatagcgttgctttgggggtggcccaagggctgacatttcttcatgggtgcactcagccggttttgcttcttgatctgtcaacaaggaccatccacttgaagtcaaaaaatgagcctcagattggagatatcgagctttacaagattattgacccttccaggagtacgggaagcttttcaaccattgctggaacagttggttatattccaccagaatatgcatacactatgaggctgacgatggctggcaacgtctatagctttggagtcattttgcttgagctgctgacaggaaaaaaatcggtcagtaatggcactgagttagccaagtgggctctcagtctttcaggcaggcctgatgaaagggagcagatccttgacaccagggtctcaggaacttcaattgctgttcatagccagatgctgtcggtcctgaacattgctctctcttgtgttgcattctctccggacgcacggccaaagatgcgcaacgtcttgaggatgctcttcaatgcaaagtgaatcagaagcagcctgcaatcatatcatagataaattttgggtgcagttccagcctcgcgtagtttatggatgtcagtgataagtatacaggctgcccttatatagttccataggagatagaaccctagcttatagtagatcattatatgttttatgaattgtgtaattaggtatctgctttgcagtgagtggctatatggtttataagctgtcaaatgtagaggtgcttataagcaaagttgggtattgttctcataggtagggctaggaaaaaaaagctcgagctcgatgagccggcttgcgctcgtgggggcttggctcgtagcggctcgacgcttagaatgag

SEQ ID NO: 88624 - DNA, 455 bp, Zea mays
  Clone ID: MRT4577_180823C.1
caagaataaaaatgtagtgcatttaaagtcagataaaaacaatcctttttttctagtaaattaataattttgatgaacaatcgaacaaattacagatttgaaacggattattttcagtcgtgacactttttcacaataacgctagttggaattatatttatatattatttttttcacatgttttcattaatacaacattatttaaattcacaaatcgatttaaatagaaaacttacaagaataaaaacttcgtacacatttataatttgatataattgcaaaaaaatcgtattttgagctcatcgtaaatgttttgaatgaatcaattaatggttcttagacgatttttcataaattttctgccaatcaataccatcgaacggtaaatcacttgtaattaatggtgaaatccatgctaaataccatcttatgccgaagaccatacgaatattttc

SEQ ID NO: 88625 - DNA, 312 bp, Zea mays
  unsure (1)..(312): unsure at all n locations
  Clone ID: MRT4577_180824C.1
gtggtatcttacctctttttttttttttttttttttttgacaggattttcaagaagcacttgtttaggcctttcctttgtttaanaccgttttgacggggtttacacggggatcagcccccccactttttnactcggggaaccgggcaaaaattcacccaccaacccaacccccccgccccaccttggggaaatcaggaggggggaggcccttgggtttctccccccaaccaaggttaaaaaaccccccccccgggtggatgggttttttgcccttcctttccggccttgcccggggggcggggcctttctt

SEQ ID NO: 88626 - DNA, 306 bp, Zea mays
  Clone ID: MRT4577_180825C.1
tccactctaccattctaagacataactgttctatagtggtagggaaatttaataaagtgggcggcttcttacaacaccttttctaggataaccctggtattacccacattaatcaccttgcattacataccccttttgccagttggggtaatatcgaattggtccgcaatcgatcgtccttcccacaaaatcgtagacttaatggcgaatgggaccctccctgtaacggcacattaaacgaggaggatgttttggccacacgcagacttaccgatacacttgtcaagaatttaacgccctgttctt

SEQ ID NO: 88627 - DNA, 316 bp, Zea mays
  Clone ID: MRT4577_180826C.1
acgcggacgcgtgggccagtacaggctgtgactatccatacctcacgtgtatgggagactgctgcgaatggcaccttggctctggtcacagactcctcataagacacatctggagactgagatgatggctacaacaacagctaaagactggactcaagtggactagaatacctgctgctgataacgtcccaaagaaaacctggatgagcccactataatcatgactactgctaacactgcagactaatatatccacacagtgctaaagctaatcaagatgtgcatgacgctcgtgatgagcactgaagagtgcatg

SEQ ID NO: 88628 - DNA, 361 bp, Zea mays
  Clone ID: MRT4577_180827C.1
gctaggctggatgcctcttctccttgctgtcgtggatgcctgtttgttgttagtattcttgaagttgtgtttcgaatgtaatccaatcttatcgttcgagaaatattcttgaagttgtgtttcgaatgtaatccaatcttatcgttcgagaattgaaatgattcctgggcaacattttgcaggcaatctcgttcgagagttaggtccattatatctgttaagattttttttccatacagcattgactatgtatgaagcccattccatcctgaaaaaaaaaaaaaaaaaaaaaaaaaaaggcaaaaaaaaaaaaaataaatcaaatcgatggaaaattaatactaacaagacttaattttgt

SEQ ID NO: 88629 - DNA, 165 bp, Zea mays
  Clone ID: MRT4577_180828C.1
ataaaatccaaatgatttctatatatagtcaattgaactgtcaaggtaccttgtgtgtgattctgaatacacagatacaatgtttttattcctcatgctttactttgatggcttctatcatgaaatagatgtgccattttatgaattaaaaaaagagcaaagggg

SEQ ID NO: 88630 - DNA, 150 bp, Zea mays
  Clone ID: MRT4577_180829C.1
atactgcaggtgcagctgatgcattgctggtctctcatctgaagcttccacagagtgccaatcccctcactcagcccatccctaggctctactccggggccccaagacacaggaggaggagcgttctgcctgctccctcccacctcccct

SEQ ID NO: 88631 - DNA, 1207 bp, Zea mays
  Clone ID: MRT4577_18082C.1
gtacccccggtccagccgggtctggtggttcaacctttttctcttcctcacccatccgaggaacctattcagcttgtggactttggagagatgggacccattcggtgttctcgttgcaaagcatacataaatcctttcatgaaatttgttgatcaagggaggcatttcgtctgtaacttatgtggattcagaaatgatactcctagagaatacatgtgcaacttagggcccgatggtaggcggcgtgatgctgatgacaggcctgaattgtctagaggaactgttgaatttgttgctacgaaggaatttctggttcgtgatccaatgcctgctgtatacttcttccttattgatgtctccatgaatgctatacaaactggtgcaactgctgcagcttgcagtgctatttcccagtctatttcagatctggccggaaggtcctcggacaatggttggaattgcaacatttgattctgctattcacttctacagtcttaaacgtgctcagcagcagcctttgatgctcatcgttcctgatgttcaagatgtatatacacctcttcagactgatcttattctcccagtttctgagtgccgggacaatctggagcagttgctaaaaagtatcccaagcatgtttgagaataatagggttgctgattctgcttttggagcagctatgaaggctggcttcctggcgatgaaatctaccggcggaaaacttctggttttccaatcagtgctgccatcactttgggattggttctttatcagctagggaagctgaaggtagagcaaacattacaactggtgacaaggaagcccataaacttttgcagcctgttgacaacaccctcaagacaatggcacttaaatttgctgagtatcaggtctgtgtggatgtattcctcaccacacaatcctatgttgatattgcttctatatccgttgtgcctcaaactacaggtggccgggtctactactactatccgttttctgctctttcagatccagccaagctcttcaatgatctcagatggaatatcagtagaccccagggttttgaggctgttatgcgtgtaaggtgcagtcagggtctcccaagtcaggactattatggcattttctgcaagcgtgttcccacccgatattgattcttcagcgattgattctgaaaaactgtgatggtcacgtttagcatgatgac

SEQ ID NO: 88632 - DNA, 358 bp, Zea mays
  Clone ID: MRT4577_180830C.1
aaacccccaaaaaaaagaggggtttttaaaccccctttcaggggtttggggggggcttccaagaataccccaaaagatttttccggggggttttatttgggtaacccccacccaaagggccttttcccttccctagggttcctttggctttggttttttggaagaaataatttcccccgcccccccaggaaggggttttttaaacggggggggcaaaacacggggggaaaacgggcccttttttttttttaacccgggggggggtaagaaggggggaaggggaggcccaaaaccttttccaaaaggagggggttttcgggaattttttattttttccgcaagaacccgcccgggaaaa

SEQ ID NO: 88633 - DNA, 2159 bp, Zea mays
  Clone ID: MRT4577_180831C.1
atggccactccatacgctaagtggacaaccatcttaaatatttgttctgcagtgggtgctatcggtactgtttttggagaaatgggagctctccagccaactcatggggttgagtatgcatttggagcacataactattcgattagtggagttttggaggtggaacccggcagtgacctggatcctctccaagtcagagagttcatggagattcgctcattaaattacaatggtgataccttctgtttggtattcgcaaggtatggactccaaaagttgtttggcctagactgcttggcactcacctcagaccaatctccactttaccctgatcttccatctaatatggtagatacaaagcgatcgacaactattcttagtggaatacaactcgacttccttggttgcttgagcacaatgtctacttttgatgctgaagtgtatacaatgagaagaagtgggcagattgctaggaccttaatttatgctgcatccaccttcatgcttccttttctgctagcacaactctcttcatgcattttgcagatcaatacacaatctgttcaagatatgcatatagatgctgatccttcacatgttcctgttgttcttatagaaaaacatgtcatggttgttccacagcatagttccagcaaggatttggcttcgaatgcttctgaacaaaaggatactattgtgctacctaaactacaaggagagcctctggtacccaaaagtagtgctggtaaaaaaagtggacgcatattgagagctgtcatttttgtgcatggatttcagggccaccatctggatttacgtcttgttagaaaccaatggcttctattggaccctggagctgactgcctaatgtctgaggctaatgaagataaaacatctggagacttcaaagaaatgggtagcaggttggccggggaggtaattgccttcctgaagaagaaaatggataagctttctagatatggaggctgcaaagagctgaagttaagtttcgtaggtcattccattggaaacgtcatcattagaagtgccctggcagaacctgcattgcagccatacttgaagaacctctacacttacatgtcaatatcagggcctcacttgggttactggtacagttcaaattctttgttcaattctggactctggctgctgaaaaagctcaagaatgcgcaatgcatccatcaactcactttcagtgatgatcaagacccccacaatacatacttttataagctttgcaagttgaaaacattggagaacttcaaaaatatcatattgttatcatcaccacaggatggctatgtaccatatcactcagcgagaatggagctctgcccagccgcatcatcggacacctcaaagaagggtcaagtcttcacagaaatgctcaacaattgcttggatcagatccgtgcgccctcatctgacacccggacgttcatgcgctgcgatgtgaattttgaccagtccaaccacggacggagcctgaacaccatgattggcagggcagcccacatcgagttccttgagaccgacatctacgccaagttcatcatgtggtccttccctgacctgttccgatgacagacaacgccgctcgtctctgtaatgtctctgtaatactgctgcataccaaacctacaaaccgatagcgcacactactgagtactgaccaggcaaggaaaagtaagcttgcataaaggctcccccagaatccaacaccgccacaggcagagtagcgctgtaaagatcctagaagcaacggtttttccagcttgctagatctgattctgtataaatagttgattctttcgtcattccattcatagtgctgtagatgtgcacctttgctgtgaatttataatcctttgtcggcttgtgtatctaacgcttcggtttaggatgtgctgacaatcagtgagcttatgtccaaataagccccctttcttaatgtttggttttagtcaccttggtctttgtgctgctgtaaatccagggtgttgtttctgtttggtgaaatgactgctacaggaatatctggttctggcatcctgccatagctggatcttgcttctgctaaggttattcctatcaggggtattggataggattggaaaaaaatatgaaagattttgatt

SEQ ID NO: 88634 - DNA, 276 bp, Zea mays
  unsure (1)..(276): unsure at all n locations
  Clone ID: MRT4577_180832C.1
ccagcgcacgcggcttggatcctgatgagcgggacgcgccgccctttttttttttttntttttttttttttgacaggcaggggggaggcaaccgggatccctccccaacgatattattcgagcacaaaacacggggcgagattacaaaccggaatgtgggacgcgtggtccatccctggggtgggccctaaaatttcggaccgggcccacacagctttccatagttgccttcaaatgggcagaactgaagcttggtaaacaactggacattgggga

SEQ ID NO: 88635 - DNA, 763 bp, Zea mays
  unsure (1)..(763): unsure at all n locations
  Clone ID: MRT4577_180833C.1
tcggccgttacttgtgtacacggaatttgttttgctgcaccaaatgatttggcccctcgagtccttatagcatgtcatgacttgcgagcaatgcacatgtctttctttctttaaggatggctatgtaccatatcactcagcgagaatggagctctgcccagctgcatcatcggacacctcaaagaagggtcaagtcttcacagaaatgctcaacaattgcttggatcagatccgtgcaccctcatctgacacccggacgttcatgcgctgcgatgtgaattttgaccagtccaaccacggacggagcctgaacaccatgattggcagggcagcccacatcgagttccttgagaccgacatctacgccaagttcatcatgtggtccttccctgacctgttccgatgacgacgacaacgccgctcgtctctgtaatactgccgcataccaaacctaccaaaccgatagcgcacactactgagtactgaccaggcaaggaaaagtaagcttgcataaaggctcccccagaatccaacaccgcgacaggcagagtagcgctgtaaagatcctagaagcaacggtttttccagcttgctagatctgattctgtataaatagttgattctttcgtcattccattcatagtgctgtagatgtgcacctttcctgtgaatttataatactttgtcggctggtgtatctaacgcttcggtttaggatgtgctgacnatcagtgagcttatgtccaaataagccccctttaca

SEQ ID NO: 88636 - DNA, 1212 bp, Zea mays
  Clone ID: MRT4577_180834C.1
aagaaaatggataagctttctagatatggaggctgcaaagagctgaagttaagttttgtcggccattccatcgggaacatcatcattagaagtgccctggcagaacctgcattgcagccatacttgaagaacctctacacttacatgtcaatatcagggcctcacttgggttactggtacagttcaaattctttgttcaattctggactctggctgctgaaaaagctcaagaatgctcaatgcatccatcaactcactttcagtgatgatcaagacccccacaatacatacttctataagctttgcaagttgaaaacattggagaacttcaaaaatatcatattgttatcatcaccacaggatggctatgtaccatatcactcggcgagaatggagctctgcccagctgcatcatcggacacgtcaaagaagggccaagtcttcacagaaatgctgaacaactgcttggaccagatccgcgcgccctcgtccgacacccggacattcatgcgctgcgacgtgaatttcgaccagtccaaccaagggcgaagcctgaacaccatgattggcagagcggcccacatcgagttcctggaaaccgacctctacgccaagttcatcatgtggtcctttcccgacctgttccgatgacgacgacgacaccgctcgtctttgtaatactggcacataccaaaccaataacgcacactacccagtactgaccaggcaaggaatactaaagctcgctccaccagaacccaacaccgagacaggcaggaagcactgtgaaggtcctagaagcaatggtttttccagcttgctagatcctattctgtataagtagttgattctttttcatttcattcatagtgctgtagattgcacccttgctgtgaaaatttataatccttgtcgtctgttgtaccttacacttcagtttaggatgtgctgacaatcagtgagcttattatgtccaaataagctctctttttttaacgtttgatttttagtcaccttcgttcttgtggtgctgtaaatcctgcaacatgctttgtacatgcagacgatcaccctgtctgatactagatccggatggtcctgccgtccaggtccagggtgttgtttcagtgtttctgtttgacgaaactgctgtaggaatatataaataatatttttttggttctggcatcctgccgttggtggacctgcatc

SEQ ID NO: 88637 - DNA, 757 bp, Zea mays
  Clone ID: MRT4577_180835C.1
tcgcgatctagaactagtcttttttttttttttttttttttttttagtaatgtttatcacatttcatttagttctagtaataattaacaaacgacccaaacaatacaatagcctctgcttaatattgcagagcactgaattaccgagttcaccacgagagcagcaggacacaaacgagagcaaagtagcagcagagcacaagggctcgcaagcatataccgtgccaacggacctttattacggcacagctataggagaccgggaacacacaacagccagtccacggactcactggtggacgaggcagccttcagcgacaggcattggggaaactgggacaggagcaaaggtggtggtgcccttgccctcactggcttcctcctcttcctcgtcagacagaaccaggccagcagcgctgaagatgtacgccttcacttcctcgaagcgctcctcagagagggagacctcagcgaggagcttccacgcagaggtttcagatgcctcctcatagtcgctcctccgcttcagcacgatgtggccacttatctcccacacggctgggttcacctgagtgtccagcagctcctggctcacttcacccagagcctgcttctctgcataacactgggggaacaggaagaccctctttccacagtcagaaatgagcacgttgtaaggcacattgttgtcctgcagccaaatgcaagcattggaaaccacatttgccaggtcctccagtgtgttcccggacgcgggg

SEQ ID NO: 88638 - DNA, 384 bp, Zea mays
  Clone ID: MRT4577_180836C.1
cgcctgcgtgtaccgggcccgctattacacggccgcccttttttccctgttcctttgacagcggtgtcttctgtctgtggaagccccaatccttcgaccctacagttccaattggcctttgccgctggcgtcttcccttgggggccctcgctctgccgggttgttgggcccttgctcaggggtttcctttggcgcgttggttggctcgcagcatttggggccgtcgtctgcgggtgcttgtgctaggcgcaccttggctggctagctcggagcaccactggggttcgtttcattcaagcaactaggtgcattgcactctgcttgttgtttggtactacttcttgttcctttcattcagctgtgtggtgcctgcccccagcaatt

SEQ ID NO: 88639 - DNA, 716 bp, Zea mays
  Clone ID: MRT4577_180837C.1
gggatatgaactcattgaatgcgataaaatatttgtccctgtgcataaagatgtacattggtgtttagcaattataaacgtgaaggaaaatttctttcagtatcttgattcccttggtggcatggatcatttcccgggaaaagtactggctcgatatatttcagaggaagtgaaggacaaaagtaacagagtaatcaacaccagtttgtggcatgaagagctagttgatattcctttacagcggaatgggtgggactgcggtatgtttatgctcaagtacattgatttccacagcagaggactgcccctgtcttttagtcaggaacacatggagtattttaggaagaggacagcgaaggagatcttaagactaagagctgactgatggatagacattcatcactttttggaacagaggctgactttttttactgcattttggggattataataaataaaagctgctaagtcaagtctatggcattgttgagcatgctcagggtggggtcatctacctgagatggttggtaatgtggccctgataatgtaaatactatagatattctgtagagaaattttgtttagggatttatttgactcggagaagcagtgaggggggaaatagatgtagctacgctgatattcgttgttggtttaaagttgtttcagattaatttgttcttgtggaattattttgcagccatggttgtcatact

SEQ ID NO: 88640 - DNA, 408 bp, Zea mays
  Clone ID: MRT4577_180838C.1
cctgcaggtaccggtccggaattaattcccgggtcgacgagctcactagtcggcggccgccctttttttttttttttttttttttttttttttttttgaaagaaaactttagctcatcattagctttataacggcggtgagaaacagaagttggacagctcttacattatactctacacatggcataatacatgcatgtcgttatatatagcactaataataaaatagcctagcataacctctcctctccaagtcggacaaatataagcccaagcaaagcatgccacgagctagcagcacaaccgcaaggcctacggcgacggtttgcgcacgaagtagcggtaggcggcgaccttccgtttccgggaacccgggttgtctatggacagcaccattctgccggccttc

SEQ ID NO: 88641 - DNA, 852 bp, Zea mays
  unsure (1)..(852): unsure at all n locations
  Clone ID: MRT4577_180839C.1
tgcagccacatgccgtgtcgccgcgcctcctctccgagctcgcgcacgggtcgaccgcgccgagccccgtggtgcccaccgtggcgcagaggtacagcgggcaccaggccgcgtgcgacgtcgcgatcgaccgcggcgcggacgtcgtcggccgtcaggccgtacccggaggccgacgtcgtccggatgacgcggaagttggacggcgggatgcccaccagccgcgcgcccttctggaaggtggcgtgcgtctggtccgaggcgtagaccaccagcttcacgatgctctcgtgccccagcctagccagcgcgcggtcccgcgccgcggcgagcgtgcacaccacggcctcgcacgtgctcccctgtagcacgccgccgccgccgcccgagaagagtaaccgctgcggcagcccgagcagcgtacccatccagtccaccaccacgctctcgagctccgctgcggcgggcgacgccacccacaagaacggcgccacgttcaggccggccgacaacatctcccccgcgaacccagcggcgctgccgttcatggggaagtaggcgaagaagctggggctctgccagtgggtcagacccggcaggatgtcccgccgcacgtcctccagtatgtcctccatcggctcaccgtgctctggcgcagcctcggggagcagcttccgtagcctgccaggctcgaggtcggccgccctcacagggtacttatcgacgtcacggtagtactcggcgaggaagtccacgatggcgcgtgaatcgccggcgaaggcctcggggtccagtggccgcagtgacgcgtcgagcggtaggctgcccatcgccgctactaaagttnctagc

SEQ ID NO: 88642 - DNA, 792 bp, Zea mays
  Clone ID: MRT4577_18083C.1
ggataacaaaagcaagaagtctgctacccaatcccatctactgctcccccatctctcttcctgctcggtggtgtacttgtggtgtcgacgatgaggagctccatggctctgctggcggccgcggcggcgctgctgctgctggtgtcgctggcggcggcggcggacatgtcgatcgtgtcgtacggggagcggagcgaggaggaggtgcggcggatgtacgccgagtggatgtccgagcaccgcaggacgtacaacgccatcggcgaggaggagcgccgcttcgaggtgttccgggacaacctccgctacatcgaccagcacaacgccgccgccgacgccgggctccactccttccgcctcggcctcaaccgcttcgccgacctcaccaacgaggagtaccgcagcacgtacctcggcgcccggaccaagccggaccgggagcggaagctcagcgccaggtaccaggccgacgacaacgaggagctgccggagaccgtcgactggaggaagaagggggccgttgctgccatcaaggaccagggcggctgtgggagctgctgggctttctcagcaatagcagctgttgaaggcatcaaccagattgttacaggcgacatgatccctctgtccgagcaagagcttgttgactgtgacacttcatacaacgagggatgcaatggaggtctgatggactatgcgtttgagttcatcattaacaatggtggtatcgactctgaggaggactacccctacaaggagagggacaaccgttgcgatgctaacagaaaaatg

SEQ ID NO: 88643 - DNA, 213 bp, Zea mays
  unsure (1)..(213): unsure at all n locations
  Clone ID: MRT4577_180840C.1
ccgcgcgttcganttggttttagtggcaccattccacagtatttccatgcacttgcttcaatgagctacccgggggaagctgtaaaagcctaccggctacaacaagtgcttgcgtccaccgtcttacaacaacgccattgtccactcccaacaacaatccttggtacatctaaccatacacaccatgaaaacgcaacagcatcaacaacctct

SEQ ID NO: 88644 - DNA, 409 bp, Zea mays
  unsure (1)..(409): unsure at all n locations
  Clone ID: MRT4577_180841C.1
ccgtccgaggcagattcactctcagcacgccgccaaacagcagcagctcctgtcctgtgctaagtaaccaaccatccaccatgactcccatggggccttgattcatgctgcctgcaactgcaaccctcgacgtctctgttccacttccagggacaggtccatgagctgcttctagagccactcccttccgccacgtccatggctcgcgccgtcctcgacacgctcctgcgggtcgccgtcgtgctgctgctgctgcccgcgctggtggccgccgcgttcaccccggcggacgactacctcgtgctctgcggcacggcggcgaacgccaccgtcgacggcaggacgttcctcggggacgacggcctccccgcggtggccgtgctgncggcgccccggggctccgaggcca

SEQ ID NO: 88645 - DNA, 407 bp, Zea mays
  unsure (1)..(407): unsure at all n locations
  Clone ID: MRT4577_180842C.1
cgcccggtgctcttcttcggccccggtagctttcgctgccgtcctacggcaggtgcccaagtcttcttcgggcccttcaacgacgacgagcactaccaggtacgcccacctttcgtctttccttcctgctgtgcaaaaccgagcgccaagaccctaacttactatttgtattcggatctgacctaatttcaagtgtttatgcatgtattatgcctagtaacttcgattgttttgcaaatactatcgggtgttcatgtttacaccgatgccctttactggatctgcaattggtaagtatatctgactgtacagtgtacagagatggatgaatcacgaatgacaaatctacagtcatttctcatgtgcggcctagttgatttttggnaaaataaatattgnattttctt

SEQ ID NO: 88646 - DNA, 414 bp, Zea mays
  Clone ID: MRT4577_180843C.1
ccgctttgtagcgtgcagattcgtcattgcgccaggagcgtagggttgcgccgccacggaacctcacctccatcggcgcctagtgcctgaattcggaccgaaggcctgtgcgggacctgtgtgaagccagccacgacaatttcgggtgagattggcggctcatcggccaccaattgctcaccggagttccacactgtcgcggatcctcgcattgccgtgggcaaggagctacgcgtcttaaccaccgacgagcaagtgaccgaggacccaggtgttcagcaagtggaaattgctgaccaggagcttcgtgaaggagaagaataggtggttcaagatgaggcgtagaacgaaatgtacgagctaatctaggtggcgccttccagtcaactttatggcaccgaggaataatattta

SEQ ID NO: 88647 - DNA, 299 bp, Zea mays
  Clone ID: MRT4577_180844C.1
gccggccgggccggggctcgctccctccctccctccctcccgcgcggatcacagaagggctcacggtcacggccggcctcccaattcgcaacctcgcctccgcctctcctcctaccccctccgaaaagcaagctccgaagaatagtggagtaataataatggtggtggtgcagtggttgagggcccgaaacgatgaacagatgggttggttggattgggttaggtgtatgtatatgtcacacgcaactttggacagaactattatactagtacaaaaaaaaaaaaaaaaaaggtcccta

SEQ ID NO: 88648 - DNA, 660 bp, Zea mays
  Clone ID: MRT4577_180845C.1
tttttaaaatcctcttttttttttttttttttttttttttttaaatttttttttttttttttttttttttttttttttttttttttttttaaaaaaagcttgggggaacattagggggggggccacttacacataaaaaacggtgggttacaaaagggttccctaaacccccgagagcggggggaaactaacagggggcttttgggtaaattttggggctttttttacgggcaggctaaacaaaaaaaacttttacggggggaccactacccacgtttttttactttgactttgacagaacaaaccacaacccccacgggagttggagccagaaacaaatgctgttaaaaagggaacacccttccatggggggcacgggggccccataaggccagggccggccagggaacctaaggagggggggggaacacccgaggggcgctgcttttggggctgccggggaacttggggggtttttcggagggccggggtttttcccggaacccccgggggggggtgccgctttttggggggcccaagttcaacgccttgagcaccgaatctgttttaaggggggggggggggggggcctgctccccgaaaaaaaggccccttcctcttggggagggaggggggggaccaaccggggcgggggggttt

SEQ ID NO: 88649 - DNA, 125 bp, Zea mays
  Clone ID: MRT4577_180846C.1
caataagtgcattcacctatgggaaccgacttcaaattactggaacgttaattccaacccatttggtggacacctctgctaggggtggaaatctacaagggagtcccaccggagccgacatattt

SEQ ID NO: 88650 - DNA, 1264 bp, Zea mays
  Clone ID: MRT4577_180847C.1
attgggtccctcgaggccggccgggatatggtattgctgttgtctttgtgatgtttataacaacacttctagtcactttagtaatggttatgatatggaagacaagcctgctgtggattgcactctttctagtaataattggtggagcagagctcgtatacttatcttccgcattctacaagttcactcaaggtggctacttgccattagcttttgcaggaattttgatgtttataatggccacatggcattatgtccatgttcatcgatacaactatgagctccagaacaaagtatcaagtaactatgtggcagaattgtccgcaaggagaaatctggccaggttgccaggaataggctttttgtactctgagcttgtacaaggcatcccacccatacttcctcacttgatagaaagggtaccttccatccattcagttctcgtgattatctcaataaagtacttaccgatcagcaaaatagaaacaagcgagaggttcctcttccggtatgtggagccaagagattacaggctattccgatgtgtggtgcgctatggatacaatgataaagtggaagacccaagagaatttgagggcttagttattgaacatctgaaacaatttatccatcaagaatcattttacagccaaggagataattcaacagaagaagtagaagatgcaaatgagccttccgtcagagttcaaggggcaacattgtccgatagttcttcagatagaagcactgctgctccatcaaatggatgcatctatgagatccaaacaatacaaagagagatggaggatggtgttgtccatatgctaggagaagctaatgtggtggcagaaccaaatgcagatttcttcaagaagataatagttgactacgcttacaatttcatgaggaagaacttcagacaaccagagaagataacatgtgtccctcataacagactgctccgggttggaatgacatatgagatctagggcgatgctgaaatttgtggaacacagcaatttaatcaaagcaggcaggtggttagctacttgacaatggagtcggtcttctcagtatcaagtcaggaaatggaagggttctgttcaaagaggtggagaaactagagtacatataatgggtccttatgtcataaacctgttagaaatatttcgttttaacttactcatgccaaatatgatgggtacgaaacactctgtattgttctaaacttctaatgacagtaaacggtgttatactgttgcct

SEQ ID NO: 88651 - DNA, 304 bp, Zea mays
  Clone ID: MRT4577_180848C.1
gctgttacttgccttgattggatagaaacggctcgccggtatgtaccaggcaagctgtatgaatgggagctcgctgttaggggcaaagaattagcgcagtacagtgcccctacccggaagaacgggataaactggaggggctaagagtaggcacataggcctgatagcacagattgtcgcctttgacgtgccatgacacgttgtccaataaaggcaccttgtgccacagtggaacaacactcgacgatagctcgaggtacaagggtgataaatgaaggatgccagctgcgattgcctgttggat

SEQ ID NO: 88652 - DNA, 256 bp, Zea mays
  Clone ID: MRT4577_180849C.1
aattcccgggtcgacccacgcgttcgcggtcgctaggggctggccagacagactactggcccagtataatgccgattaaccaagacggctactagtacaatacaccgaactacagattcgtgctcgcgatttaccagacacgacatcacaacccatagcatatctgctaggatagcacgtgacatggctcttgctatctgccactcgcatgagatgacacgaaactgtctcaaagttcctctgaccaactattcag

SEQ ID NO: 88653 - DNA, 245 bp, Zea mays
  unsure (1)..(245): unsure at all n locations
  Clone ID: MRT4577_18084C.1
ctaccctgcgctggcgtgatatggcacgtgggcccggcctagcgagagccagggataggcattgctgctgcnaatctcaagacgctctcgctttccatgcttttggagaagaccgttgaccatctcgcgtccgatgtgcgcgcgtatatttccacctccaccatttacagaacgctgatagcttgcctagctcgctctccagatgggctactgcatgccatcccanccgtgctgctgtatggtcc

SEQ ID NO: 88654 - DNA, 259 bp, Zea mays
  Clone ID: MRT4577_180850C.1
acggggcgacccacgcgtacggccgagagagtcagagccggcgcccctgtttatctcgctgccgtgctcgagtaaatagctgatggggttcttgagctggacaacaatgccgtacgtgacaacaagaagacccgcatagatccgcgcctcatacaaatagccgaccgaatcgacaaacagatgttccgattgctgggcacggtgaccatcactagcggcggtgtaatgcccaacattcataacctttcgctcccttaga

SEQ ID NO: 88655 - DNA, 784 bp, Zea mays
  unsure (1)..(784): unsure at all n locations
  Clone ID: MRT4577_180851C.1
ggtaccctncgagccgtccagatttttttttctttcctccccgctcggaccgtcccgccccggctgtctctgctccgcccggttgtcttctctcaccggcgtccggacaagggcggcgccaaacgccaccacaaggttcagcgcgtcaacacgcaggctctgctccgcctggatctcgcgccccggcctctgctcagcgatctcacgctcaggcccgcaagctctgctctgtcacatcgtccagacgaggctttcttcatcctcggtcaagatccagccctctgctccgccgatggctcctgtctgcatcaagctggtcctctggtcagtttggatactgctgggtttttccttccctacaagtttgattgaaacaaccttcagtgctagtataacatatcacacactaatacaattattatcaacatcactttgaatggtcaaaattaccatgaacggtccttctgtgtagaaactgctttgcgaggtcatggtcttgcttttcatttgattgatgatctacctgtgcctactgcaaataacattaatgcttctgaaatcaagacttagacaattaatgatggaaatgtgatggctgatattgttaacagtgtcaagccatccatgattatgagtctttcttcattcaagactgcaaaagctatgtggttttatttacagaagcgttatgttcaagatagtggtgctcttcttcatactcttatgtagaaatacatttaatagagcaacatgatctgtccattgataattattattcagcttt

SEQ ID NO: 88656 - DNA, 2416 bp, Zea mays
  Clone ID: MRT4577_180852C.1
cattgggtacctcgaggccggccgggctccttctattccatcacccccagcgtgcgcgctgcactccctccctgcccctgttctctctctcgtggcgacggcgacggcgacgactgggcggccgttgctgccgccctactcgccaggcgcccaggtattcttcggccccttcgccggcgacgagtgtcaccaggttcctcgtctccggaacgcagtgcaaagcagatcgatctcggcccagcaggggcctcacgacttgactcccaagactccagggctggatcgtgtttcttccagtgtgcaagcttggatctcgtaggtctggtttagaaaggaccgtgcttgctctttgctgccgcaatcatgcagagtgggggcgacatgaggcctgtgcacaacagtgtcgatacagttaacgctgctgctgttgccatcgtcaccgcggagagccgcacacagcctcctgctgaacagagaaggaaatgggctgaccggttgagcgtgtacttctgctttggatcacagaagaatggccggcgcatgcgtgtcaaccatgccgcacttgtcccagaacctgcacctcaaaggacagatgcgcctgcagcagaaattccaaaccacccaccgcctcctgtgttcccctttgtggcaccgccatcctctcctgcttctttccttcaatcagaacccacatcaatcgtacaatcaccaagggctggagctccagctttttcgcccctctcaccaaattcccaatccccgacggggccaccatccatctttgctattgggccgtatgcacatgagacacaactcgtctcgcctccagtgttctcggccttcacaactgaaccatcaactgcccctttcactcctcctccggagtctgtccatctgacaaccccttcctctccagaggtcccatatgcaaagcttctgacatcgatcaacaatagcaagaatggtgaagcagggggtgatctccagtcgtatccaaactacccagacagcccaattgggcgcctgatatctccaagctcgggctgttctggcacatcctccccattccctgaccctgagatgcaggcttcttcacgcagcgctttacgcttgttcccagttcgtgagccccctaagatattggatggcgagggcgttgcgacacagaagttgatacctcgccatatgcgcaacggtgggtccctcttggatggccagatctcagcagctgtaccagttgtggacttctctgcccgacttcaacccaacgagcacgcaatggatcaccgggtgtcattcgagttgaccgtcgaagatgtcgcgcgctgccttgagaagaagactgcaatctccggggattctggcacggcatcattccaccttgcaccgaccggcagcggcgaccaccacagagaatccaacgaggcaagggcagggctctacgtcgacgaatcataccatgacttgcccgagaaagcgaggcggtccctgtccctgcgcctggccaaagagttcaatttcaacaacgtcgacgtcggtagcgtggagccgagcgtgggatccgactggtgggcgaacgagaaagtcgccgggatgacaactgagccaaaaaagaactggtctttccacccggtggtgcagcctggggtcagctaacctttgcactgaccataatgatcttatacagggatgaaggaattagcttcttctgcttctgcttctgcttcagtggtcgattccttagggatgacttgccagcttgttctaaacatgcagctagtggtaagttctggatttagatagtaataagtaatggggtgtccaccgtctaatatcgtcatgggatactaaaggtttttattctgggagatgtgacaaaccgcaaactctttggttaggggtcggtcggaactgtcctgttcgtctgttttatcctgataccggtgctgtgttgtgtatgtacataatgaagtagttttttttaaaaaaagtcaattaaaagggtagaacagtttccttcgataagttgccagatgctaccaaattgcttgtgattgttccctgcctgttcatgatattgttattacagtttatacgaaacagaatttgtagattcccgatgggggcgtcccttagaacaaggatggcaatggccctgggggtctttaaacaatgtttgtcatcccccgtttttcccaaggacatgtcccaggaactgccgagcctaatcccccccactgagcccaaaatttttggaattttcatgggcattcccattcccctgcaagggtcatgtgagccccctaaaaaaaaattggaatcttttttgcgggggcgggacctgtgtttttgtgcgcccggacgtatattttttctgaaatgaaacccccaaaagcccgtatggggtttttccggg

SEQ ID NO: 88657 - DNA, 349 bp, Zea mays
  Clone ID: MRT4577_180853C.1
gatttttatattactggggtgctgatccaactttattggactccacatgagtgcaacatgagtgcattactgatgctattattggaatggatgtcatctgacaagcaaaatatggaatgggtaacactgcagggtacgcgctgccaactcttcaccagattgatcctgttggtgcacaagtaactgcacttgaggtgggccacacaagagaactagcttaccaaattggacacgcatttgataggcgtagcaaatacctacctgaattaagaggagctgcattatatgctggacgcccacataaaaaaccacaaggatctgctgatgaatgcatgcccccatattgtgg

SEQ ID NO: 88658 - DNA, 429 bp, Zea mays
  unsure (1)..(429): unsure at all n locations
  Clone ID: MRT4577_180854C.1
ccggccgggaacctccatacccgcttcacttcctntcccaggtgctgcccaggtaagtcggcggcggcgatgacaacgcgcttcaagaagaaccgcaagaagcgcggccacgtgtccgccgggcacggccgcatcggcaagcacaggaagcacccgggaggtcgcggtaacgccggtggnatgtatcactctccgtatcctcttctatttgtaccctccgcgttacttccttcattttgttttgtgtttctttgttcggcttctggtcgcgttctgttgtgtcttgctcccacttctcttttctcctttctcccctttcttctcttttttccttcttttctctccctttttttttccgtttttttcatttttgtttttctcttcttcttgctcttccttcttcttcttctctttttttttttttccctc

SEQ ID NO: 88659 - DNA, 463 bp, Zea mays
  Clone ID: MRT4577_180855C.1
cccacgcgtccgcccacgcgtccgcccacgcgtccgcccacgcgtccgaactgcccctttcactcctcctccggagtctgtccatctgacaaccccttcctctccagaggtcccatatgcaaagcttctgacatcgatcaacaatagcaagaatggtgaagcagggggtgatctccagtcgtatccaaactacccagacagcccaattgggcgcctgatatctccaagctcgggctgttctggcacatcctccccattccctgaccctgagatgcaggcttcttcacgcagcgctttacgcttgttcccagttcgtgagccccctaagatattggatggcgagggcgttgcgacacagaagttgatacctcgccatatgcgcaacggtgggtccctcttggatggccagatctcagcagctgtaccagttgtggacttctctggccgacttcaacccaacgag

SEQ ID NO: 88660 - DNA, 938 bp, Zea mays
  Clone ID: MRT4577_180856C.1
cattgggtcgatcgaggccgggccgggctccttctattccatcacccccagcgtgcgcgctgcactccctccctgcccctgttctctctctcgtggcgacggcgacggcgacgactgggcggccgttgctgccgccctactcgccaggcgcccaggtattcttcggccccttcgccggcgacgagtgtcaccaggttcctcgtctccggaacgcagtgcaaagcagatcgatctcggcccagcaggggcctcacgacttgactcccaagggctcccaaccttgcaggctgactcgatctctttggtttcgtggaccgtgatcagactccagggctggatcgtgtttcttccagtgtgcaagcttggatctcgtaggtctggtttagaaaggaccgtgcttgctctttgctgccgcaatcatgcagagtgggggcgacatgaggcctgtgcacaacagtgtcgatacagttaacgctgctgctgttgccatcgtcaccgcggagagccgcacacagcctcctgctgaacagagaaggaaatgggctgaccggttgagcgtgtacttctgctttggatcacagaagaatggccggcgcatgcgtgtcaaccatgccgcacttgtcccagaacctgcacctcaaaggacagatgcgcctgcagcagaaattccaaaccacccaccgcctcctgtgttcccctttgtggcaccgccatcctctcctgcttctttccttcaatcagaacccacatcaatcgtacaatcaccaagggctgggagctccagctttttcgcccctctcaccaaattcccaatccccgacggggccaccatccatctttgctattgggccgtatgcacatgagacacaactcgtctcgcctccagtgttctcggccttcacaactgaaccatcaaactgcccctttcactcctcctc

SEQ ID NO: 88661 - DNA, 337 bp, Zea mays
  Clone ID: MRT4577_180857C.1
cccaaaacagggtacattagtgcaattttaatgcatgagggttacccaagcctaaaggtctaacaaaaaaacaaggccccaagataatccaagacgaatggtaaagggtggaaccaaaaaaaaacttttggaacttgacagaactactataggttcccaagtaaccttttacaccaccagtacattaggtatagatttcatattgaaataaacactttgggaggaaggaatgaatccctacacggcgaacacgccttcttttttttaacagggggttaatgaacaacaaaagggaactttaatccattgacacccgtgtctgccggggttgcttttt

SEQ ID NO: 88662 - DNA, 292 bp, Zea mays
  Clone ID: MRT4577_180858C.1
ctagccggccggggccatttcgaacccaccgattccctgcattcctctcccctgcctcctctctccccctagggatcgtcgacagaatcgtaagggggccgagtatgcgagttaaggaagccatggaacacaagggggctgggtggcaggcccccgggggacccatcctctgcatcaataactgcgtcttctcgggcaaggcgcggaccatgaacatgtgctccaagtgccacaaggagatgatagcgaagcagagtcaggccaaactggctggctgctgtatcgacagcgc

SEQ ID NO: 88663 - DNA, 347 bp, Zea mays
  Clone ID: MRT4577_180859C.1
tgaaaacacttatcgatattatatattataaaaaaattcttattctatgatataaatttggtctgaaaaaagatttggttcttcaggaagtgagcatgagctacccgttgtacacagtgacaagctgccagtgttgttcggttttcatactccacacagagagagagagagagatcgtgcctcctctcctactatgtatgtagtggtacgacaccgtagagcggaagagggcaaccaaaaaaaagttgcacccacatatatcatcgtgcggcggttatttgcaacgtgatgcgccgatctgatggctgcatcttgggcgccgccccctcgtggcgcctgtggaacgc

SEQ ID NO: 88664 - DNA, 550 bp, Zea mays
  Clone ID: MRT4577_18085C.1
cccctcctcgagttttttttttttttttttttttttttttttttttttttttttttttcaaaacccgaccacccaccacgaaaaaaaacccacagctaaaactccaaaaaaaacatccccacaaacccacaacatcacaatggacgggggaagcggcccttggtccccatttgggaacccagcccctgacccggattgaaaccatgggcccatcccaaacactagggaaagcggaacaaaagggacccttccgggctaaggctgggtttggaaaatccaaaggctttgaaagcaggcccctgaaccagaaggccaaccccttgggggggggttcaagcgggttgaagcccacgaaaacaaggccaaactgggacaagaaccctgccagccattcaaagttgccgaggaaagaccaggcaaagaacccacccacgtccgctcccgggcctagggcctttttaagcgggccgaggaagctccggaaaaaccgccccctcggggcgtcgcccaggaacgggcctggggccaagtttccaggctggcccattcc

SEQ ID NO: 88665 - DNA, 336 bp, Zea mays
  Clone ID: MRT4577_180860C.1
gacgtatcggcggtccatgaaaggtagacatccagcatgcgacgaaagccgaagatgggtcggaccaaggataccgaggaaaagtgcaccggaggcgcagccccaagtcaagcggtgtggcacacacaaggggggtgaggaagtgaccacctctaccggaggggtgaagaattccacacatgttcatgcacgggacagcggtgctggtctagattctcacttaccaaatatgcacggttctaatgatccccaagctgcactaccaattccttgcacgtgagatcggtgacggcttgattacagatgtagctgttaatgagacacacctgccttgac

SEQ ID NO: 88666 - DNA, 325 bp, Zea mays
  unsure (1)..(325): unsure at all n locations
  Clone ID: MRT4577_180861C.1
gcgcatcgancgtgngnnagtctcgcgtacatcagcttatcgttcgcttcgagggcagaaagaaaagaccatcaaagtttcacttcagccttatccgagttaggggttcggtttttgacccaacctttgacgtatcgaaaccttaagtttcggatcaggtctgagcaatctggttggtagaacctttggtcttagagagtcaagttttatgtctgaattagacgatcaaattcctactgccttcgatccttttgctgatgcaaatgctgatgactcgagtgctgggtcaaaggagtatgtgcatattcgcgtacagcagcgaaat

SEQ ID NO: 88667 - DNA, 665 bp, Zea mays
  unsure (1)..(665): unsure at all n locations
  Clone ID: MRT4577_180862C.1
ctgtgcggcgctcgagccggccgggtctcgacttcgacttgactacttacactctcataatcccactatgaccatcttcggacctcttggcccttccctcgccggacaaattcgtgcttcaaaaggcttacatgcttggttgaagccagtagctacctggtactgtaatgttgcaggataccggaagatggggttgaagtacgatgacctcctctgcgaggagaatgagtcagtgcaaagggcattgactcgcctgacccccatcgaatcctatgaccggtcattccggttcaagcgtgcgtcgcaagccagcgtgctccacaaacctcttcccaaggatcaatggactccggtggagaacgatgtccgctacctcaagcctcacgtccaaaacgtcgaagccgagctccatgagcgcgaggtctgggacactatggaggttgttcgcaagtagagtgtcgtatgcacctgttgggaggagtagttaccctgaggcatgaagttaatggcacttcttatacattcatcccaaacatatgaagtactaggaacccatagagtttgcatggatatatgaagtacacttgtcctcgcnnnnnnnnnnnnnnnnnnnnnnnnnnnnnnnnnnnnnnnnnnnnnnnnnnnnnnnnnnnnnnnnnnnnnng

SEQ ID NO: 88668 - DNA, 333 bp, Zea mays
  unsure (1)..(333): unsure at all n locations
  Clone ID: MRT4577_180863C.1
gcacgagcaaagctagagacaaccgctgcgtaaacgaatccatcgccatggcgtctcgtctcgttgcggcggcggcctcctcctcccccctctcctcagcgtgcccccccatcagcttcagcctttaatctncntacgccgcnggncgccttgtcccggtagccccgacaagnaccggncccccatgggntnnctgncggaaagngttgccccccttnnngtggnnaannagaattcccgnnttgnagncnnccgnaggcaangnttggtaatggtaagagccacctttgttctaagccaagccctctcaatgtggggggttacttttttatg

SEQ ID NO: 88669 - DNA, 302 bp, Zea mays
  Clone ID: MRT4577_180864C.1
ggtgtggcatgttccaacacaaatgcatagaaggttctcactgaaacaggacgcctcacaccaggcggactggctctttggtacatattaagcagacgatgtcttccagttctaatttgaaggagaaccttgtaccaaatatggaattagttgaactagagaagagcacacaagatgccaggcaacctcttgctaccatttcttcgaacaaccaagataacatgaatacagttaaatctcaaaatcttgtcccaaccacaaaacaattattaagtccagaacaacattgtgtgaagcgggag

SEQ ID NO: 88670 - DNA, 524 bp, Zea mays
  Clone ID: MRT4577_180865C.1
cgtaccccgaccccggccaccgtgtggaaacagaaacagcaatggcggggaggctggtgccgagcacgaagaaggcgatggagcaccgggaggagaagcccaaggtgccgtcgagcgacccgggccccgaccccgacctggtgcagctggtggccgggcagcagccgcagctgcagcgggagcagcagccgcccaacatctcggagatgaagccgctgacgcgggaggcgtacggcggcgggatgtacgcggccgaggaggagggcgatcgtgattcttggttggttttctatttggatggggcacatagttcataaagcatggaaatgtgtgcatgatggtttgcccacgctacaaatagtgatggaatacagccaggttcttcggagcagtctcatactgatagggattccaggaagtttctcctttttaattgcatgactgtaatagatcctgagagattgcttttactttttctagattcatgtgctcaaaatgttactcacgtgtaatgatttctggac

SEQ ID NO: 88671 - DNA, 266 bp, Zea mays
  Clone ID: MRT4577_180866C.1
cttccgtaccccgaccccggccaccgtgtggaaacagaaacagcaatggcggggaggctggtgccgagcacgaagaaggcgatggagcaccgggaggagaagcccaaggtgccgtcgagcgacccgggctccgacctcgacctggtgcagctggtggccgggcagcagccgcccaacatctcggagatgaagccgctgacgcgggaggcgtacggcggcgggatgtacgcggccgaggaggagggcggccggcggaggggccccgc

SEQ ID NO: 88672 - DNA, 258 bp, Zea mays
  Clone ID: MRT4577_180867C.1
tcgcaaaaatatcattaaaggcatccaaggtttattatctcttgctgaaacggcaaatgagacagggtttcaggacctcctgctgggaagccatctgtttgataggttgtcttgactgctacaacgcagagaggttgaaaagaaccacgtgaggtcctagaccgtctctctggtgatgaaattggcctgcactggacgagagccatacgttcataggctcctggagcttaatactcgtcacgagcctattgacattct

SEQ ID NO: 88673 - DNA, 367 bp, Zea mays
  unsure (1)..(367): unsure at all n locations
  Clone ID: MRT4577_180868C.1
acgtgcacaattatcaattaactgtatacactaaataatatagaaaagaaaggatttcccaattaatttacatctgatagttcacgttcacaatgaaccttgtcaagctcacagcntttcaaacccattctaatctaccagccaatccccatgtgtgttaaacaaccaatngatttaactgacccagtgtctccagtttgaacaatctgtattctcctctttggngaggttggttctttccccgtggcgttgcccgttcggtcgccttgcctcttgggggaactcgtgcatctttgctccggcctggctgtcggccctcttgtcgtctaaggcgccggccttttcgtggtagtcttctcccgtccgt

SEQ ID NO: 88674 - DNA, 306 bp, Zea mays
  Clone ID: MRT4577_180869C.1
aaaaaaaacacaaaaaaatataaacaaaaccataaacaaaaataaaaaaagcgaaaaacacgctaaattttaaactacaaaataaaataaaatacacaaaaactcaaaccgacggcccaacatctcctatcgaacactcatccggatcctgtcaacaaacatcagtctacattgatatcttctctagcagtctgttacctggaaattctaaactgcttagccataaaccctgtactaaaacactgtactatcttattcggtttgacccgatttaagacgcttgggacaaagatgcatataccctac

SEQ ID NO: 88675 - DNA, 598 bp, Zea mays
  Clone ID: MRT4577_18086C.1
cccaaagtggccccatttgcacgcctcttttgacgctgcaggtgcttcagcagccagccaggaccgcggctgcttgccctcggtgggcttccgccccacagccaacttcagtgagcaaggtggaggtggctcgaagctggtcgtgaacggcatgcagcagcgtgtttccaccataaggtgaagagaagtgggcacgacaccattcccaggcgcgcactgcctgtggcaactcatccttggcttttgaaactatggatatgcaatggacatgtagcttcgagttcctcagaataaccaaacgtgaagaatatgcaaagtccttttgagatttgctgtagctgaaagaactgtggttaggttatgagtttcttcctggagactgatccatacatgacatgctacctcgtgctgagtttctgaggtgaagccatcgaaacatgaccgtgtggttcagtacccttgctgccttcagtgtctgataagctagctctccagtttgcagtttctctgaattccagcatgtctagtctctgcttatcttttgcatgtaacgtgatggtgacttagcatacacatctattcatccatctatgttctc

SEQ ID NO: 88676 - DNA, 911 bp, Zea mays
  Clone ID: MRT4577_180870C.1
tttagcaatacatgccccacgcgtccgctgagtcaatgaagatggattctgtctgcctgaggtacaccagaatattttggaacttgatcattgcgccttggaagtttttgtttgcttttgtgcccccataccacattgcacatggctggattgcttttatatgctcactggtcttcataagtggtattgcttatggtgttactaagcttacagatcagataagctgcgtcacaggagtaagtccatatgttatcgcattcacagcactggccgctggaacctcatggccagatctagttgctagcaagatagctgctgagcgtcaagtcaccgcggactctgcaatagccaacatcacttgcagtaactcggtgaacatatatgttggcattggtgttccatggttgattgatacagtgtacaacttcttcgtttaccgggaaccattgtacatagataatgctgccggtctcagcttctcccttctagtcttcttcgcgacatcatttggatgcataacggttttggttatgcgtcgtattatactcggtgctgagcttggaggccctaggctatgggcttgggttacatcagtctacttcatgatcctttgggttgtttttgttgtgttttcccctttaagaggatctggagtaatatagacaggaatttaacaaaggtagtgggggcttcgattttccataaattttgttggtattggttttcatatccccaaaaaaaacacctattgcgggtgaaaattagggcccgtgaattagggattatagatagatacaagtgcctgttctatataatgattactgaagccaccaatatattgtgtagtataattgaagttattatatcagaaaaaagggagaacagttggatagctcttaaattttgattcc

SEQ ID NO: 88677 - DNA, 197 bp, Zea mays
  Clone ID: MRT4577_180871C.1
atatttttttttttttttttttttttttgggtgggatcttatacacacactgacggtccatagcataccacccgacatattggggaaacaaacagaaccaataagggtccgatcaactacccactagagcccagcactctaaaaccagacgaacaaccccaccaaacaaccacgacacccccccaggaccccaacac

SEQ ID NO: 88678 - DNA, 266 bp, Zea mays
  Clone ID: MRT4577_180872C.1
aactaaagttaaaactgctagatctgttagaacatctcagtgctatattgacttgaatgatgagccaaagagaaaaagattaagttcattttaatttatcattattggattgatctatttcagattgctgctcttccaatatcaacattttcccttaaaatgaacttaatcttggaagagcagcaatctgaaattgatcaatacaataatgatccattgttgagttcgaaagaaggtaactactttgacatttgagctggtggaag

SEQ ID NO: 88679 - DNA, 662 bp, Zea mays
  Clone ID: MRT4577_180873C.1
ctcgaggccggccgggactcacctatctagacatcactactcacgttcgtacaccacagcagacaaattggccatggagacgtgcttcacagagtggatgctgccttccccgctggtagttaggaccggctcctctcctccaacctggtgctgccgtgcgaagcggtcgctctcgccgctgttcgtcggccgcgtcgccacccgccggacgaggaacatctgctagtccaaaaacgcactgcaatatcctctgacgccgaacaagaagaactgcaactctctgatgatgacgtgcgagactacgatgctgcagcagttctgggagacgtgcctggcaacaaggcgtatgatcgataccactgatcgacgagctggtcaattactacgcctgtctagatcagctgttgctgggagatctgcgacgacagcacccacgcgacgaccacatacagaatccgcagaatacccaccgggctcatcttcaagggcactgacatacaacagagcgtactaacagccgtacaaaagtccacagtcaccaccctcatctgcaagtatctcaactacgtcatgaacatgctgtgccatgctatgcctcgacctgtaaacacatatgtgtatctctagtaggctctgcgtacttactgtgagctatctatgca

SEQ ID NO: 88680 - DNA, 336 bp, Zea mays
  unsure (1)..(336): unsure at all n locations
  Clone ID: MRT4577_180874C.1
cctcgtccgctgagcgtnggtncnngcggccggagggtactntnnttttttttattttattttttattttttttgtttttatttttttttttattttttttttttttttttttttttttccccaacaaaaagtccccaaacatcttttgccctaaaaaaaaatcccctcccattaaaagggtcaattcaggccatggcggggggggccccccaggggggggggggaccctacgtaacccagggccggtaagggggaaaaccagcgggcgaggaacccagccagggggccctttcccgtctaacaacggcaccccgggcgggccccggcggtggggg

SEQ ID NO: 88681 - DNA, 632 bp, Zea mays
  Clone ID: MRT4577_180875C.1
acaacaattgtctataatttatcagccaagagtatgaattctaaattctttgaagaagagaaactataacggtacctgatttgtactgctcagtacacttcttcgtttgaagaacagaaactataacagctacctgattttgtactgctcagtacacttctttgtcctccaagcatcaatatcaaagaaattcattccgtatgcccatccacatgcattaggattaaacctttcattgataagtcaaagcaaagcgtgcgtgggggtgaatcctttgaccgtccagcatgggtggggggctggcagtgttgggggcgtgccgagctcctggccatggggtccactactagcgaggggcgcagctgggggtgaacccgacgctggcagcatggtgggggcttcgaaggtgaagccgtcagtggcccgagctgagctcctagcgagatgggggatccgccggcgagaggggggagctcctggcagggtgggggatccgccagcgggaggggggagctcctggctgggttggagatccgtcggcaggagggggcggagctcctggcggggtggtggagttgctggcaccgtggtccgtgatgggagctaatggagctcctggcggggagggggat

SEQ ID NO: 88682 - DNA, 160 bp, Zea mays
  Clone ID: MRT4577_180876C.1
gcttaatccaaatagtatacaaagactgaggctgggagacttttggttcatggagcacatcttttcatggaatagcaagcttattatttacctcacacgatcatgcttttatttgaaaagatggcatttctacattaggattttgagagagaaaactctg

SEQ ID NO: 88683 - DNA, 337 bp, Zea mays
  Clone ID: MRT4577_180877C.1
ttttatttttttttttttgcaacaaaatcgctaggagcaaaaaaaaaacttctactatttccaatagacacaatgaaattacctaagtttaatcattggaattgcacaacttaacttagacataaaagttaaccctgttggggcgccttaaacagtaaacaaaacagccctgtgaattaacaaatattccaacgaaattgtgatattttactgttacctaatattaaatacattttaagctttaccaggggggttagtaccaaacccacattttgtggtttaacggtcttggattcgggcaaccttttgtgggcctttgaggaccttggaatttttt

SEQ ID NO: 88684 - DNA, 2548 bp, Zea mays
  Clone ID: MRT4577_180878C.1
aattcggcacgaggtgcctttttcgtccaattttactgatatgcgatatgtgaagtaaaattgacagctactccgttatccttatccatcactgcaattcactactggtgcttcattatcatttcttatttgttggagatagcaaaatattatagggtgagcctcttagagcaactccaaaagaacgtgtaaactaaccccaaaatatatattagtcaagaatagtggtttttcttactccaacagctctctcattcttccccaaaaaattagcgtcccgcatccatagcctcctctccctcatattttggtgtgttccatccctccccaatccattcctcaacgcatcggatcatccacaacatctcgacgactatacagattgcgccacatgtcacatttaaaggaactgttggagtacccatcataattcactcttaatattttttagcatgctcttaataatcaatttttggggtaaaatttttaacatccttttggagttgctcttataagttattaagttgttgtggttctaggaataactaattatatgttttttggtgagctcaaagttggccggggcgcgggtcaggggccatttcatctatccatcccgcagctcttgtctctggcaaccgtacgcccaaccgtgttcccgcgccgcccacgaactactctccggcgctgcccatgacgacggtgtcgcgcgcgctcggctccgcgttcgcgggcttcacgcgggcgcccgcggtggcgcagaccgcgacgaccctgccctccccgtacggctcgtcggctctgcaccagcactggcgctggagccgggcctgccgcacccggcggttctcgtccggccgcgcggcacggattagcatgagcctccgcgccggtatcgtcgggcttcctaacgtcggcaagtcaaccctcttcaacgccattgttgaaaacgggaaggcacaagctgcaaactttcccttttgcaccatcagcccaaacgttggtgtggtggctatccctgatcctcgtttgcaggtgctctcaaaattaagcaaatcccagcagacggtcccaacatccattgagcttgtggacattgctggtctagtcaaaggagcaagcaaaggagagggactaggaaatcaattcctttcaaacattcgtgaagtggattccatacttcaagttgtgcgatgctttgaggatgacgatatagttcatgtcaatggcaaggtcgatcccagatcagacattgatgtcattaacctagagctgatattttcagatcttgaacagatagagaagaggctagataagcttaacaagagtaaaacgaaagatacccaagtaaaagtgaaggaacaagcagagaaatcaggattggaaaaaattcagcaggcacttatggaaggaaagcctgcaagatcggtcgatttagctgagcatgagaaagaagctataaaacacctttatctgctaactatgaaacctgtcatttatgttgctaatgtgacagaatctgatcttgctgaacctgatagcaattctcatgtcaaagaggtggctaaagcagcatcagacttgcagtctggtatggttacaatatcagctcaggttgaagctgaactcgccgagctacctctagacgagagagcagaatatttaaaatctcttggtgttgctgaaagtggactaggaaatttggtaaaagcaacacataaattcggctcgagaagaacttatttcacaaccggagacaaggaaacaaaagcttggactattctttcaggcatgactgcgccacaagcagctggagttattcatagtgacttccagaaaggattcatcagagctgaaactgtatcctatgatgattttgttgcagctggttctcttggagtagcaagggagaaagggctgctgaggttggaagggaaggattatgttgtgcaggaaggagatgtcatgcttttcagattcaacgtgtgacagcaatagtagcaaaaggcttcaaaaacaccggaatttgtactaggcagaatatagtttgcccatattgtgagattttttttttgccacttgaccaccgattattgatctaccacgctggtagggcagctttcttagatcaagcctaatactagacagcaaacattgtgagcttctcctaaaacataaagttaaccagttgtccaccgagtatcaatctaccacgcttgcagtgcctcgacagtagacataattaagttctgtccatgagtgggatttggggctttggttggcttgcgtgcccactcggtaatcaccatgaagcagaggatggaccgtgtcatctggagcagcaacagcaacagagtgtgggctatccatttgttgtagatgaattatgcgatttacatgcacaattctttgcataaataaaatatagtacacactaattcaactcaattttatctcaattctcatcggtttaatctctggtgacatgttgtactcgtacaatatttagagaagacgagattgtgtgtcattgcaacccacagacatt

SEQ ID NO: 88685 - DNA, 434 bp, Zea mays
  Clone ID: MRT4577_180879C.1
tagagtgattcatattatccaagaggactggggtgcatatcagcaggccaacacgctctttgcaaaggctatcacggagattgttcgcgatggcgatctggtctgggttcaggattaccacctcatgctgctgccccggcttttgcgggaagaggtccacaaccagcgtgagagcgatcagcctgtcaagaatatcaagattggattcttcttgcatacgccattccccagtagtgaggtctacaggattctgcctgtgcgcaaagagatcctgctcggggtcctgaactcggatctgattggcttccacacctacgactatgcgcgtcacttcctctcttcctgcactcgcatcctcggtctttccaccatgcccaacggcggtcgacttttaacgggtccctatgcccaagttcggcacccttccccattgg

SEQ ID NO: 88686 - DNA, 1615 bp, Zea mays
  Clone ID: MRT4577_180880C.1
ctcgtccgcccacggcccccgattagcatgagcctccgcgccagtatcattggtcttcctaatgttggcaagtcaaacctcttcaacgccattgttgtgcgatgctttgaggatgacgatatagttcatgtcaatggaagggtcgagcccggatcagacattgatgtcattaacctagagctgatattttcagatctttaacaggaacaagcagagaaatcaggattggaaaaaattcagtaggcacttatggaaggaaagcctgcaagatcggtcgatttggctgagcatgagaaagaagttataaaacatctttatctgctaactatgaaacctgtcatttctgttgctaatgtaatagaatctgatcttgctgaacctgatatcaatcctcgtgtcaaagaggtggctaaagcagcatcatatttgcagtatggtatggttacaatactagctcaggtttgttgtatacatcgaagtacaagaacctttgaagaaatttctgctaaataattttatatttttttatgttgcctacccatatgtgtccacctatgctaacaaaatcatggaatgtataaaaagattgaaactgaactcgctgagctaccattggaagagagagtagagtatttaaaatctcttggtgttgctgaaagtggactaggaaatttggtaaaagcaacatataatctattggggttaagaacttatttcacaaccggagacaaggtgcatcatttgtgctgttaaagttttttccccgtcagttaaaagaaactgacagacctttaactgtgtccttttaggaaacaaaagctcagactattttttcaggcccttcttcctcacaattatttctactgtaatatttgaagaggtttttgtaatcattataactgcatgtgattctacatataggcgtgactgcgccacaagcagctggagttattcatagcgactttcagaaaggatttattagagttgaaactgtaagctgtacataacgatgagaattgaatgacgaagtttcagatttcagtttacatgttatgatatttctcagatacaatggcaatacttcacctctacggaatttggatatactgttacctgcttttttatgtttgatatttactaatcgtacaatcattaataccatacctcaggtatcctacgatgattttgttgcagttggttctcttggagtagcaagggagaaaggactggaaaaatttcgaaaacatcgagtcgagaagttttggcagcactttcatttcatccttattgcagtgcctcgacagtagacagaattaagttctgtccatgagtgggatttggggctttggttggcttgcctgcgcactcggtaatcaccatgaagcagaggatggaccgtgtcatctggagcagcaacaacaacatatatccatttgttgtagatgaattatacgatttacatgcacaattctttgcataaatattgaaggtctcgtacacactaattcaactcaattttatctcaattctcatcggtttaatctctggtgacatgttgtactcgtacaatatttagagaagacgagattgtgtgtcattgcaacacacagacatt

SEQ ID NO: 88687 - DNA, 228 bp, Zea mays
  Clone ID: MRT4577_180881C.1
ttaccaaaaggttcatctgtggggggggcccaataacgtacgcggtcaggggcaccttgtccgggttccggaacgttaggcacaacacgccgtcggttccccggggctttccggggaccttgaacaacaggctgtcccccgccaccgacatctgcgcgccttgacagcagggaacgggcggaagcctcgccgacggcggcggccgccccttgggcacgcggaagcagg

SEQ ID NO: 88688 - DNA, 870 bp, Zea mays
  Clone ID: MRT4577_180882C.1
atcttgaacaattgtgtaataaccgtagatagagaagaggttagataagcttagcaagagcaaaactaaagatacacaagtaaaagtgaaggaacaagcagagaaatcacgattggaaaaaattcagcaagcacttatggaaggaaaaacctgcaagatcgatctatttggctgagcatgagaaacaagctataaaacatctttatctgctaactatgaaacctgtcatttatgttgctaatgtaacagaatcttatcttgctgaacctgatatcaatcctcatgtcaaagaggtgtctaaaccaacatcagacttgcagtctggaaacaaaagcttggactattttttcaggcatgactgcgccacaagcagctggagttattcatagcgactttcagaaaggatttattagagttgaaactgtatcctacgatgattttgttgcagctggttctcttggagtagcatgggagaaaggaaaacatttcgaaaacatacggtcaagaagttctggcagcactttcatttcatccttattgcagtgcctccatagtagacaaaattaagttatgtgtaagttatggaaaacctaaattacatgtccgatcatacctatattttgaaatgtttagaatggaaattttagttttatacctaacaacatatatctttgctacaaattttgaagcaatgagtgggatttgggtctttggttggcttggttgcccactcggtaatcaccatgaagcagaggatggaccgtgtcatttggagcagcaacaacaacagagtgtgggctatccatttgttgtagatgaattatgtgatttacatgcacaattctttgcataaatattgaaggtatctgg

SEQ ID NO: 88689 - DNA, 1920 bp, Zea mays
  Clone ID: MRT4577_180883C.1
acacgcccgcatacgcagttgaaatgagacccaggtggtggcgctgaagcgactatcgcggcatcacggctcgaacgtgatgacgatttggcgttcttccctatgggccgatccctctggtcatcttctcgccgcactggcgatggagccgggcttgccgcgcctggtggttctcgtccgcccacggcccccgattagcatgagcctccgcgccagtatcattggtcttcctaatgttggcaagtcaaacctcttcaacgccattgttgtccgatgctttgaggatgacgatatagttcatgtcaatggaagggtcgagcccggatcagacattgatgtcattaacctagagctgatattttcagatctttaacaggtaatttggtcaacggatttcactttgtcttgctatcacgcatttcaaaagaaacttctttgctacctgtgtaataaccgtagatagagaagaggttagataagcttaacaagagcgatacacaagtaaaagtgaaggtaagacatacaaattctttcgttctgatgacctttttgttctatgtgctaattgattgcaccacttaggaacaagcagagaaatcaggattggaaaaaattcagtaggcacttatggaaggaaagcctgcaagatcggtcgatttggctgagcatgagaaagaagttataaaacatctttatctgctaactatgaaacctgtcatttctgttgctaatgtaatagaatctgatcttgctgaacctgatatcaatcctcgtgtcaaagaggtggctaaagcagcatcatatttgcagtatggtatggttacaatactagctcaggtttgttgtatacatcgaagtacaagaacctttgaagaaatttctgctaaataattttatattttttatgttgcctacccatatgtgtccacctatgctaacaaaatcatggaatgtataaaaagattgaaactgaactcgctgagctaccattggaagagagagtagagtatttaaaatctcttggtgttgctgaaagtggactaggaaatttggtaaaagcaacatataatctattggggttaagaacttatttcacaaccggagacaaggtgcatcatttgtgctgttaaagttttttccccgtcagttaaaagaaactgacagacctttaactgtgtccttttaggaaacaaaagctcagactattttttcaggcccttcttcctcacaattatttctactgtaatatttgaagaggtttttgtaatcattataactgcatgtgattctacatataggcgtgactgcgccacaagcagctggagttattcatagcgactttcagaaaggatttattagagttgaaactgtaagctgtacataacgatgagaattgaatgacgaagtttcagatttcggtttacatgttatgatatttctcagatacaatggcaatacttcacctctacggaatttggatataccgttacctgcttttttatgtttgatatttattaatcgtacactcattaataccatacctcaggtatcctacgatgattttgttgcagctggttttcttggagtagcaagggagaaaggactggaaaaatttcaaaaacatcgagtcaagaagttttggcagcactttcatttcatccttattgcagtgcctcgacagtagacataattaagttctgtccatgagtgggatttggggctttggttggcttgcgtgcccactcggtaatcaccatgaagcagaggatggaccgtgtcatctggagcagcaacagcaacagagtgtgggctatccatttgttgtagatgaattatgcgatttacatgcacaattctttgcataaataaaatatagtacacactaattcaactcaattttatctcaattctcatcggttt

SEQ ID NO: 88690 - DNA, 1077 bp, Zea mays
  unsure (1)..(1077): unsure at all n locations
  Clone ID: MRT4577_180884C.1
ttgggtacctcgaggccggccggggattcttcattagctcggtataagatggaattgtagccagtatgttgggtggatgtcggtggacgccaactgttcgacgttttgccacatagatattcttgtggaacggctgacactgtaggtttgtataatttgtagagtcgataaagttcacataatatcttgttcttttgtgtagttctgctctgtgcaagttgccctctggacttgctgcagtaaaatgcttcaaatggagaaatgtatgtgatatacataggacatattcttccaatgaatgatttaatgttagttctgttctcaatatttttcaggttgaaaacgggaaggcacaagctgcaaactttcccttttgcaccatcagccncaaacgttggtgtggtggctatccctgatcctcgtttgcaggtgctctcaaaattaagcaaatcccagcagacggtcccaacatccattgagcttgtggacattgctggtctagtcaaaggagcaagcaaaggagagggactaggaaatcaattcctttcaaacanttcgtgaagtgggattccgtatttcgggttgtgcgatgctttgaggatgatgatatagttcatgtcaatggcaaggtcgatcccagatcagacattgatgtcattaacctagagctgatattttcggatcttgaacaaatagagaagaggttagataagcttagcaagagcaaaactaaagatacacaagtaaaagtgaaggaacaagcagagaaatcacgattggaaaaaattcagcaagcacttatggaaggaaaaacctgcaagatcgatctatttggctgagcatgagaaacaagctataaaacatctttatctgctaactatgaaacctgtcatttatgttgctaatgtaacagaatcttatcttgctgaacctgatatcaatcctcatgtcaaagaggtgtctaaaccaacatcagacttgcagtctggtatggttacaataccagctcgggtttattgtatacatcgaagtacaagaacctttgaagaaatttctgataaataattttatattttt

SEQ ID NO: 88691 - DNA, 781 bp, Zea mays
  unsure (1)..(781): unsure at all n locations
  Clone ID: MRT4577_180885C.1
tgctggacgcctgcaggttccggtccggaattcccgggtcgacccacgcgtccggcggcagcgaccgaggcggcagtatggagggcgagagcacgttgggggtgctgtctggcttcgtgctcggcgcgctcactttccatcatctcaacacagactcagacacggaaggttttctcctcggtgaaatgaaaggtgaagccaagaatagcattactgattcacagatggacaacgttaaagttgtttatacaattgacattcagaaatatatcccatgctaccggctttttagcttttataattctttaggtgaagtaaacgaacatgcactgaagaaggttctttcaaatgtcagaaagactgtggtgggttggtataaattccgtcgtcactcggatcagatcatgacatttagagagcagttactccacagaaacttacagacacatctttcaagccctgagctggttttcctgttgttaacaccgagtataacaacagaaagctgctccactcactgcctggaacacgccttatataaacctcaanagggggctttttcatagggtacccattggtggttaccaatctgggaatgtctgatcaactgggttataaaacagaacctgcttcctgtacgtccactgtctttagtagagctgtgaggacacacagttctcagttctttaatgaagatggatcattaaaggaagtccataagataaatgaaatgtatgctgctgtacaagaaagagtaaagagtatatgccaaaaagttgaa

SEQ ID NO: 88692 - DNA, 382 bp, Zea mays
  unsure (1)..(382): unsure at all n locations
  Clone ID: MRT4577_180886C.1
cttcggggagcaagtgcgattttgatcttgcagccacctttttttgttgttgtngggaggtagtagttgaaagagatatgcaggggggacttgnattgnacacgaactnaggtgctgaccagataagatgttgaatatattataggggggagtggctcctagagccattattgcaagttcctnccaacattacttaantttggggtagaagggggnntncnagcctaaangctacaactagtgcttgcggngagcgccttacaacaaccaattgcccaattgcaacaacaatccttggcacatntaaacntacaaacgatggnaacggaacaacaacaacattntntgaaataaatgagggggggagaagaggagaaccctg

SEQ ID NO: 88693 - DNA, 308 bp, Zea mays
  Clone ID: MRT4577_180887C.1
acggaagcccagtgcgaaagaacatagactgagagcaagagagtgaggaccacatggatgagtctacttgagcacgtgcgcggaataaccgtatagaatcacaagcagggtttgatgaacccaactgatttaaacaactacagactctcagatggcaccagatgttacatctgactgaaatctacagcaaaaagcgttgaagctaaacccacacaagacactataatacgacttgctcctccactaacactcaacgctgaggagcttgaagaaacatccaaggcacttagatacgtacctgaacatga

SEQ ID NO: 88694 - DNA, 1685 bp, Zea mays
  Clone ID: MRT4577_180888C.1
cgccacagatgcctggttcggcgccgccgtcgcggggatcttcacggccctggtcgaccgcgcagcgggcgagcaacgcgacgaggaagtacttcgccacggcggagatggatttcgaccctaagctctacggcctcgcgcagtgcgcgccggatctgacgccggcgcagtgccagggctgccttggagacctccagtcgagggtgacggcgcagttcctgagcggacggcccctcggcaacaacgctttcatggtgtggtgctccctgaggtatagtgtgtcgccgttctacgctggccgggcgatgctacagcttccggcgccgccggcacctccaccaacgtccacgcccacgcttcattcttcagggaggaaagtgaatgcagcaggaatctctgcaggcatagccagtgttgttgtgttgatgttgattctttcggtctttttctttattcgcttcaggttaaggattaaagtgaagaaaaatgatcactcactaaagaagattgggagagctcaatgcacgatctttgatttgttgacactggaagaggcgactgaacatttcgcagagaaaaataagcttggagaaggtggtttcggtattgtgtacaaggggatactgtccgacgggcaagagatagcagtcaagaaacttttaggaagagccgggagtgggttggatcagctacaaaatgaggtgcaggtactggcagagcttcagcacaagaatcttgttgggttacagggtttttgctcgcatcataatgatacactgctagtttatgaatacatcaagaacgggagccttgacactattctatttgatgatagggaaggaaatgcacttaactgggagcaacagtacaacatcatctttggaattgccaaggggattttgtatctccatgaggactcaagcatgaggatcatccatcgggacctgaaggcaaataacattcttcttgacgacaacatggaaccgaaaattgcagatttcgggttggcaaggcttctaggagaaggccacacacatactcagacaggcagagttgttgggacattcggttatatggcgccagagtatgcatcacatggtagtgtgtcgcctaagattgacatctttagcttcggcgtcttgatccttgagatcgtgaccaggagaagcaactgcagctctgatgaccacagcactgtgaatctcctaagtgatgtctgggatcactggaagaaagggacgatgccacaaatgcttcaccggtcactggatgagtttgctcgaagccaagcgctgcgatgcatccacattggtctgctgtgcgtccagccggaacctgacgataggcctgacatatcagccgtagtgttcatgttaaccagggatagcatagagctccagccgccggggcagcctgcgttcttcttcggtagagaatcaccttcagctttacgattagatggtcaaagcagctatgtatatcaccgtgatggtttcaaattgggacagggcgtctcggtgaatggggttacactcagtgaactgtatcctagataggatcaaagtctggatactgagcacatggaatacagttaacatgttgaacccgataggtttctttgaaaaaaaaaaaaaaaaaaccaaaaggcggccgccgactagtatgacgtcgacccaggaataaaa

SEQ ID NO: 88695 - DNA, 520 bp, Zea mays
  unsure (1)..(520): unsure at all n locations
  Clone ID: MRT4577_180889C.1
naaaaaaaaaaaaaaaaaaaaaaaaaaaaaaaaaaaaaaaaaaaaaaaaaaaaaaaaaaaaaaaaaaaaaaaaaaaaaaaaaaaaaaaataaaaaaaaaaaaaaaaaaaaaaaaaaaaaaaaaaaaaaaaaaaaaaaaaaaaaaaaaggggggcgcccctttttaagagggaaccaagattttcacttcccgcggctttggcaagtttttacttttttttttagggcccccctaaattaaattcccttggcccgggttttaaaaccggggggctgggaaaaaccctggggttccccaaattaaatccctttgaaaaaatcccccttttccccggtggggttaaaacaaaaaggccccccccgattcccctttccaaaaatttcccccccctaatgggaaaagggccccccccttttaggggccattaaaccggggggggtggggggtttccccccaggggaccctttaattttccagggcccttagcccccgcttttttcgttttttccccttcttttcc

SEQ ID NO: 88696 - DNA, 453 bp, Zea mays
  unsure (1)..(453): unsure at all n locations
  Clone ID: MRT4577_18088C.1
ctatcaaaaagctataacttccattccacccttccttagacctggatatcttttaaaccggccgccctttttttttttttttttaactcaaaaacatgcatcttattcttacggggggattacaaccaaacggccatgtgtgcaataactaacacgaatacctgtcgtgaacagaccagcagccaaaactcaccgccacgcctggctctctcatgggaatacccctaccggcctaccctcctattcagtttccattaccttccattacaaccaccataaagccaaatgagcttgacaaataaaaattcaaatatctgcaagaaaacatcgcccctagcaantacaaatgcacatataaacaagtagaccattctagaactttatgtagccatccatcttctatttatgcctgatcttcacaatagaaccattctcttgaacccaatactctgg

SEQ ID NO: 88697 - DNA, 704 bp, Zea mays
  Clone ID: MRT4577_180890C.1
ccggccgagatgttagtttgactatctggtccgtggtcatgctgccccgcatgttctcctctaccaccgagtcactccacgaccttttcggactgtccgaggtctccgaggtcatgagctccgatgcgctgcccatgggccgacaatgtctacctccgactactatcatgtccgccgccgcgcttcggatgcacccggccgcgacaaccgcctccccgagtacggcatccaacggcggggaaattgaaagagctcgatcaatgcgttcgcccgaatcatgtcacaacttcactgcgctgctggcacaggcgaggctgaacctcaaccactctcacgtaatcgccatctacaacgctgcatccaccaagcgagcgacccaacatgctccagaaccaatccacgctccaggatcattcaatgaggaacgacatactgccgagcgggcgacttaggcgcatcatccgcgcgacaaggactgtcaatcaaggtgcatgtgcgaccgcaaccccgcaacctgctgctcaccagagaatgtcgatctaactcacaatctgcggcacggcaacctgctcggatacctcaaggacgtgccaatgcatatctgcgcctgcgctgacaaggagagtcgtcactcggaccaggacgaggatcatcaatagctcatcgacgacgacgattgatatgcaataccacgtcgacgacga

SEQ ID NO: 88698 - DNA, 302 bp, Zea mays
  Clone ID: MRT4577_180891C.1
aataaccctgcgtgcccttcgttctcgtttcgatcccaacaaccctccctttgtctccggcagaccacattaagtcgcgggggacatgaacaacgtcgcctgcgctgtacttgccgccgtcgtctcctccaccgtagtccttgtcgccgaggcccccgctccctctctcactaacgcctcctttgctgctttccctgccgtcatcacccctcttagcgcctccttgctttacttctttgcctactacctttagtaaactttaagtaggatcgaagggagacgcttcttgctttccatacctt

SEQ ID NO: 88699 - DNA, 340 bp, Zea mays
  Clone ID: MRT4577_180892C.1
cgcatctgattgttcgaaccacctggaagcttggtacgaccaaatccacctccgaccgatggttttgactgccaacgaggacgtgagggggaagctcatagtactcatgcagcgggtgaacatcatgatgatagccatggatctgaccgacatcagcgacgtatacgtggtcgtgcagtacggctctgataatgcgaagactagtgagcagaagaagatctccaattcactctggaacgaagtactgcaactgtgaacgacacatcatactgcgcgcgtgtatcttggagattttgttgaaaagcggttcacaagatatgatgctctcattgtagcttac

SEQ ID NO: 88700 - DNA, 215 bp, Zea mays
  Clone ID: MRT4577_180893C.1
acccgacaaagtcccaccagactcacctctacgtccaaacctatttttgacgctacaccatacctactgctgaacctaatgcactcttcgcggtcccttcaacacataacactactcttcccaatgcccccttctatttctacacactttctaacgtcgtaatctgacgatacatcccaaatgcggaaatcttaacacctattcctttatcatca

SEQ ID NO: 88701 - DNA, 278 bp, Zea mays
  unsure (1)..(278): unsure at all n locations
  Clone ID: MRT4577_180894C.1
ggcacggcgtcnanagcngggcgcgcggcanccggtaccgcggccagtaccggcagggccagcnccacggctacggtgtctaccggttccacagcggcgactncnacgccggcnagtggnccggcggccaganccacggcatcggcgcccagacatgttccgacggcagcacgtacgccggcgagttcaagtgtggcgtgaagcacggcctcggctgttaccatttcaggaatggcgaccggtacgcaggtnantacttcgcngacaagatccacggc

SEQ ID NO: 88702 - DNA, 804 bp, Zea mays
  unsure (1)..(804): unsure at all n locations
  Clone ID: MRT4577_180895C.1
acccccaataaaccctctcttcctctgctccaggcgccggaaaagggaggaggacgagggagggctcgagctcctactgtccatggatctcgacgaggaggagacgcggccggagcagcaggcgccgccccgggttccggacaagctgaaagcagtgtcacaagagcttggacatgagatccggatatttacaagcacaacatttgagctaatgactagcaaattggccaaggcagatcaggaggaagacgatgacttttatgagcttcagcctagtgattattacaagttgatttcaaataggcttgcagaacaatcgaaagttctgaatactcgtaaaataagggaagcagaacttgctgctcaacgagcaaggctaacaaaggcagtggcgagggttcgattccctgatggttacattcttgaggctgagttccatccatcagagatggtacatagtctggtggatcttctcatgaaagtaattgctagaccagacctgccattctatctttacacagttcctccaaggaagcgaataatggacacctcgcaggacttctacacaattggctttgttcctggagctaatgtcttcttttcttatgatctgccagaagggtcggagttaaatacagatgctgtaaaatccggaccatatctccgtgaagaaatcgaactttggatggactgtcacttcagtcggaaccttctgaccaacctgatgattcaaagacnaattctgattcagctcatcagtcttatgcattccaatctgattctgcaccacagcagcagcaaata

SEQ ID NO: 88703 - DNA, 315 bp, Zea mays
  Clone ID: MRT4577_180896C.1
ctttttttttttttttttttgtatatcactatcactaaatgtgggggggatctctattcttttttctttcctctttttttccttatttccttagggcaagcagggggaaaattacgggtttaaaaacaaatattgttaataggtcaaagtcttttctctttttttaaaaaaaaaaagggaaaacaaggggccgatgaaccccaccttctaaaaccttaaaagtacaaatgggggggctaccccaattttacaaaatccaccttttacttaagcacttcaaaaggggagaacattttctgggtcccctgggaattt

SEQ ID NO: 88704 - DNA, 299 bp, Zea mays
  Clone ID: MRT4577_180897C.1
ataacgtatatagtcacaatccttattcagtatattgataagaaacacgagacacattcgaggactgaaggcaccattacatatcacatgtaatctaaaatatagcacatgccaccttcaactactggttggtgcctctaataaacaagaactatcagaaagaactgaatggatggcactgctggatgatggtgtagaacagcggctaccactgtgtcaacgcctgatagagctgtaggcaactgtggacgctcgcagcggaactcgacacagtcagacatatgaatggaatcaactgg

SEQ ID NO: 88705 - DNA, 311 bp, Zea mays
  Clone ID: MRT4577_180898C.1
gagattttgcgccttttttttgttgcgcggcgcacgcctgagtacgctgctggcttgaaatggccgacagaggcctgtgagatgctatcaccagatctagaactagtcgtaccccagaggccgttactgccgcgcgcgtcccagtaccccatgatcgagatctacgatgatctgatgaacatgaagggagctgatgaaggccccgactgggagggccgtgtctcttgccgagaaggacaatgactccagggacggttttgacgctgtccgtattggctgcaactactacctgaaccgagctgagggaaagg

SEQ ID NO: 88706 - DNA, 412 bp, Zea mays
  Clone ID: MRT4577_180899C.1
ggggggacaccaacatgcaataactgccataacaaaagcccaaacccaaacctggtaaggcccaacaccccgagacccccctaataaaaagaaagaagccatgaccgaaaacgcgctcaaccccctaacgccccaagataccacctttatcatgtctccctgaaaaacgcccgcagaaaaaacatagcccatggcagaaataagcaggacgaaaccaggctggggtcacaaaaatgccgaaaaccaaccggggaaaaaaggggggggccaactatagcggccaactattgccatacataataaccggaaaaaaagggcactgggggtccacaaaaaaatgtcaaaaagggaagggctcctttgaatctcccaacccccacccggggagggaagcctcgccccctcccccccc

SEQ ID NO: 88707 - DNA, 1330 bp, Zea mays
  unsure (1)..(1330): unsure at all n locations
  Clone ID: MRT4577_18089C.1
ggtaccctcgggccgattggggagccgcctgcgggacgacatcgtcatcgtgcgtgtaggagtgtcctccagatccagagccggcgcgccgcccctgcctctcctggcctctccgccctccgagcgcgcgccgacgccgcccctagcgccgcccgtagctctagcgtcgacgccctgccgacgcccagaaagcgtcccggccttcactagctggaagtcccgagtctcgagtggaggcggatcaaagccaaagccaaagccaacaaccgccgctgggacgcgagggatcgattcggagatggcgtcaactagctccgccggggacgtgggagactcagggtcaaaaggtgcggttgcagataaaacacttactgcttctgcaaacactagtagctcacatcaagaatctcatgatgttgatgcaaaatcacgtgtggaggacatttggaagaaaatgaacagtggttttcctaataagatgcccaaacctgcaatgacaaagctcagtacaacagaaaaacaaaagaaaaataaaccaacaaataattggatgactgattctaggcctttcaccaagcaaggcacatagtgtcgatcaaggatccaaaaatgggctacaacagacacaacatgaaatgagcgaggatgctaaaaaacttgcagccaaggcccttgcagctgccaaaaatgctgctgctgtggcatctggacgagggaaagtggagatcactgaggtaagggactttgctgggaaggacatcgaaatcaagaaactggttgatgctaattcaaaggaggcaatcgagaaggccagggcaggtggtgccgccccatcagctgtcgataacatcctagagcaaatacggaagaagcagaagctgagcgtcctggacaagacgaagaaagagtggggagagtacaaggaagagaaccggggcttgggggaagagctggacgcctacaagaagagctcgaaccagtaccttgacaagcaatcatttctgcagcgaaccgattaccgcgagtttgagcgcgagcgggatgcccggctgtcaatgatggccaagcggaggacagatacgcgggaggactgaaatgtttccctgtaactccgttgtagacattctttcgagataatggtagacactaaattgtcaatgccttccagccccgttaaatcttcttttttagaattataatgtgctgattgtaatttacaaagatgcaccgtgcatgtgcgtaaattgcatctggtggttttggcaaacatttctgagctgcataaaatgcagtcatgattggatatttctgaaaccgggaaactntgacg

SEQ ID NO: 88708 - DNA, 3923 bp, Zea mays
  Clone ID: MRT4577_1808C.1
ggtagtgagagacctgtgcagtaggcctccggtgagcatatggacatggacaggcccgatgattctgcggatgttgcggcataattgtggttgtggttgtcatctgtcttatgatcgatcaaaattttctgtttgtctggtaggtggatgagttaaggcaacagcatattctcccaagcgatttcgttttatggtttggaacattgagattgaggtaatgcgtcttgtccagcgttgttttggtctggactgtgaatcagaatagaaacgttgcatgatcgaattgcgccattagatctcataatcaaaaaacgtggatgattcgacaaaaaaaaaaaaaaaaaaaaaaaagcacatttgcagtggatgtctggtacgtcgacccatgctccgtaccaattccaccggaactacgcacagagacgctggacccgttcccgcactcccctacacgcacggcaatccgcacagcagcacggcgccccgcccctcgtactcggtgagatatatccccgccttccctcgcgaaagctctcgtagagacgacgacgacgacgacgacgacgacgacgacgcgagaagtcgaggcgccgctgcttgctaggaccgagcttcaggaagtctccaacggccccggcgccggcacggcctgccccgcgccgccacagggattgattgtgatcagatctattctgtagtggtcagcggctgagggtgaaccgaagatgagcgttgtgggattcgatctcggcaatgagagctgcattgtggcagtcgcgcggcagcgcggcatcgacgtggtcctcaacgatgagtccaaacgcgagacacccgccatcgtctgcttcggggacaagcagcggttcatcggtacggcgggcgccgcgtcctcaaccatgaaccccaaaaactccatttctcagatcaagcgcctgctcggccgcaagttctccgaccccgagctccagagtgatctcgcgtccttcccgttccgtgtcacggagggccccgatggatttcccttggtacatgtgcggttcctgggcgaggagcggacgtttacccccacccagctgcttgccatggtgctgtccaatctgaagggcattgctgaggggaaccttaagactgcggttgttgattgctgcattggcatccctgtgtacttcagtgatttgcagcgcagggctgttcttgatgctgctactattgcaggcctcacgccgttgcagctatttcatgagacaactgccacggcattggcttatggcatttataagactgacctcccggagcatgaccagctaaacgttgcatttgttgatgtcggccatgctagcttgcaggtcagcattgtcggttacaagaagggacagctcaagatgctttcgcatgcatatgaccgttctcttggtgggagggacttcgatgaggccctcttcaagcactttgcggcgaagttcaaagaagaatataagattgatgtttaccagaatgcccgtgcatgccttaggttgcgtgtggcgtgtgagaagcttaagaagatgctgagcgccaacccagaggccccactgaacattgagtgcttgatggatgagaaagatgtgagagggtttattaagagagaggagtttgaacacatcagtgcacctgtgctggtacgtgtcaaaggacccttggagaaggccttggctgaagctggcttgacaactgaaaatgtgcactttgttgaggttgtcggatctggttctcgtgttccagccataatcaagataatcactgatttttttgggaaggagccgagacgaaccatgaatgcaagcgagtgtgttgcgcggggatgtgctcttcagtgtgctattctcagccccactttcaaagtgcgggaattccaggttaatgatgggtttcctttctcaattgcattgtcatggaaacaagactcccagaacagtgcaccccaacagacccttgtatttccaaaggggaatgtaattcccagcattaaagctctaaccttctataaatccagtacatttgaagttgatgttttgtatgtggacacatgcgactcgcaaattccacagaaagataagcacttacacaattggacctttccaaccctccaaaggtgagagggccaaactgaaagttaaagtgcgtctcaacatccaagggattgtcacagttgatgctggcgtgatcacagccagcgagggagccgcaaaggagcctcgagccgagcagatggagacagacaaacctgagggagccacagatccctcggcttagctttgccagtgatcaaacatgttggggttatgcatccgtgttaaactgctgagatagttgctacggcggaaaatggaacactaaaccacgaggataaatctgtttctatggaagctgatgcaaatgttgagccgtgaaaaaggaaagttgagaaaacttctgttccgttccataagttgatctatggtgccttggctgcagctgacctgcaggaggctgtagagaaagagtatgagatggctcttcaggacagagtaatggaagaaaccaaggagaagaagaatgctgtggaagcttatgtgtatgacatgcgtaacaagctctacgacaagtacaacgattttgtgacacctgaggagaaggaagggttgattggaaagcttcaggaggttgaagattggctctatgaagatggtgaggatgagacaaagggagtctatatttctaaactggaagatcttaagaagattggtgacccaattgaggcacggtacaaggagtcgacagaaaggggttcctctgtagatcaactggtctactgcatcaacagtttcagagaggctgctttgtccagtgaccaaaagtttggccatatcgacatatctgagaaacagaaggtcatcaatgagtgctctgaagtagagaactggttgagagagaggaagcagcagcaggacgccctacctaagcacaccgatcctgtgctgctcgtatcagatctgaagaagaaagctgaagcacttgacaggttctgcaaaccgatcatgactaaaccaaagccagctccgaagccacagactccgccaccacatactccacctccacagcctgaagcccaagcatctgaccctcaaacaccagaacaacaacaaagcgggactggtgcagctggtgagccgggtagtgagggaggtgtgcagcaggcctccggtgagcaaatggacatggacaggcccgatgattctgcggatgttgcggcataattgtggttgtggttgtcatctgtcttatgatcgatcaaaattttctgtttgtctggtaggtggatgagttaaggcaacagcatattctcccaagcgatttcgttttagggtttggaacattgagattgaggtaatgcgtcttgtccagcgttgttttggtctggactgtgaatcagaatagaaacgttgcatgatcgaattgcgccattagatctcataatcaaaaaacgtggatgattcgacaaaaggtatatttatctggatgtttcatgttaattcatgtcacatggattccttcaaaaaaacaaagagggcgtccccaaaaaaaaaaaaaaaaaaaaaaaaaaaaaaaaaaaaaaaaaaaaaaaaaaaaactcgagagtgggtcttagggtttggaccattgagattgaggtaaggggtcttgcccagggttgttttggtctggcctgtgaaccaaaaaaaaaccgtggcatgaacgaattgcgcccttagctcccaaaaccaaaaaaggtggatgattcgccaaaaggtatatttatctggatgtttcatgttaattcaggccccagggatccctcccaaaaaaaaaaaaaaaaaaaaaaaaaaaaaaaaaaaaaaaaaaaaaaaaaaaaaaaaacacaaaaa

SEQ ID NO: 88709 - DNA, 252 bp, Zea mays
  Clone ID: MRT4577_180900C.1
cttaaaatccaaccaacccttccggaaaattttggaaggaagccattttaatttcctggtcatccatgtacacctgaacatctacaggtccttgtcaaagcagttccaattaaacaaggcacacttgaaaattatttcaatcatccaaaccgtgtacaaaaggcttgagcataccattatgtctaagaaagatttttactactaaatgatgcttattgagcggaagatgaatattatcttgggatactaaat

SEQ ID NO: 88710 - DNA, 300 bp, Zea mays
  Clone ID: MRT4577_180901C.1
tttaaagggttttttttgggtagggttttttggttggggagggggtaaagaaacagtataaatgaccagactatgtacagaaaaggataaaaaaaaaagggggcactacacctagttacttccactcccagaaagcaataaaccatgagccaaagccaggcaaaaggcaaagtggcctaacattaaatttttttaaaagaaacaagtttttaaaacccaaaaggggcaatttattttcaaaaccaaaaagggccctttttgctgttgctaaaacggccggagctagggaatcgcgcgccc

SEQ ID NO: 88711 - DNA, 362 bp, Zea mays
  Clone ID: MRT4577_180902C.1
ggtagatttggcacaccattacccttcccaaaacccatgcatgtggtcgtgggtaaacctattgaagtcaataagattccccatcctacaattgacgaggtaggtttctggatttaatcaaaaccacttttttgagagaaacatttttgtaggctcatattgttctcatgctgcgtaatttttggaattggtccgaagtccaaacataaacaaacctaattaaaagtatatccatgaatttgaggtattgaataaaataatacgcttgttcttgcacaagaatgccaatatgtttcttatcttattgtaatgaaaagctcggtttgatattattgagctgttcaagttttttgaaaggaaca

SEQ ID NO: 88712 - DNA, 319 bp, Zea mays
  Clone ID: MRT4577_180903C.1
gtggttcccaaggacgtgaacgctgctgtggccacaatcaagaccaagcgcaccatccaggtcgtggactggtggccgacttgctttaaagggcggattaaattacaagcttccaagggtcgtccccggcggtgacctggccaaggtgcagcgtgccgtgtgcatgatctccaactccaccagtgtgtgggaggtcttctcccgcatggaccacaagttagacctaatgtacgcaaagcgcgctttcgcgcactgacacttgtgagaggatatagaagagggagatttctcagggtctcgaggagatgtgtgtgctcta

SEQ ID NO: 88713 - DNA, 638 bp, Zea mays
  unsure (1)..(638): unsure at all n locations
  Clone ID: MRT4577_180904C.1
ttggaatcctctagaagcgagccagcccgtttttttattattttttattttattttatttttattttttgttgtttttttttttctttatttttgtgttttttttctgtttatatttttttactgtgttctttgttttgtttttctagcggaacccggaggggcgagacccggaaaataaccgggaccgggaaccaggggggacgaaccagggtggcccgcaaaagaagaggtcaatacaagaaacaagggcgcaaaaacagaggaaaaagcgcggaatcccnagaaggagaaaaaggcctatcgcgggccaacaatgagcaaacaaaaaaacaaaaccgagaagcaaaaaagggaacaaagcccggggtggcactaaggagaaaaccaacaccaaacaaaaatgggaaggaaccaaccacccccctgcaaaagggaaaacccgtatggccagccgaataaaaaaatcggccaacccgggggaagaggaagattggaaattgggccacaggggggcttttttttaaaccaaggaaacgggaaaaactggattgccctaaaacgccaaaccctgaaaaaaggaagaaaacggcccaaaataatttgccccaacagggaaaaaaccgggtggaagggggg

SEQ ID NO: 88714 - DNA, 334 bp, Zea mays
  Clone ID: MRT4577_180905C.1
gagctgagtagtctgggtggagcatcgtcctctacaccttatagtaaggatagaatgagacgacaggggcaatatggtgaagcggatattaactccatggttgttgcccagttgcatcactaccaggcacaacaaagggtacagaaacaccctgagaatagctacactggaagagatcccgcacaagcttctacggagcatcaatacactccccctaaggcaagacaaagtcaatgggatcgaggtggaccaaatgtgccaagccaggttccatcatatgtatatataacgaaggttatggctccacctttgcaccaactgctgcagcgcctac

SEQ ID NO: 88715 - DNA, 347 bp, Zea mays
  Clone ID: MRT4577_180906C.1
gggggaaagcaggtttttcaaaaacgacaaataactggggcaaatggcttacaaatgaaaatcagataaggggaggcaacaagacaaaactggttttggcaacccacattgcctaaccccagccgattcccccatttttcttgaaaaaaagcaaacaagttcttccctcccccctaaagttaagcgataaccataaaaaaacctggtacccgactgggggtataaaaacgcatacgcccgcaaaaaataactgacaggccagggtagcgaactttataacacacaacgcccccagagagctgaaagccgtgtgcctaatacccgtagtgggcaagcttggagggacc

SEQ ID NO: 88716 - DNA, 356 bp, Zea mays
  unsure (1)..(356): unsure at all n locations
  Clone ID: MRT4577_180907C.1
gggggggggtttttttttttttttttttttccgcgggggaagattttgttcccaactcaaatcgttgttcggttcgtccagtgttttaaaaaaaatctcaacggggctgcattcagcaccatcgtttcatgcttgctgggtngattggtgttgggtggggggtgctcatcgtgctcggcggcgccaaaacttgtgaaaccttctccaataacagtgctccattgttttgtttctggcttctgtggcgggactgcaagaagcctaaggctttgctcttgtggctgagccacatgcttatgccttatctgctgaggttctcctccgcgcacgtggtgttggcgccaacctttcttgtg

SEQ ID NO: 88717 - DNA, 129 bp, Zea mays
  Clone ID: MRT4577_180908C.1
aaaaaactcggaccttttgtatgaggggggctcacatcaccgtacaggcataaattaagtcaagaagaaaagagggagattttctggtccgccggggttgaacacctgctgcctggtttttttttcaac

SEQ ID NO: 88718 - DNA, 250 bp, Zea mays
  Clone ID: MRT4577_180909C.1
cgccttcgcctccaaccgcgagcgctgcacgcctcctcgagtaaagcgagagctcgctgcatactaacaacacatcagcagcttgatcagctccgtgcctacaaacccgcaagaaccaagtttcatgactgatctcgacgtccagcttgcatctgcctttgatccgcaatgatgaggcaaatgctgacgactctgctgctcggcctggaacgaaccatcatgtgcctgtgccgcatcgcaccatcgcaac

SEQ ID NO: 88719 - DNA, 885 bp, Zea mays
  Clone ID: MRT4577_18090C.1
atcgctgccagcctggttctttcctctcctctctttttcagcccccggagccgcctgcgtcaccacatcgtcatcgtgcgtgtaggagtgtcctccagatccagagccggcgcgccgcccctgcctctcctggcctctccgccctccgagcgcgcgccgacgccgcccctagcgccgcccgtagctctagcgtcgacgccctgccgacgcccagaaagcgtcccggccttcacgtaagttgcagactgcttgctcttggtctggttctcctaggcattgccagtgagcagacgttcgtgtaaagagcagtagctggaagtcccgagtctcgagtggaggcggatccaaagccaaagccaaagccaacaaccgccgctgggacgcgagggatcgattcggagatggcgtcaactagctccgccggggacgtgggagactcagggtcaaaaggtgcggttgcagataaaacacttactgcttctgcaaacactagtagctcacatcaagaatctcatgatgttgatgcaaatcacgtgtggaggacatttggaagaaaatgaacagtggttttcctaataagatgcccaaacctgcaatgacaaagctcagtacaacagaaaaacaaaagaaaaataaaccaacaaataattggatgactgttctaggcctttcaccaagcaaggcacatagtgtcgatcaaggatccaaaaatgggctacaacagacacaacatgaaatgagcgaggatgctaaaaaacttgcagccaaggcccttgcagctgccaaaaatgctgctgctgtggcatctggacgagggaaagtggagatcactgaggtaagggacttttgctggaaggacatcgaaatcaagaaactggttgatgc

SEQ ID NO: 88720 - DNA, 582 bp, Zea mays
  Clone ID: MRT4577_180910C.1
gcaacaccttttcgacctttttttttttctgacataatccatagtgaacaattattttaatcaaacaactttcagctttcttacaaccattagccacttcctcacagctaaatcagattgttcagcaatatgtagctaacccaacagacactaccatcccctcttcaacgttgcgtatcgactcaacacagcaagcaaatcactaattaatttgaaccaacttagaaggcaatggaacaggcaaccgtcgcacaaacaattgcttaacaaaatgttaccagatcaccggaggccgaggagccaaggggaacgcgtcggccggcagcgaagttgcggggcggagcaaggaggctagttagtgcctgctggatatgctgaaggaagtgaccttcatgggcgtggccaccaccagtggagcctccggggagtcgctgaccgagtacctgtcgtgcatgaagcggctggccacgatggactcgtccttggggatcaccttgtagcaatagcagctcttcagcccctcctggtactggtagcactcgtggtggctgttcttcacctgcaggaagtccacaccacgct

SEQ ID NO: 88721 - DNA, 240 bp, Zea mays
  Clone ID: MRT4577_180911C.1
aggtgatggaattatcacaataaagatgtagacataaatgtgtgtatatacattctgtgacacttcaaagtttcagtatatgcaaaactgaatatgctgcttcaaaaaaaaaaaaaaaaaaaaaaaaaaaaaaaaaaaaaaaaaaaaaaaaaaaaaaaaaaaaaaaaaaataaaaaaaaaaaaaaaaaaaaaaaaaaaagaacgaaaaaataggtgttttctatcgtgaccccaatttaa

SEQ ID NO: 88722 - DNA, 442 bp, Zea mays
  unsure (1)..(442): unsure at all n locations
  Clone ID: MRT4577_180912C.1
ccaaacatcctttttccctttttttttttcctttccatttcaatggttcattcaggtcattgctcacacttgcccccttggtgatgggtgacactccgtttcttttggggggtgaacgagtgaactagctttagcccttttggtggcttgtcagcggctcccttccatttttcctcccgtccatagtttcctcagttgtngacacccccggcggctgctttgctggggcggggccctggctgctgcggcttcagtccgcacatcgccgtcagctgttgcgctccctgggccgccttctgcgccgcgggctccccctgcggctgctgctgctggtgggactgctggtcccccccctttgtcccctggtcccggtgccgcggctccccctgcctgttctggtggcngcccttttgctgcttctccttgctctttggcgggccgt

SEQ ID NO: 88723 - DNA, 324 bp, Zea mays
  Clone ID: MRT4577_180913C.1
atggccgccgccccagcagcagccggaggccttatgcagctccggcctccgctatgcgtgtcgcctcgcgccagcgcttcctgcgcaccaagcatctgggggggcctgccccagcttcgccgccgccgggccctggcgctcgcggcgtcgtcggtagcggccgcggaggctgaggcgtacacggaacccgagctggtgttgctggaggccctcctcggcatccagggccgcggccgcgccgtcgctccgcgccagctccaggcaagggacccgcgattcactagatttctgccgagcgcaccacgtgctcgcgctgacatgtag

SEQ ID NO: 88724 - DNA, 284 bp, Zea mays
  Clone ID: MRT4577_180914C.1
ttttgttgggattttttagttattgcgctgttttccttcaaagttaattttgttttttaaaattaaaggcgggccggctcttttttggaggactccttacatgggaataattgcatcagcatgttttttagtcggaccaggggaatgaaaaaaacattaaagggaaattaagcacaccggccaggaccatggacactgaaatagaccttaattctgattgtttcaacatgctctgacgcgcactgactaggatatataccagtatgtccagccagtgtgcaccc

SEQ ID NO: 88725 - DNA, 418 bp, Zea mays
  Clone ID: MRT4577_180915C.1
acctgccttgacacaagaatggccaccgccatacactgcacgcacagccagctggtgtgattccgggccaacctgcagcgagcacgaactctactacttgacatccatggcgttcacatgcacggtgcagatccacatcacgacctccatccgccaactacggaggtctgccacgcctgggcggacctcagacccagcgatgcctctgggacttggcaagctcccgatacgcatcccccggattcttctaccacacacctgcatcgtcttcgattcgtgtaactactaggaccttcggattggcagatttcaagaggtgatacacaagacggacctctaagagggacgtgggctagcaaaaattctgcaagcagcgtatcctcgcctttgagagcaagcacgacctaatgccggaggc

SEQ ID NO: 88726 - DNA, 829 bp, Zea mays
  Clone ID: MRT4577_180916C.1
agtagaacagcaaaggtggcggagcatgacatttttggaacaaaggggccttcaatgcctttaattagagctgctcaaactgaaatagaaacaccaaaggtgtcagagcatgaaacccacatgcaggagactggtccattggtagttgccatggacagtgcagaggagggcattccagctttgcatcagaatgtccaggccaatggtgaagtagaatcgtcaaaggtgtctgagcttgaagcacacgtgaatgagactggtttgttgctcgccatggacattgcagaggagggctttccagctttgcatgagaatgtccaggttaatggtgaaggagaatcatcaaaggtgtcggagcatgaagcacacatgcaggagactggtctgttggtcgctatggacattacagatgaggagggcattccagctttgcatgagaatgtccaggctaatggtgaagcagaatcatcaacagttgagctgtcatcatgtacctctggtcagcaagaatcagaaactacagcagcaccttgcgaggagagcagtccttcacaaatcaaggtatcaccttctctgccacttggagttgcaaaaatggaagtagacccactggaggtgattgaccatgaagcagaaacatcgaaggtgtcggagcatgaagcatacatgctggagactggccaattggttgccatggacatagcagaggagggcattgcagctttaaatcagaatgtccaggcaaatggcgatatcagttcatcaactgttgagctgtcatcaggtacctctggtcagcaacgatcagaaactacagcaggcaccttgc

SEQ ID NO: 88727 - DNA, 499 bp, Zea mays
  Clone ID: MRT4577_180917C.1
gggggggggtttttttttttttttttttttttttttttttttttttttttttttttttttttttttttttttttttttttttttttttgggcccccccccttacccagttttatttctttttttttccatccgggggcccaccccccttctctgggggttgatcacccctagttcctttttgaaccaaacccccccaaataaaaaaaaacggggggggtttcagggttgggtgccggaacctaataaatgagggccaaaacccaccctggtcagagccctgcccaaaacagcttttgcaaaacgttttcaaaggtgcacctgggagccggccctttcaacaaacagaatcggtttgaccgacaacccccataaccggggcctctcatctcatgggcctattcatcaaggggggggggggggagggaggcatccccttttccccccacaacaaattttggggtgcgcctaaggggcctaacccaaccggctggccttggg

SEQ ID NO: 88728 - DNA, 851 bp, Zea mays
  unsure (1)..(851): unsure at all n locations
  Clone ID: MRT4577_180918C.1
ggccgtttcttcccaagtggcgccggtcccggtcccggccccagtccccgcaggctccaccgcgcaacccgacgcgggcactgggtacgcctgcccgagcgcgaccatttccgcgccgtcgccgtcctcccacctaacctaacgcgcccccacccaatcgatcgcctacccgcctcgcctcgtcaggcgggggaggggtcggtcaaaggaactgggggattccgttcctcccggccactgaggaacggcggcctctgcgctcctcttcgccatggccgcgcaggcctcatcgccgatcgagttcctgctccgccggccgctgccgcgccagcggaggaggctgcctctggccggcgcgttcttcgcgcccacggggctgtccggcgcgccgctgctccgcgcgctggcgtcgctcgcggcggacctgctggtgaccccgcccccgccgtcgcagcgacggaacctcgacgcgctcatgcggaggctcgcggtgctctccgcgctcctcgactcgcacctgttcatcctcgccgacgaaggcgaggccgccttctccgacgccgccaacctctgcttccgggagctctacgtcgtgctcttccgcgccgacctgctcgtctcctacgtcgcctccgccgcccgcgcctgggcgctgctacgggcgccccagctcgccgcctcgttccgggcctcgnacgcggagctcgccgtcgtcctcgacgtcctccccgccgcctcgctccgcctctcgttggacgccgcccagtncctcgacttactccgcgcgcgctgccgccggcgggcgccggcccactaccacgaccccgcggaggccggtctcggggacctcc

SEQ ID NO: 88729 - DNA, 598 bp, Zea mays
  Clone ID: MRT4577_180919C.1
aattcggcacgaggccctccctcacccgcttcctcttcctcctcctcgcctcctccgcctcctttccgtccggccgtttcttcccaagtggcgccggtcccggtcccggtcccactcccagcaggtgccagcgcgcaacgggacgccggcagtgggtacacccgcgcgagcgcgaccatttccgcgccgtcgccgcccgtctcctacctaacctaacgcgcccccacccaatcgatcgcctatccgcctcgcctcgtctcgtctcgtcaggcgggggaggggtcggtcaaaggaacgggggcagggattccgttcccagttcctcccagccaccgaggagcgggcctcgacgctcctctggtcctgtcctcttcgccatggccgcgccggcctcgtcgccggtcgagttcctgctccaccgcccgctgccgcgccagcggaggaggccgccactggccggagcgttcttcgcgcccacggggctgtccggcgcaccgctgctccgcgcgctggcgtcgctcgcggcggacctgctggggaccccgcccctgccgtcgcagcgacggaacatcgacgcgctcatgcggaggctcgcgct

SEQ ID NO: 88730 - DNA, 228 bp, Zea mays
  Clone ID: MRT4577_18091C.1
actgaatgttagagtggcagttttatgggtttgtatgtgagtaggtcatccagagagcttcgttagatatgtcatgtggccataggcctaaactaagatgtgaatcacaagctacaaggtaattagcgtaatattttcgggctagcttaagacgtacactcctaatatactggactgcattctaacttaggctgatgtatttcacctagagctagctccggaatgggc

SEQ ID NO: 88731 - DNA, 779 bp, Zea mays
  Clone ID: MRT4577_180920C.1
gatggaggcctataagatgcgtcaacaaaatttgagacccgcaagactaactgcacagaaggttaacagcacgtcacaagcagattctccacaaaatccaaccatatgtgtgctttggcataatttaacatcatcgacatgtttttaacaaaatcctctccaagatccataccaagcacgaagccttcatggaaatagcaaaacagagataccttaaagggtttcaggtacaagaaattgacaactaaatcagacactatgagggacgcccgacgtctagaagcggagtttggtaaagaaccacctgttcttgccggtcttgaacctctcctcgaggcgcgccttggcggccttgcaggcttcgaccttcttgtcccgggtggagagcgcgtcgggcccgcccgatgcgacgtccttgaagtcgacgtcgagggtgtagcgggtgggcatgaggtgcgtgaagttgacgagcttgatgaagcacttgacgcgggacttcttggccgtcttcttggcggagtccttgcggatcaccttcttggggtacttggcgaggcccgcgacgaggcagtgcccgtagggacgatcacgggtgccctcctcgaaaacgcgcacgatcacggccttccggccggcgaaccggccctggaggaggataacggccttgccgggcttgaggaacttcaccatctttggacggtggtggcgatgctgctgcgccgcctgttgggtttgggtagtggggggaagaggcccggccggcctcgaggtacccaatg

SEQ ID NO: 88732 - DNA, 718 bp, Zea mays
  Clone ID: MRT4577_180921C.1
tagttcaacgagacgtttcctttgggcatcatttaacacatcatcgacatgtttttaacaaaatcttctccgagatccataacaagcgcaataccaaaacagaaatagcttaaatggtttccgatacaacaaattgacaactaaagtagtcactatgcggggtgcccggcgcctagaagcggagcttggtaaagaaccacctgttcttgccggtcttgaacctctcctcgaggcgcgccttggcggccttgcaggcttcgaccttcttgtcccgggtggagagcgcgtcgggcccgcccgaggcgacgtctttgaaatcgacgtcgagggtgtagcgggtgggcatgaggtgagtgaaattgacgagcttgatgaaacacttgacgcgggacttcttggccgtcttcttggcggagtccttgcggatcaccttcttggggtacttggccaggccggcgacgaggcagtgcccatagggacggtcgcgggtgccctcctcgaacacgcgcacgatcaccgccttccggccggcgaacctgccctggaggaggattacggccttgccgggcttgagaaacttcaccatcttcgggcggtggttgtgatgctgctgcgccgccggtagggtttgggaagtggaggaaattggagcgctcagcgcgagagagacgagcattaatagggtggcggcgctagggcttcgaggatgctcgtgccg

SEQ ID NO: 88733 - DNA, 575 bp, Zea mays
  unsure (1)..(575): unsure at all n locations
  Clone ID: MRT4577_180922C.1
ggccccgccctgtttttttnntttttttttctttgtttctttcttttttgttttttttttttctttttttttcttttcttttttttttttcttttttttttttttttttttttcaaggcaaaaacccgcccaccaaaaaaaaaaaaggggaaaaaaaaaggcccaaaaccaaaccctagggggcgttcccagaggaaaaacagggcccggggccataaaagggccccaccacacaaaacaaacccaggatggttcgggaaaaaccaaaggacggctaaaaaaaatagagccggacccaaagaacacagaaccggcatcactggggcccgcccccctcttaaaggggttttgggcctaagacccccaaatataataaacaagccaggccaaggcttaaaaaaaactggcgaaacaggaccttttttttgggccctaaaccacccaacattacccaacggcggggggggagggaccggacaaaccgaaacaaaaatcccgggcctctgcttgggaagggccaaaggagggggaaaccatcccgccggggtcggtccggaaaagtccgaacctaaaag

SEQ ID NO: 88734 - DNA, 720 bp, Zea mays
  Clone ID: MRT4577_180923C.1
aacaacgcagaagattaataacacgtcacgagcagtgattctcagcaaaagttcaacgagacgtttcctttggcgtcgtttaacacatcatcgacatgtttttaacaaaatcttctccgagatccataacaagcgcaataccaaaacagagatagcttaaatggtttccgatacaacaaattgacaactaaagcagtcactatgcggggtgcccggcgcctagaagcggagcttggtaaagaaccacctgttcttgccggtcttgaacctctcctcgaggcgcgccttggcggccttgcaggcctcgaccttcttgtcccgggtggagagcgcgtcgggcccgcccgaggcgacgtccttgaagtcgacgtcgagggtgtagcgggtgggcatgaggtgagtgaaattgacgagcttgatgaagcacttgacgcgggacttcttggccgtcttcttggcggagtccttgcggatcaccttcttggggtacttggccaggccggcgacgaggcagtgcccatagggacggtcgcgggtgccctcctcgaacacgcgcacgatcaccgccttccggccggcgaatctgccctggaggaggattacagccttgccgggcttcagaaacttcaccatcttcgggtggtggttgtgatgctgctgcgccgccggtagggttcgggaggtggaggaaattcccggccggcctcgaggtacccaatg

SEQ ID NO: 88735 - DNA, 292 bp, Zea mays
  unsure (1)..(292): unsure at all n locations
  Clone ID: MRT4577_180925C.1
acacaaaactcctctactccaccccactataccttcttatccaagcacgcacaanatccgagcgggatgaacctctagtacaattactactccactcacatacccttatcctgcctcctctgatcctcttccacaatgagatcacatttcccgcactagctcctcttaagcaaaccacgttcaacaacggctctcttacagctttgatactcacctcttcaacctcattcataataccatacacatgttgaacaacaattcgaactaaaataaccacgataatcgcttctca

SEQ ID NO: 88736 - DNA, 296 bp, Zea mays
  Clone ID: MRT4577_180926C.1
cggacgcgtgggcagctttgaccgccgcctcttttcccctccgctactgctcctccccaggggagtccctcgcaggagcggcggcggcggccgcggcggcgaggtcgcaccccacatcggcgagcggcggcggcacctccggaggcaaaggctagatgttcgggcgcgctcctgacaagagcgacaacaccggagtctacgagatcctctcgttgccccagtacgcgttccaggacgatctcaaggaggactaccgcaaggctgatatgatgaaccacctcgacaagggcggtgac

SEQ ID NO: 88737 - DNA, 559 bp, Zea mays
  unsure (1)..(559): unsure at all n locations
  Clone ID: MRT4577_180927C.1
nctcggttgttttttttttttttttttttttttttttttttttttttttttttttttaattcccaaaaataaaccgggggttttattggggccccactgaaccatggaatttttacaaaattcgggggatggccccctggtgattttgggcctatgctgggccggtgcccaaacaagggttaaactcctcaaaaaggaatatttgcactaatttttttggggggcattaggggtgcccctaccatggcatgttttcaaatcgggggggtgacctacagaggaaccacatcaggccctcgaaaatttatacggccgctggaacgggatatatggatctaagttttccagggctggatggtgactcgcccctggttaattcctcgttaatgaacccggaggcttggaggggggggcctttttccataaggctcaaccgggggaaactgaacagggccttcccgtgaacattgaaaaaggggaacttggtttggctacgggctacctggagggacataaacccttgcccgtcgaaaaaaaacttgaggccatcttcgggggg

SEQ ID NO: 88738 - DNA, 672 bp, Zea mays
  Clone ID: MRT4577_180928C.1
gtgcagcgtcgtgcggcgtctccatactatctctgcgctctactttcttctctctctgttcctccggctccgcctgatccctactatacaggaatcgccatgtctgactcggaggagcaccacttcgaatcaaaggccgaagctgcggcgtccatcacctacccgcagaacgctgggaccgtccgaaataacgatttcatctacatctacaaccgtccctgcaagggcgtgcaggtttctacctcccctactggtaagcatgattcacgccaaatacctgtttgtcgccatacacatattcgatgggaaaaagcttgaggatattgttccttcatcactcagactgtgatattccttatgtcaaccgtactgattatcaactgattgatatttctgaggatgcatttgtgagccttcttacttctgatgacagcactaaggatgatcttatactcccaactgatgagactcttgttgtccatattaaggatcgtttcttaaagcgataaggatcttgctgtgactgtcctttctgctatgaagaatgagcagatctgcgcgttaaaggatgttcaccccgaataacttccttgcttttggagacggaaccctactgtatctcaacttaaatcaccaaatatctgtatcaccaaacgatagctaccgagacat

SEQ ID NO: 88739 - DNA, 382 bp, Zea mays
  unsure (1)..(382): unsure at all n locations
  Clone ID: MRT4577_180929C.1
ntcggaattctccaaagtttgtatagtgtaggatttgttggtattcgtgataaaaacacctcatcctattcattttgccatgacgggcgaactccagataaaggttttgaaagtaatgagaaattattaattcatccatgttactggcttggtttgaatctaaatcgtaatgcacttgctccagaggaagcagaggagataaatgacgaatatgatattaatattatttcagataattcagccattagaaataaaacaataggtcaaataactactcatctagatcagataccgataggaaatgaaggtgccactgaatttgaacatggtgnttagacgccctaggatagtatttgcatncnacttacagacgtccagtccc

SEQ ID NO: 88740 - DNA, 533 bp, Zea mays
  unsure (1)..(533): unsure at all n locations
  Clone ID: MRT4577_18092C.1
aaagaaacaggaagacaaaaacaaaaaccangtttttaattatggccnacaggaccaccaaccgaggggcgaggaagaagcaggaagcgcaggacgcggcaggaaagagcaccaccccgcacaccaaacacganggcaagggaaccaagcccggccaccagaaccacacccccaacgacgcaaccacacccgacgaggagaacaaagagcacgggggcgaagaccgcaacacaacgcncaaggagggcccgaccggcaccaggacgcaagacaccaaggccccgcacaagaacccacaaagcaaccacnaagcagacaagaccggaggcaaacgcaacgaagacaacgaaaaccccgccgaaaacaaagccggcaccaccaaaaagaccacactcagcatcgaaatagccaatgatgatgaattataattcaaaagagctaacctggtgctcatgttatcaagaaaatattattttatggttattttgtggaaccaaaacaccaaaaaaaatgtgatgcaacatgtccttttg

SEQ ID NO: 88741 - DNA, 554 bp, Zea mays
  unsure (1)..(554): unsure at all n locations
  Clone ID: MRT4577_180930C.1
ctttgcaaacatgaatatcatcaagctgcaaaagatgtatccccagttcgaccagggcgagatcttcggcctgcaagacgctttccgcaagctcgatgtcgacgacaatggctacctcgacgagtccacagtcatcaaggccgcccagcagtcggagcaccagccttacgatgtcgtacgacaagccctgaaagaggtcgagctcgactcctcaaggagagtagagcttgacgattacgtagatctcatctccaaattgcgagtatcatctccagcccaacagcgcatgtctactggcccaacccgcccacgagccggcactgctacaagcgtcaactcaccctccaacccagggcacgcctccaaaggtagcttangtggtggcaggatccaggttcagggctcctctgccaatgtcacccacactatcaacgaggatgagcgaaccggagttacgcgccatatcaacgccgtccttgccggngacccagatattggcgagccgcttgccctttcccaccgacactttngagatgttcgatgctttgaaagac

SEQ ID NO: 88742 - DNA, 759 bp, Zea mays
  Clone ID: MRT4577_180931C.1
gcaagctggcgcaccagagcatctcggcggcaaggtcctgtttgaccatctctacgcgccgcgcctctccggcgcgggcctgcacaggctgctggccgacgacgtggtgttcgcggcgctcaaggacagcgcggccatggggtacctggctcccgagtacgcgacgacggggcggtccacggacaagcagggcgacgtgtacgcgttcggcgtggtggtgctgcaggtgctggcggggcggcgcgccgtgtcgccgccccacctccagcagggcggcggcggcggcgggcggctggacgacctcgtggacccgcgcctgcgcgggcggttctcgcgcgccgaggccgccaagctcgccggcgtcgcgctgctctgcaccgccgaggcgcccgcgcagcggcccaccatgaccgccgtgctgcagcagctcggcaccagcagccagtgatcgtcgtcggcggccggtacggtggtgggccggagtcggagctcgctggctacctggccggcgtggtgactgatttgtgttgagttagttaaccgctactgatctcggctactcgcatggtagctgcatttgctccttgtttgagctgagccccggctccttcctcgggagctcggttgatgtagttgtagtaaagtaagccggtgtgattgcattgtgacggagagtttttattagttaactaccgtctcatggcactgatgttgtatcgcgcgatctagaactagcggacgcgtgggcggacgcgtggg

SEQ ID NO: 88743 - DNA, 472 bp, Zea mays
  unsure (1)..(472): unsure at all n locations
  Clone ID: MRT4577_180932C.1
aagcagtggtaacaacgcagagtacttttttttttttttttttttttttttttttatttttttttttttttttttttttttttttttttttttttttttttttttttttttttttttttttttttttttttttttttttttttttttttttttttttttttttttttttttggggggggggttttgttttttttttttnntgngnnnnngtnnntggnnnngagggagttatagttgtgaggtnntgnattagtttttgagggtgaagagtnnatgattanagntatntnagaaaannnagnaaattttaagggaaaggtagtagtgatnngaggagaaggannaaaaggngggtaagggatgnnngaaatgttganttnnaanaagnngaataatgggtgnttggttttggaaaggagtgngnnnttgttgaaagatggtagattttttgnagggtaaaatggatttgttg

SEQ ID NO: 88744 - DNA, 571 bp, Zea mays
  Clone ID: MRT4577_180933C.1
gatcgactcatcgccctcttcttcctcctcctcctccctcctcctccagcagctctctgtaaccacctctgttttgtactagtacatatcgccctgtctcggagtccctgaaacgtgcattgggatctcgcgactttctgcgaccgattcctcttccgctccctgtcaggagatccagtccaagggacttgtgccgtagttcctccctgctaccttgtggtttcgatcccccccgcggatcttgggagggcaagggcaatagctgttggccttgtgtcccggcttttctcgccttctcgacctctgaaatctagcttgccctactctcaagtctcagctgatgttagattagcgagatgaacaacaacaagaagaacaacaacaacaaatagaattgcgagtaaaagaactgttttgccaattcgcctcgcctaattcgataaaattgcaaatctgaggcgtccccacgccgtcatgggcactgctctacgcatgtgaatattccgtagtggtccatgtgcggatgcgcccaagaacataaacctcgctttgctttctccgctgcatgtga

SEQ ID NO: 88745 - DNA, 1113 bp, Zea mays
  unsure (1)..(1113): unsure at all n locations
  Clone ID: MRT4577_180934C.1
gatggccagtgagctcgacgacgaatgacgcgacgacgaacgacgacacnccgacatggaagacccgacgtgactgaggaaggggtcgacgattcgatgacatcggcgagggtcaacgacgagccgacncaacgcgcgccaggaaaactctgaccgggcgagctggggacactgacgagcatgcgcgcagcagcggggacagagcagaggccgagctgggcgactgcgcgcgaccactgacaagcacgggcatgggagtgacgccgagggagctcgatatgggcgggctcggactaaagcacgcgcggcaaggatagtcgacggcaagctaaaaccaccggaaggcgacgacgcttgagaccgtccaaggaggatcgatggcggccgagcagaaggacacgaccgacgagctggagcaaggagaaggggcggccggcgaacaggaacgagatccgggctgggagagcgacggccgtgaaaagcaggggcacgacgagcttgagggagctccggcatggcaacggatctcggcgaacttgaagccacggcaccggaggaacagagcgcgcgcaggaagggatcgagctggagctgggcacgagctgaaccgggcgccatgggagcccggggcacggaccaaatcccagcaggggaagcaggcgcgacggccatggtgagcactgggaagggactcagggaggaagacacgcgcgaagctccgatccgcggccagcgcagagcaccagagagacgcggcaagggaggagcgcgcggcggtgaagaacactgactggcacattcgtgcggtcagtctgtagaaatagcaggcgaagaaatgaggccattggccgtacgcagtgaaagaaaatcagaggagaacggtgagcggtggaagaaagaaaaaaaatctccacggcggcggcagggcatagagttgaagagattttttgtgctggagatcgagcgtgcgacacggagaagatgaggctgagcgctgtgcggtgtccacgtttagtgaagaagaaaaaaatattaagccttcaatggtgggagaggatgaggatggcaaccgtgaagggatgatgtggagagggttcccggccggcctcgagg

SEQ ID NO: 88746 - DNA, 179 bp, Zea mays
  Clone ID: MRT4577_180935C.1
cggtcgaccagcgtccggcaattctgtcgatagctggtttgcttgatttgtattgtgctagaatttctgaactttccggatgtactttctagctgtaagcatacattcatggtgtgtttcatattaaaaaaaaaaaaaaaaaaaaaaaaaaaaaaaaaaaaaataaaaaaaaaggaagt

SEQ ID NO: 88747 - DNA, 200 bp, Zea mays
  Clone ID: MRT4577_180936C.1
attccaaactttttttattttatcatttgaaaggtatatgtttattattttgtcaaaaataattttaaaacgtattcttgaagcttatttagatctgtttcataggaactgtgaagaaagtaaagaatttaaaaaatgaagacagattttctcaccctgcttatgggtgcttctcgtgctagccttttgcaagtgtcggg

SEQ ID NO: 88748 - DNA, 417 bp, Zea mays
  Clone ID: MRT4577_180937C.1
ggggaccttgaaatttgtttaattataagaaacattgtttccaacaaaaccaaacgggaacctttttgggggcagggttaaaaaacaccttggggcccaaataacaaaaaacaattcaacgggggaaatttaaacccgggctaaaaaaccggcgggctggggggcctcccttttccacccggaaatccccccccccccctaaattcccccccccgttttaaagacccaaaagccccaaaaggacccaaccctggttggaaaattaaaaactggggggcaagggggggggaaaaccaacccaggccttaaaaaaaacccccccccgtggaggccaaagggctttgaaggtcccaaagaccctgggaaaaggaaaccccccccacctttcagggtcccccggggtttaaagaatgggaa

SEQ ID NO: 88749 - DNA, 263 bp, Zea mays
  unsure (1)..(263): unsure at all n locations
  Clone ID: MRT4577_180938C.1
cctctcaccatcggcgcgctactatagataattgtctggtgcctacaaaaacaccaccttntnttnattcctccattcttcacctnttgcttccttttacatcttcatttttaactaacatttttttttctttctaattcattacacttcaccctctattactccttctacttatataaatcctccttcaataactccttcttcatatattctcatccctttaatttcaccttcacctactattactttactttcctccactt

SEQ ID NO: 88750 - DNA, 1062 bp, Zea mays
  unsure (1)..(1062): unsure at all n locations
  Clone ID: MRT4577_180939C.1
gctcatctatatcttcttcncccgccgctcttgtgatccttggatcgcgcagggaggacaggatcgagtctttctccgacgtctacttccagcgcctagcttctccaccgcgttggctgctcctccatcgccagtctgctcgccgggatgcccctgccctactcctcggtctccctcttctgccacggccgctgctcatcgcgcccagctgaagctcgccggacttccctgtttctctctctccgctgctcgctcggtgtccggtcgtggtactgcctgcgcaccacgagtttctccctgacgcccagcgacagccgcagctcggatatcccaggccgcgtgctcgccagtctcgagcgcccctcccttgctcctctagctcgtggagcttctcctcgacagcgcccctgtttctttttggccggagcgccctctgctcggcgtccctcgctgctcgccggggaaactctttccctgctcgccggcagcaacatccagccgcgcagctcttgactcgccggccgagccccagccccagcgtcgtggagcttccctgctggcgtgcccagatcctctctctccggtgcagctcggagtcctttcttttctctcaatcccagacactcggctgcctctgttctccagctcgccggagctccctgctcggcgcttgcttctcttccttccctgcgccgagccgctgactgctcatctcactggccacgcacagccgcgcctggttctctgctccatgtgcacagttccctgcgcgcccagtaccgcacacaatgctcccagattcgcgtagcctcggctgcctgttctgctcgctcatgcctgcgcgccgcgcatcggattccgtctcgcctcgcgatggctcgcctcgccgccgaattccagaaatcgcgtcgtcgattgctgagtccttcccagcccccagacccgcaggctccctgctccgccgccgatttccccgccttgctggggacatccgcttgattgcttgagctccattccagtcccctgctccccgttcctcccccctcggatttcccttcccca

SEQ ID NO: 88751 - DNA, 193 bp, Zea mays
  Clone ID: MRT4577_18093C.1
ttttggtggggtttttttaaatattggtggggttatgccactacaaacacattgcaatttaacgccaacacaaatagatacgtttaggttccaataccactagggttggaaatcaatgcactattaggaccttcctttccaaggggactaatgttcgggcacaatctttgatgccaaaaattaaaaaacaaat

SEQ ID NO: 88752 - DNA, 294 bp, Zea mays
  Clone ID: MRT4577_180940C.1
caggtgggtttaataattttgtgtcagctattggacatgtgaaattgcccacccctagtccataatacacttatatacgaaaagggagttctatataaaaaaaagaccccccccttaaaattcctggggaaagaaaaaaaaaggggtaatcccccccccccacacaagtataccataagaacctacggggggggaaaaaagaacccatgaccggcacgctcctgacccccaacaaggaggcacctccttgggctggaccctggggcataaaggaaccaagcgaaccacaagggc

SEQ ID NO: 88753 - DNA, 782 bp, Zea mays
  unsure (1)..(782): unsure at all n locations
  Clone ID: MRT4577_180941C.1
gctcatctatatcttcttccccacgccgctcttccctgtgatctttccatcgcgcagggaggacaggatcgagtctttctccgacgtctacttccagcgcctagcttctccaccgcgttggctgctcctccatcgccagtctactcgccggccgagccccagccccagcgtcgtggagcttccctgctggcttgcccagatcctctctctcccgtgcagctcggagtcctttcttttctctcaatcccagacactcggctgcctctgttctccagctcgccggagctccctgnctcggcgcttgcttctcttccttccctgcgccgagccgctgactgctcatctcactggccgcgcacagccgcgcctggttctctgctccatgtgcacagttccctgcgcgcccagtaccgcacacaatgctcccagattcgcgtagcctcggctgcctgttctgctcgctcatgcctgcgcgccngcgctcggattccgtctccctcgcgctggctcgcctcgtcgccgaattccagaaatcgcgtcgtcgcttgctgagtccttccccagcccccacacccgcaggctccctgctcgccgtcgatttcccagcttgctgtggacatcgcttgatcgcttgagctcgattccagtcccctgctccttgttcctccagctcggatttccctccccagtcgagtctccttgccgcgcgaatttcagccttgccgtttccttatcgcgctcgcccagctctattgccgcgcccagcctttagctcagtcccg

SEQ ID NO: 88754 - DNA, 416 bp, Zea mays
  Clone ID: MRT4577_180942C.1
tcgaaaaaaaaaaaaaaaaaaaagaaaaaaaaaaaaaaggagaaaacaaaattaaataaacaaagaataaaaaaaaaatagcatgtaatatagatgaacacctaatataaatatcactgaaataaaatttaataaaaaggggtactgggaaaaacgatggactggagcaaaccttgagttgccttgacaacaatttgccttgtttatacatgtggcctttatacagatgaggccggcaccgattgaccctcccaacattggggtaacctagagtgtgtgacatggctataatgccctgtggcggcgcatcctgttcggcgggtgtggtgcatacgggaagggtgcctactccaattgttaacgctatagtggccagtcctttaggtccatttccttcctctctcttcccgtccttt

SEQ ID NO: 88755 - DNA, 515 bp, Zea mays
  Clone ID: MRT4577_180943C.1
gattcaattttctcactccgatacgggcggggtccaaaccctaggtcgccggctcctcccgaagcgagtctagctgatccgtttgttctgcacaagctctgccgtgtttcgccgctgtttcctctttagaggaagaagaagaagaaagagagggatctggtcgactgccgtcgtcggcgatgggcgacggccgcggcggagggtcaaaccgccccgcgtggctgcagcagtacgagctggtgggtaagatcggcgagggcacctacggcctcgttttcctcgcgcgcctcaagccaacgcatccccaggctgctggccgccgcggctcccccatcgccatcaagaagttcaagcaatccaaggagggcgatggcgtctcgtctaccgccatcagagagatcatgctcctgcgcgagatcaaccaccataatgtctgccaagctcgtcaacgtccacatcgaccacgccgacatgtccctctatctcgccttcgattactgccgacgcagacctct

SEQ ID NO: 88756 - DNA, 417 bp, Zea mays
  unsure (1)..(417): unsure at all n locations
  Clone ID: MRT4577_180944C.1
atcctcctaacccgcaaccacnggaaggganagagggggattttgagaaagagaacccccgcataccccccccaggaagagagggatcgctggaccacggccaaccaaccaaacagcaaagaggcaacggcagacgccaagcaagcaaaagcagagccactagacccacacaaggcagcgccagacaaagagccgaagactgacgaaaccaaaaaggaggctccgaagcccaaagcaacggagaaagcagcagaagaagagaccgcaccaaagcctaagccaaagaaccccgacgaaggggctcaccccagcaagacgactccagaagaagggcagaagcggcacgataacacgaaaaccaacaaccgtgaggccggtacaaaagaacccaagggaacgcacgaccccagaggggcc

SEQ ID NO: 88757 - DNA, 341 bp, Zea mays
  Clone ID: MRT4577_180945C.1
ccccgggggaaaattccctgggcccccattaaaatggaatgggctgccccccggggcccatggggggccccccccgggaaccccgctggcatgattagccgtagttgggccccccaattggaatggaccgcaccttccacttcggggcagacccatccagggcatagggggccatatccctttggggggggcagccgcccgtgcatgggtgggtgcccccgtttgtcagccctcctggccgaactccttggggaacctttcgggcccctccgggtcctttttgctaaccgggggcctctgcctcgacgggaccttttcgaagtccgccctcgaaatagggg

SEQ ID NO: 88758 - DNA, 200 bp, Zea mays
  Clone ID: MRT4577_180946C.1
gacgcccagggacccgggcccagcattgggcgccttggtctacgcgagcggaccccggcgcgtccggaacaccgtcctcccctgtgggcgctgtcatatggataggtgctcgtagtttttgacgggttttttttggaggggagtgtaaccaaggctagaatgctccttcctttgatcgtccggggggggggggggggggg

SEQ ID NO: 88759 - DNA, 398 bp, Zea mays
  Clone ID: MRT4577_180947C.1
cttattttttatttttaacccaaacatcattcattcatgtattaaggcatatgtggacgggcaaacatttttggcaaggagaacacaactggtccatgaccccacaaaaagctcgggggaggaaaaaaaccatacaaactcctttgaaagacagtaccatacataggccatgggcggataaacaaaaaaataccctagacctgatcttagttcaacacctgatcggggtagaaaggacggaacattctgagcggaccttacacgggggaggatttgatgatattcaataaactcgggcttaaaagaaaccacccccaaaaggaaaccattcacatcaggctgtgctgccagctcttttgcagtcgcagtaagtacttaaccttcatagaagatccttg

SEQ ID NO: 88760 - DNA, 406 bp, Zea mays
  Clone ID: MRT4577_180948C.1
aacctgggcaccccctgttgaccccttcctcgcttatttatcccttttttaccccttgaaagggcacattggcccttgttcaagcaggagggggcacgttggcccgggcccacaccttttggtgcccccccgacaggtccaaatccgccacggcggccaccatggggatgacactgggggcggggggtcctccaaataacaggctttgggcctactggacgcccccccgggggggcctccccttcaggggggtcttgcccgtgggtttctggccccgctctttggggcccgggggggccccccccccgccaaccaacgtgaggggggctccaaacttgtcgcccctggggagcgccgttcccaccttggtgccgttggggtcaaacttggggggcacggtcccttg

SEQ ID NO: 88761 - DNA, 368 bp, Zea mays
  Clone ID: MRT4577_180949C.1
aaaaaaaagggcgaaacgaggccaccagttcagcgacgagtggaagcggcgcccagcaaccaatccctctacatctccggcggcgtctccccggaccatggtcttccccaacgagctgaaggatctgatgtatgctccacctcaagaaggggagaaagctcagcttgattcagcaaccgagggaattactgactatgcccagtatcaattgggagaccttgttgatgtgcacctaccagaagttggtatcagcgaatcccaggaaaacacctttgccttctgttgagagtgtgaatgcagccaccgatatctattcaccagggactgcagaggtggttcaagcgaaccataaactaagcgacttgcct

SEQ ID NO: 88762 - DNA, 407 bp, Zea mays
  unsure (1)..(407): unsure at all n locations
  Clone ID: MRT4577_18094C.1
gtcggtgctgctcacctactattggtggatgatgatgccctttacggtttcgttctcgggcgctggagaacaagaacgcggtggactttgacggggaaaagaacaatgtggtgcactaatgacatcccgttcgagcaggagaaggtgaacaccgtcgatggagccaatttttttcagccttttgtgcattgagctggcgcgccgccacggnctccacctggtggtcaccggaatcatctggctcctgctccatattttcttgtacagtcggattgtgtttcagaccgacatctttagaagcataaactggatctcttggggcaacaccatgagaacactggatgaggcgtaccgtatctcccgggggcagaccctaatcgcgctctgcggtacagtttcgggctcct

SEQ ID NO: 88763 - DNA, 572 bp, Zea mays
  Clone ID: MRT4577_180950C.1
gattttttatccttgataatttaaggataaatagttcattaaggagaagatagaatcatagcgaatgaaattctaattgagcttagagtatcaagtgtgttatagtatgattctgaataccctaaaaaaggaaggatggaaggagtcgggaggttggagagagaaacttttggatatatccgttcggattgaattgcaaatatatcaatgagacaatgacaaaatcaattcaattgtttattgcaatgagctcatcgtttgggaggtctaaatgttgatcgctagtactttttggaaacaaaattctatataggagtcatatatagtgaacatcgaggagtaccagctagatgaagatgacatccaatcatactgatgatgagattcgctcgcagcgtatgttccatggaactttttggtcatgctgtttaagctagtttgagccgactactcgtctgatggaatagacacgaatgggattgtcggtttgcatgattgatgcatataatttttcctactttctgcttctatttccacgtcggcagttacatttgccaattcatctttattaa

SEQ ID NO: 88764 - DNA, 257 bp, Zea mays
  Clone ID: MRT4577_180951C.1
atatatttattttttttttttttttttttatactcaaacaagagactggcctgtcacaggcacaaatttatatttgcgtgtgtttacagctatatatatacattagccaaactggcaaaaacggatagaggaatggcaggaaacaaaattaacaagctaaaaaacggtcaaacattattttggaaatgagattaacatgttaaatgtggtttatgaggaataataattactggttcaactgcccttttgtgtataaa

SEQ ID NO: 88765 - DNA, 429 bp, Zea mays
  Clone ID: MRT4577_180952C.1
aaaaaaaaaaaaaaaaaaaaaaaaaaaaaaaaaaaaaaaaaataaaaaaaaacaaaaaaaaagaaaaaataaaagaaaaaaaaaaaaaaaaaaaaaaaaaaaaaacaaaaaaaaaataaaaaaacaaaaaaaataaaagccccccctctttaaaaaacccaagttttaccccccttaattccccttcaatacttttttttttttgccacctaaattaaattccttgccccccttttaaaaactttttacctgaaaaaaccctgccttaaccaaaataaattcccttaaaaaaaatcccctttttcccaattggctaaaaaacaaaaaagccccaaccaatctcctttccaaaaattttccaaccctaaatgccaaaaagaaccccccttttaccgccccataaaacccggcgttttttgtgtttccccc

SEQ ID NO: 88766 - DNA, 259 bp, Zea mays
  Clone ID: MRT4577_180953C.1
gctgccaggaaaatcatctcccactatgtacacgttaagcatcttattgttccctttccattactacatcacataaacccaatatttgaatcacacagtggccattaattcgtacataggccaaattaggcctagatgatctgtttatgtagaaacgaattccttgagcagattgctacatatgggactatgggtctcatatctcacgctatgctgcatgcgtttgggttctcatcgctgaagatagtagtgatctggg

SEQ ID NO: 88767 - DNA, 603 bp, Zea mays
  Clone ID: MRT4577_180954C.1
tttcaggaaaaatatctctcaccagtcaccacctcccctcagcttctccccacctttggtcaggcagtgttagcggaagcggaggcggcaacctgaatccctgggagtgctcgcccaagtgcgggtcgcggtgctccaagacgcagtacaggaaggcctgcctcaccttatgcaacaagtgctgtgccaagtgcctctgcgtgccaccggggttctacggcaacaagggcgcctgcccctgctacaacaactggaaaaccaaggaaggagggcccaagtgcccctagaagatccaccgcagctcccgtccgccattgtccccccttctccgaatctggaacgtgttgttcatcttcgaccaccccctaggcttggcattttattactactagtataatgctagtgtccgcccgttgcttaatctggaatgctaccagccagatctccatgctctcctgtgagccactcggcgctccactctccactggtacgagtcaatcaactaaagctacccccgggttgatgaggaacatcccgcgcgattagtggggcatgtcattacattcatcagcttctatatataaactagataaactttttacc

SEQ ID NO: 88768 - DNA, 919 bp, Zea mays
  Clone ID: MRT4577_180955C.1
tttcgggatacggtgcccccacccaacctccgtctccagtcatccactgcctgccgggcccaaatatctcctcctcgtctgcctcgtttgccacataagcacggcggggcggaaccggacgtccctcgctcccaaatatctctcaccagtcaccacctcccctcagcttctccccacctttggtcaggcaggctcaggcaaaggaggcggccaacaaggacgagcgatggtgaccaaggtcatctgcttcctggtgctcgcatccctcctcctcgccgtcgcctttcccgtgtctgctctgcggcagcaggtgaagaagggcggcggcggtgaaggaggaggcggaggcagtgttagcggaagcggaggcggcaacctgaatccctgggagtgctcgcccaagtgcgggtcgcggtgctccaagacgcagtacaggaaggcctgcctcaccttatgcaacaagtgctgtgccaagtgcctctgcgtgccaccggggttctacggcaacaagggcgcctgcccctgctacaacaactggaaaaccaaggaaggagggcccaagtgcccctagaagatccaccgcagctcccgtccgccattgtccccccttctccgaatctggaacgtgttgttcatcttcgaccaccccctaggcttggcattttattactactagtataatgctagtgtccgcccgttgcttaatctggaatgctaccagccagatctccatgctctcctgtgagccactcggcgctccactctccactggtacgagtcaatcaactaaagctacccccgggttgatgaggaacatcccgcgcgattagtggggcatgtcattacattcatcagcttctatatataaactagataaactttttatcatgtcactggcccactaccagtctaccactac

SEQ ID NO: 88769 - DNA, 1445 bp, Zea mays
  Clone ID: MRT4577_180956C.1
ttgggtacctcgctctcggaaatatctctcaccacctcccctgagcttctcccgacctttggtcaggcaggaagggggcggccaacaaggacgagcgatggcgaccaaggtcatctgcttcctggtgctcgcatccctgctcctcgccgtcgcctttcccgtggtaagatcgctgcgctagcgctagcctcactttcctcaacctcaagagctaaagctaggcattctgcattcctgtacgtacaactaatcggacgatttgctcctcgatcagtctgctctgcggcagcaggtgaagaagggcggcggcggtgaaggcggaggcggaggcagtgttagcggaagcggaggcggcaacctgaatccctgggagtgctcgcccaagtgcgggtcgcggtgctccaagacgcagtacaggaaggcctgcctcaccttatgcaacaagtgctgcgccaagtgcctctgcgtgccaccggggttctacggcaacaagggcgcctgcccctgctacaacaactggaaaaccaaggaaggagggcccaagtgcccctagaagatccaccgcagctcccgtccgccattgtccccccttctccgaatctggaacgtgttgttcatcttcgaccaccccctaggcttggcattttattactagtataatgctagtgtccgcccgttgcttaatctggaatgctaccagccagatctccatgctctcctgtgagccactcggcagagtgaggattactaggtagggtggcatgtcatgtgctccaccctccactggtacgagtcaaatcaactaaagctacccccggattgatgaggaacatcccgcgcgattagtggggcatgtcattacattcatcagcttctatatataaactagataaactttttatcaaaaaaaaaaaaaaaaaaaacgaaagaaggagggcccaagtgcccctagaagatccaccgcagctcccgtccgccattgtcccctcttctccgaatctggaacgtgttgttcatcttggaccaccccctaggcttggcattttattactagtataatgctagtgtccgcccattgcttaatctggaatgctaccagccagatctccatgctctcctgtgagccactcggcagagtgaggattactaggtagggtggcatgtcatgtgctccaccctccactggtacgagtcaaatcaactaaagctacccccggattgatgaggaacatcccgcgcgattagtggggcatgtcattacattcatcagcttctatatatatgaactagataactttttacgtctatatataaactagataaactttttatcatgtcactggcccactaccactacgcctccaagatagaggcttttaactgtttgcctaccttacggaatcttcttaatcatgggttactaacacatgagttactcacatagc

SEQ ID NO: 88770 - DNA, 443 bp, Zea mays
  unsure (1)..(443): unsure at all n locations
  Clone ID: MRT4577_180957C.1
cgacgccaacaagaagnccagaggagacgacgacggccagcacccccacgggcacagggaccagagagccaaggaaancagcgccggcgacagggggaccaagccgcagcagcgggaccccgcaggagaagcacagagacgaaaccgaggaggaggagggggacgacacaagcaccgggcacacaccccgggcagctcaccgccgcacaacgaacagccggcgacggcgcgaccaacaccgcggccgggcagcacgccaacgcccgcgacaagccaggaggggcgcggacccacggcggaagagaaggcaaggcagaacccgccacacgggggagggcaagagcagcagcaccgacagacccagcggcgacggggaaccggagcgacaacgaccccaaacgcggggaagaaagagggagaagggacgggcagcccgcccccag

SEQ ID NO: 88771 - DNA, 439 bp, Zea mays
  Clone ID: MRT4577_180958C.1
ggccgcttttttttttttttttttcttttttttcttttttttttttttttttttttttttttttttttttttttttttttttttactaaaacacaacaacaggatatgaccttaaaaaacggtgcccgccaccagggaaagcacgtgggccgggggctgtgccgttacccaaaaaaagaaaggggggggccacacacccccccacacatacgggtcgaaaaatacaaccaaaaatcaacaacgaaaaacgatggacggcccgcgaacgggacaaacccggggacaggttttatttttttttccagggaggtccccccctccctccggtttcactgggggttcttcacttgacggtgaggggcaggggtttggcgccccaatctttgaggccctggaggatggggcccaagagcttgccctggctgatgccaataaacac

SEQ ID NO: 88772 - DNA, 359 bp, Zea mays
  Clone ID: MRT4577_180959C.1
gtgtgtgggggttaaaatgttctttgtttttttttttttgggggggcccgccaactgtttaagagggagaaactttgagtaagactgggcctaggaatacgcacctataaaaaacactaatttgtgccgaaggaggcaggacattaaaaattcatacagggggggcagtcgaaagatggcagggggtgaccaaaaaagccggccgccaaagctattggtagccaccaacatagaattgtcggtgagggaacagacaagaccaacaccaaaaagccggataagccgccaaacacacaagtgatcattacccgcggggaagagacaacgcatcaaaacgcggagatgattggcattatcta

SEQ ID NO: 88773 - DNA, 346 bp, Zea mays
  Clone ID: MRT4577_18095C.1
atattgcgtacagagttggccgcagagaatccccaagcaaacaaacagcgtagagggataggagagtagaggacaggagatgctgggtatgatacaccatggctccgatgaatcgtgtacggacacggtgatagtcgtggaacgtcgacgaggtgcgcaacgacgctaggaagaagatgggtcctactacaagatactgccacatcaacttctcgcaccgccagagcacaaaagcccctgtagctgcatcgtccgcaacccgagtgtggtcaggcctcaagctcagcaggatggagacctggacctcttacaatgactagcaatctgcgagtacgcgtgctcgctg

SEQ ID NO: 88774 - DNA, 140 bp, Zea mays
  unsure (1)..(140): unsure at all n locations
  Clone ID: MRT4577_180960C.1
tacatagcacgtgtgggcttgtgggagctttatgatttcaggcaattagggacaacttttattgattgttgcttgcttctgtggagtgtgaacagatttttctctaacataattcgacttcantcttaggggggggggga

SEQ ID NO: 88775 - DNA, 394 bp, Zea mays
  Clone ID: MRT4577_180961C.1
cggacgcgtgggttggaatacgatcgtcggtccgctggagatgcctgctgcctccgtttctgtttgtgtgcgtgtctcggagaagctctccctcgcctcgcagatccgcggcctgctttgttgctgctttgccagcaagctgccgcgctcatcctcgcgcgacgccagcggcggggtggcccctctccagtgacccggcgactgctcccgtcggtgccgccgccgcctcctcctccgagatccattcccgtgcccgcggcaaggaccagatccatcaccgcgccacgagctacagcaggcgacatccgccccggggtcgcacgccgcctgctagccgcggacgtcccgggagccccgttcgcagacgcctgcacgcgcgcggcgcgcaacgagc

SEQ ID NO: 88776 - DNA, 353 bp, Zea mays
  Clone ID: MRT4577_180962C.1
gacgaaccttttgtgttcttagaatgcttgttcaccggcacctgctcctgttccggcgttgatccgtccgtacgaggagcacaccgtacccacacctaagtttacccaccagggtctatgaccgccggagtgcttcgaagaagctgatcgagctgcttatgagacgcttgaactgcttctgcagtggcttactgtactgggactacgtcatctaatgaacgcattggcggtgtctaactgactgtccttgaggagaggtctcaatctgactctacttgtatcggtcagatggtttactgggttcatctgtaaagctaatgcttgtccatattattgataaacaatataatgta

SEQ ID NO: 88777 - DNA, 450 bp, Zea mays
  unsure (1)..(450): unsure at all n locations
  Clone ID: MRT4577_180963C.1
naaaaaaaaaaaaaaaaaaaaaaaaaaaaaaataaaaaaaaanaaaaaaaaaaaaaaaaaaaaaaaaaaaaaaaaaaaaaaaaaaaaaaaaaaaaaaaaaaaggggggggccgttttaaagaaccaaagtttacttcccctgcattccaagttaaaattttttttatggggcccccaaaataaaattaatggcccgtgttttaaaaacgtgggaacgggaaaaacccggggttacccaaattaaatgccttggaaaaaaatccccttttcccaagttgggttaaaacaaaaaggcccccaaccattcccctttcaaaaaatttgccaaccctaaatggaaatgggacccccccctttaccggccattaaaccccgggggttttggtttttccccccaatttaccctttaaatttgcaagccccttaacccccgttcttttgtttttttcc

SEQ ID NO: 88778 - DNA, 552 bp, Zea mays
  unsure (1)..(552): unsure at all n locations
  Clone ID: MRT4577_180964C.1
acaaanagtggntttcagtttataatgctagnaggcccatgaagcagagataccattacaatgtagcagatgccaggcttcatcaacacatagagaagggactggtttcacatcccaagtatatgaactgtcacccatattccttcataaggattggattatggagcagtggngaaaataactactacatcagtgccatagctggtgcaatgaatgggagttccttggtggtcatgtcaaaaggaactccttacactcagcagtcttacaaagttagtgaatcattcccctacaagtggatcaacaagaaatggaaagaaggttttcatgttacatcaatgacaactgcaggaagccgctggggtgtagttatgtcaaggaactctggatactctgaacaggtagtggagttggattttctttatcctagtgaaggtattcaccgacgatgggagaacggatatagaataacttctacagcagctactggcgatcaagctgctttcatattgagtatacctaaaagaaagttaatggatgagacacaagaaa

SEQ ID NO: 88779 - DNA, 156 bp, Zea mays
  Clone ID: MRT4577_180965C.1
ccgactcgtaggtcttgatttaacgattgttgaacaaaagcactagtgtatgcgtcggaagttaaatcataggtcagaattgttagctgataccgtagtgccacatattgtctgtgtatacaatgtacgtggatcctttgttctttgctgatcctg

SEQ ID NO: 88780 - DNA, 449 bp, Zea mays
  unsure (1)..(449): unsure at all n locations
  Clone ID: MRT4577_180966C.1
gggggggggggnnnaaaaaagaaaaaagcccccccgcggggagggcacaaanaaaangggaccngangacanacaaannnnaaaganaaggnccaagggagannnagcaggccncccaaaaganacaccaagaaancnggnaggaaaaagggggggggggagcaacangaacaaggaanccaggnagcaagagagggnnccccaancaanccaggnnnaaccgaggaaccaggaaccacccnnccggcaaaccaanagcgggaccgcacaagcnggcaaaaacacnnagcaagggaacnaagnccagcncaaggccngggggccacannccnangaacaacncaanagcnncacgggnnagnccannggaagagcanccaccaancacaaaannccaagaaagggnanccngacgaggcannanancgaacaccaagacggcancgcca

SEQ ID NO: 88781 - DNA, 410 bp, Zea mays
  Clone ID: MRT4577_180967C.1
atcgtatcatctcaggacgtgccgccgccatggctgctatgggccggggcctgcccgtgctatcctgctcctcctactcaccgaaccggcggccgccaacgccgcggcagcgcccggcgacatgtccatcaacacctacaacgaggagcaccgcgcgcgacgtctggagcggacggaaccggacgtgcgggccatgtacaactctgtggctctgcggagcacggccgcgcatacaactcactgggcaatggcgagggcaatcgcgaccgacacttcctcgtctgctgggacaacctgcgactcgtcgacacacacaacgagcgcaccggctcccgcggctttcggctatgcatgaaccagttcgccgacctcaccaacgactagttccgcgccgcatacctcagcgccag

SEQ ID NO: 88782 - DNA, 1984 bp, Zea mays
  unsure (1)..(1984): unsure at all n locations
  Clone ID: MRT4577_180968C.1
tcgggttgggatgactcgaattatttgggcagtggatgacacctaatatggttgcttgcattgctgtagaggcaatttctatacttgagaaacttcatgcaaaagggtttgttcatggagacgttaaacccgagaattttctacttggccagcctggatcccctgacgagaaaaaactttttctgattgatcttgggttagcatctagatggaaggaatcagggtcatctggacaacatgttgaatatgatcagaaaccagatattttcagaggtacaataagatacgctagtgtccatgcacatttaggacgtactggtagcagaagggatgatctggaatcattagcatatacattgatatttcttcttagaggaaggttgccgtggcaaggttatcagggcgagaacaagagttttcttgtttgcaagaagaaaatggctacctctccagatctattatgctgtttttgcccaactccattcaaacttttcctggagactgtgacaaacatgaaatttgatgaagaaccaaattactcaaagcttatttcccttttcgatgaattgattgagccccagcatttgaggcctattagaattgatggtgcattgaaggctggacaaaaacgtggaagattacatgtaaatccagaagaagatgagcaaccgaagaagaaagttcgacttggaagcccagcaaatcagtggatttcagtttataatgctagaaggcccatgaagcagagataccattacaatgtagcagatgccaggcttcatcaacacatagagaagggtaatgaagatggattgttcattagttcagtagcatcttcagccaatctttgggctctcattatggatgcagggactggtttcacatcccaagtatatgaactgtcacccatattccttcataaggattggattatggagcagtgggaaaataactactacatcagtgccatagctggtgcaatgaatgggagttccttggtggtcatgtcaaaaggaactccttacactcagcagtcttacaaagttagtgaatcattcccctacaagtggatcaacaagaaatggaaagaaggttttcatgttacatcaatgacaactgcaggaagccgctggggtgtagttatgtcaaggaactctggatactctgaacaggtagtggagttggattttctttatcctagtgaaggtattcaccgacgatgggagaacggatatagaataacttctacagcagctactggcgatcaagctgctttcatattgagtatacctaaaagaaagttaatggatgagacacaagaaactcttagaacatctgcttttccaagcaaccatgtgaaggagaaatgggccaagaacctttacattgcttcaatatgctatggccggacagtgtcatgaggcttgctcggctgcatccctagttgggaagagcatgttctgatgagtatatattgggaaaaaagcagcaatctttgttgctgctctctattactctctgtatgtgtaggtaacccgttcaagatgaagcaccttacagtggccagagtaggagctcaagaaagaaccgagaggaaggtggaaagcaatcggccaataagcagacgaggagtatgtgatctggctagtagcgggtacaggcgctaatggcgtcaaatgttttgtatcagcatgttttgcttttgcttcgctcctgaccgctgtgcaaagagtagacagcttgtttctttcggaggcaagtcatctgagaaccatcgtgtatagcgtatgatgtcattgtattttctttagtggaggccaagttccatctttccggaactcccaaaatgctaagttattatgcgaggaaacaagtgtactgataaaatcggtgtatcaattccattattcgacaattctcacctgcattaattaatgcaatgctgcattacttatccgtgcggggaaaagactaanacaaggcg

SEQ ID NO: 88783 - DNA, 381 bp, Zea mays
  Clone ID: MRT4577_180969C.1
gccggccgggtcgcgctactgctgagtctgctatgcccccaggagcatatctgcgcgctgaaggatgttggacccaagcaacttccctgccttggaatactgaatctcacaacctaaatcgaaaaaagaagagtatcacggattgctacagacacatccatctgggttgagctgaacttttgctatgggaaacacaacgtgcagtggcatcgctgccgtaggtagcaccgtggctcgtgcattcatgtgtgttacatctctggcaccctgctattgttctatgctgtttatgcccgctagctgtctcgaagaaagaaagaataaaagaagagctgcccgtagaggcgcgacggacgactcatagcaacgtagatgcgatgc

SEQ ID NO: 88784 - DNA, 397 bp, Zea mays
  Clone ID: MRT4577_18096C.1
cttgtactgggaacgccggagtagcatcctggccgtgagcggagcaggcggtaaggccaataaggcgctgtggcgcgcaaggccgaccgggccgacgaataataggtgtctcggtcctgcagggccgggctgcagttccccgtcagccgcgtaagggcggtacctcaaaaaggccgttacgcgcatggtgtacgcacagctgcccccgtctacctctgcttcgaactggagtacttacaggtcgaggcgttctagcttgcctgcaacgcgtaaaggaacatcaagaagacacgcatcatcccgcgccacgtgctcatctccatccgaaacgaacaggagctaaagaagctgctgaccggtgtcaccatgctccacagcggcctactctccaacattc

SEQ ID NO: 88785 - DNA, 197 bp, Zea mays
  Clone ID: MRT4577_180970C.1
ctcgttacctttaattgtgctctgtctgtgtgttggcaaagcaaacgaacgagctggaggatgtcttgcaggtgcggatcaagctgcaactgcggatcatgctgcatgtgcgtcacgatgtaccctgacctggatgaaaaaaacggcgggggcgcttaaggcaagtgcggcggcgtccttcccggggtttcccctgg

SEQ ID NO: 88786 - DNA, 392 bp, Zea mays
  Clone ID: MRT4577_180971C.1
gggggccaaaattttaaaaaacacttcccgggtttgcaaaaaaattttaaataggatccaagggggaggattttctaaaaaaaccctaaaaggctcatccccccccctatttaaaaaaaaatgttacatggggaaccgggaccaaaatttcttccattttaacaattcttttaaggggatttccttttttaaaagatttcaaaactaaatttttttttacatcgggcgggaatttcataaatccccaaatcttttgtggggaggtttttaaactggcccctttttttttttaaattgggaaacgtttttttttgggaaaaccaaaattaaaattgagcttttttggaaaataaccaaccccagggttcttttacccttttttttaaaaatgg

SEQ ID NO: 88787 - DNA, 268 bp, Zea mays
  Clone ID: MRT4577_180972C.1
gaaaaagcaacagagaaagaaatgaatcacaattcactcttggttgcttctcaactcgaaatttttttacttctgacaagcaaggtccaggtggtactacgttgccctctgcatggccttccacatcctatcatcaccaacaccaggctaaagctaaagcttcatcatttcttcagctccaatcaagtccacaaaacatgatagtgatgggaaaggatgtgtcacaattctcttgtgtagagaagaaggtattctcaccctcttgtgc

SEQ ID NO: 88788 - DNA, 305 bp, Zea mays
  Clone ID: MRT4577_180973C.1
accttagagctatacagaactaggtgtaaatcttgctcaaagttaggcggtcaggttgatgttaggctattccagacatctgaaattggacatttcagtatgttggctcaacattggagtttccttggggttgttctgtgcagttaggagatatattttgtgtagcaaaattggagaccaagtattagtaagcaagtttacttgtggaagcttggcttggtactatataaatttggaagttaatggtgtcctaactagctctgtcagacatgtgcaatgcagaccagcttcagttactgtcacta

SEQ ID NO: 88789 - DNA, 220 bp, Zea mays
  unsure (1)..(220): unsure at all n locations
  Clone ID: MRT4577_180974C.1
cggacggtgggcggacacagacccaaactagaataggtgtctgttcttgtctgcggttctctgttcgagtccacaggctccaagcaagcaaagaaccgaaccaccgggagcaagaaatttgcccagagtaagcaagtcccaggactcaaccaagaagagccctttgcatgcagatggggggtanggagggtattgcagttggccgcgaatccggccacgg

SEQ ID NO: 88790 - DNA, 119 bp, Zea mays
  Clone ID: MRT4577_180975C.1
gagccaaggatccatatagatgagcggggtgctaccagggcagcactcattgcagatagtgagattggtcattgatcgtcaatactgatccagagctatattggaggatgtgcaaacag

SEQ ID NO: 88791 - DNA, 561 bp, Zea mays
  Clone ID: MRT4577_180976C.1
cgcaccagttcggcgggcagacaaaaactcctaaccaccgcgcgtcggcgctcgccgccggcgagtgcttctctcgaggagggaggcaagggcccaccccgtaaggaaaagaagcgccgactatgccacacgactggttcgccgggggacgtttcctgctgacagcccacagatgccgcttatgaccagctcgagaagctgcccgaccagcgcaaggaccctgaacactcaatgagctgcccgacgctgaggaccttccaggcctggtacagtactactgcctccactgagatcgctactttccacgtgaaagcctgaaggatgatcactaccgatcaaagcgccacaagagaagggctaaggccatgcctggaccggccccggacacgcaggttgatgcagaacccgctgcaggatgggaaagcctgactaacggccgtgaagctcatgtccatgtgaaggaacctctcgctgggactgggacttgaccgcggcctttgctgctgccacacaattgaagctgctttgcacagcaagtaataccaagagttatagcacacg

SEQ ID NO: 88792 - DNA, 2046 bp, Zea mays
  Clone ID: MRT4577_180977C.1
gacgtgcgaaggactgcagtgtggctctcggcttcggaagactataaagcaagctgtggaaatgaggaacagtgtctgccacagtgcaacaatatgctccaatgcaatcatgcatgcagggacaacagttgataccttcctcagagaaaacttggaatggctaggtagggcaaccaactgggccaagttcagtgccactgctggactaggcgtcattcataggggccatcttcaacaaggccgcgcattgatggctccctacctgcctcagaatggtgctggtggtagtggtagcccatactcggaaggaggtgccctctatgctcttggtttgattcatgccaaccatggtgaaggaatcaaagagttccttcgtgagagtcttcgcaacaccacttctgaggtggtccagcatggtgcttgtctgggactcgggcttgcagcattaggtacatcagacgaggaaatatgcgaggacataaagaacattctttacacggatagtgctgtggctggtgaagcagctggtattggcttgggtttgctcatggttggcacggccagtgagaaggccacagagatgcttgcctatgctcatgatacacagcatgagaaaattatcaggggcttgtcacttggaattgcattgacggtgtatggcagggaagaagaagctgacacattgattgagcaaatgacgagagatcaagatcccatacttcgttatggcggcatgtatgcattggctctagcatacagagggactgcaaataacaaagctatccaccagcttctgcattttgctgtgtcggatgtgagcgatgatgtgcgaaggactgcagtgttggctcttggcttcgttctctacaacgagcctgaacagacacccagaatcgtgtccctactgtcggaatcatacaatccacatgtccgttacggtgcagccctagctgtcggaatctcctgcgccggaacaggattaagcgaagccatctccctactggagcctctgacatcagacgtcgtcgactttgtgcggcagggcgcgctcatcgccatggcaatggtgatgatccagaccaacgagtcctacgatccacgcgtcggagcattcaggcgccagttggaaaagataatcctcgacaagcacgaggatgccatgagcaagatgggcgccatactggcttcaggcatcctcgacgccggcggcaggaatgtcaccatcaagctcaagtcgaggtcaaagcacgacaggctcaccgctgttgtcgggctagccgtcttcacccagttctggtactggtacccgctcacctacttcataagcctcgccttctccccgacggccctcatcggtctcaactccgacctgaaagtgcccaagtttgagttcctgtcgaacgcgaagccgtcgctgttcgattaccccaagccagtgacccagcagaccgcagccgcatctgtcaaggtgccggcggccatcttgtcgacatatgctaagtccaaggctagggcaaagaaggacgcagagagcaaggccaaggagaaagcagatgactcttccaatgcttctacttcgatgcaggtggacggcgcttctgctgctggtgctgctgcagagaaggccccggagccagagcctacgttccagatcctgacgaacccggcccgggtcgttccagcccaggagaagttcataaagttcctggaagacagcaggtacaagccggtgaaggctgccccctcggggttcgtcctcctgcaggacctcgagcccacggaggccgaggagctcgccctaaccgacgcgccgtcaaccgccgccgccacgaccaacgccctggcatccagcgccagcgagccggctgccatggctgtcgacgatgagccccagccgcccccggccttcgagtacacgtcataaataagggtggtgatcgtcggatcaggatgcatgggttggccggttgggttgtctgtaggaacttcgtactggtgttggatggcggaacccgggcgtaccactaagctcatttatttaacttg

SEQ ID NO: 88793 - DNA, 292 bp, Zea mays
  Clone ID: MRT4577_180978C.1
accgacaacagtacttgcaatatgcagggctttgaaggctccttgagaggcaggggtcgaaaaatctcaagaaaaatgatgtctggcaaacgagttaaaggacaggttcccgctacagaaatgcacaattggaggaccatcaaaacaattctaagggtgcccaataggtccaaaaccccaggggggttcacccggcagtgcgctgaacctgattacacctccagatccgatttattcagcagaggagctgaccaagcatggggacattccccccatttgagccgggggccca

SEQ ID NO: 88794 - DNA, 376 bp, Zea mays
  Clone ID: MRT4577_180979C.1
gccagctgccccggcaactccaccatgctcgagctcgacaacacgcagttcctcacctacccgccggagatcaccacggagcagttcttcgtcggcatcaccgcctgccgcctcaactgcctctccggcggctcctgcgtcgcgtccacagcgctctcctccggcttccgcgcctgggtcgtggcggtcgtggtcctgggtgtggtgtccgcgctggtgctctgcgagtgggcgctctggtggttcctgtgccggcacagccccaagtacggcccggcgtcggcgcagtacgcgctgctggagtacgcgtcgggcgcgcccgtgcagttctcgtaccgcgagctgcagcgctccaccaaggggttcaaggagaagg

SEQ ID NO: 88795 - DNA, 937 bp, Zea mays
  Clone ID: MRT4577_18097C.1
atttttaatcctttaattttattccattatagtccctaaattactacatatggaactcaggcttccatccttacctgccaccggagacctacctcacatgcaggttcttctctgcgaggaagcatggcctggtggatgctgcggtgcggagcagctctactgacagaaccgctgtggttgcgctgccaggaggggttgggacgctggacgagctgtttgagatcttggcgctgattcaactagagaggatcgggtcagcgctcccggtcccggtcttgcttctcaactacgattcttattactccaagcttttggaatttctgaatgactgccaggagtggggcacggttgctccgggcgaagttgcatcactttggaaggtttgtgatgggaatcatgaagctttggagtacctggcagagttctacggtgttccccataacgagagagaatattaaataacaccacagttgaagaaccaaagagtttcatatgccacgagctgaggacaaaatatttgcaagagttttcttgcttctttttactcctgtgcaggaggacaaataattgttgagctgttgagttttccatgtggagatgctctcaaggcatattagcaacggaagcaacatttagaacagacaacaatttccagaccagtcgcatgttgtacactttctgttgactgattgacagagatgatgaatgcagacgatttacgtttaaaccttgcatacaaatttttctttagttaataaaagttaactaaataggagctttagtatttagtagaaggatctatgctatgcagattctcttcagatttggtctgctgcagctggtttttctcctgtacaagtttgttttgttggtataattattgggctcatggaagatgaacggttataaggttagattatcatcctgttctctcctt

SEQ ID NO: 88796 - DNA, 206 bp, Zea mays
  Clone ID: MRT4577_180980C.1
tccgctcaggatcctgctgcgaatgtaaggctagatgtacaccgcgaggaagaagagccagagggataagggccttgagcccttcgagttcgaggactccgtcgcccatgctttcttcgacctggagaacggtaaccaggagctcaagagcgacctcaaggacctttacatcaactgtgctatccatcttgatgttgcctggagca

SEQ ID NO: 88797 - DNA, 282 bp, Zea mays
  Clone ID: MRT4577_180981C.1
cagactagccttgatgtgtagaatcgtgtcattgctgtagataacatcaaagctgttatctggataagtctttgtagtgcaatcagcaacttcaaattccacagagcaatcgagtccattggctctttcaagagcaaaagatatcatatttatggacagatcgatgcccacaacatagactccaaattcttttgccatataaaagtcacctgcacctatgccacagccaacatctagaaccttttggccaggctttagatccaacttcgccacaaattcttt

SEQ ID NO: 88798 - DNA, 280 bp, Zea mays
  Clone ID: MRT4577_180982C.1
ggatcaaaatatatggtgaggaaacaaagtgttggtggtacaacctgcccataccatgagaggatatctacaggtggcaacaatcagttgtcatttaagaaaacaaaaacacagtgcctgtgttcatcttttccctcttaaagtctgggataagtatgtttattatcattttttcctgatctgagattggtttttgggtcttggatgacaacacctttattggttggggtttcaagttttaacctggactggaggaggaggttaatatatactggatgtg

SEQ ID NO: 88799 - DNA, 146 bp, Zea mays
  Clone ID: MRT4577_180983C.1
cccacgcgtccggcgtttgaatggatttgagaataaggctgagttgttgccattaccgggctgcacacggtcgcgggaggcttgtcacataccgggaactgggtccataatgcgttatgctgatttcctggtaccccccttgcttt

SEQ ID NO: 88800 - DNA, 575 bp, Zea mays
  unsure (1)..(575): unsure at all n locations
  Clone ID: MRT4577_180984C.1
ttcggcacgagcaacaccaagaaaccagcatcttctgcagctctgaagaaaactcgatcaccatggacatgccttctcttgttctcctcctgctcgtcttcattgcaacaggcagccgcgccgcggggcaggtgttctgccgctcgcagttcaacctggccaacgaggcctgcagcctgcgcaccttctccgggcccaacccggcgcaaccgctgcagctgcacagcaacagctcctcggcatcctacgagatacaggcggaccaccacgagcacgagcacagccacgagcacgagcacgagcacgagcatagccacgagcacgagcacgagcacagccacgaacacgagcgcgagcgcgagcacacgcacagccggcggcacggcttcgggcacggcggccgcgacccctacgacaccgcctgctgccgccgcctcatgggcatcgacaacgcctgcatctgccaggccatgtccttcctccccgtcttcatgagcaaggtcaagcacgccatcaagctcagccccgncccgggctgcgacgtctccttcgagtgcggcgccgtcaactgaacc

SEQ ID NO: 88801 - DNA, 519 bp, Zea mays
  Clone ID: MRT4577_180985C.1
atctccagcgccaccgcgtgggtcgtgatgaaaggaaatcgagtcccccgtatccgatctcttctgtgctatagaatataggacgccgcctcctcctcattcggtgaaaggtgcgcgggtagggttgggagatctcttgactcgcgacacgagcagcacaattcagtcgagggacgctggatgctgcgggaggcccgggccttcgcgggatcttgaaaattgaatgctctaatgaagcccaagggtggtaggaagaactctagcaggagacggtcctccctgatggaccaagctccccttggctacagcatctaggatatccgccccgcgggcggtcttttttagatctccgccgctaactccaactgcgcaaggacagcatcctgatatctctgtcgaggtccgcatcctagtagctgatgacaacctcctgcaattttatatctgatcaccctagtccctcctgatagctgtattccagagaggcacagatatgctggaccactttccggcaacttc

SEQ ID NO: 88802 - DNA, 456 bp, Zea mays
  Clone ID: MRT4577_180986C.1
aagtaaatcatagtagcatacatttgttagatgctcgtaccacggtcatacacaagctcatgctttcccacacgtatacgctacgatagtatacacgtaaaccacggtgatacacgcatgacacgagcgcatacattcaggacgcgcgcacgaaaaggaggacgcatgcatattactctcactaggcaggggtacatgacgtggagggacgaagatgcggtaggatgaatctgccaaaaaaaaggcgtgttttgactttggcaggcctgctcaatcttgttgaaatccttgttgtaagaatggggcttgtgaaaggtgaagcacgaggaatcgacgtacgaagccctctgtacctgctcctcaatgttgtgaaggctatcgttatccgacgacttctattacgccagactttcgaacatagctgaggcgctaacgccgttggtgatggccaggcag

SEQ ID NO: 88803 - DNA, 117 bp, Zea mays
  Clone ID: MRT4577_180987C.1
acattttaaaaagtcatcgctggcctttaccatctaatacatcatgctgacgatcgcgcactttaacaaccatactaggattatctgagcaagtacactatcgctactgcgggctgc

SEQ ID NO: 88804 - DNA, 255 bp, Zea mays
  Clone ID: MRT4577_180988C.1
atctggcccagtgtgtccttttggaagtgaattccaaaaggtttgctgggaaatcttagtggcaggatcagaacagggtatggaagctggacaagttggtcctcgattagtgactaagggtgaaaagatgactactgttgctaaagagtggcataatggtgcgtccagtaatgcagatggcaagtggcaacctgtaactgtaaccttagatgccgacctaagtgaagcaacttccctcaatgatggagtttaaga

SEQ ID NO: 88805 - DNA, 375 bp, Zea mays
  Clone ID: MRT4577_180989C.1
agcagcaaatgtaccacgttatacatttgttttggctgcatttggtcaatggccacagttgcatacaaatgcggataggaccattataagcactttgccaatggtggacctagatcccatgacccgtgttacgaactaaaccaagaggttaattattactgacaacaccatataacataattgacgccacccaaattaaatttgtgcaccttcttaacctctgagaaaggccatcttcactgctttaacacactgactctgcctttccctattttggggcttgcattcaccacaccatctgggaaaatcctgctggtatttcttcatgcctataaacacagatcttcgtgctcccaaaagggggtttattttgaa

SEQ ID NO: 88806 - DNA, 125 bp, Zea mays
  unsure (1)..(125): unsure at all n locations
  Clone ID: MRT4577_18098C.1
gtgcaagtgctgcagacagatgctacgagagtctcagcacagttgagaatgctgtanagggactcagttggactgggtactcagaacaacgagttgaaaattgttctgcaagcatggagcaagaa

SEQ ID NO: 88807 - DNA, 563 bp, Zea mays
  Clone ID: MRT4577_180990C.1
gcagttatgagatgctcttcgagttcttcaactgcctggagagctctacccgactgctccgtatgaaggggtccaaggccacgttccccaacatctgttctagcattcagaatttgaccgagcggagatttacccacagccatcttgcacagctcaagtacataatgccagaggcgatcgtcatcaacaagatccttttgcgtgacgacacgacatgctgcatgtaccctgatcttcaggtgaacctcctagttggtgctgttgagaacgtccttaagcaaataggagaaactgcatacctggcattaagaaggacctttaggcagacgctcgtggaattctacagggagcaccctgagggagatgacattccagagcacgagctgccacacccattcaaccgagcgagatcgagcttgccccaggacgaacaaaggactgctcctgaatcttcgtccccactcaagccatctgatgtcaatggacagcagcagaccgctgctgtgatgtcgcacatgtcacagtcgttcaagaggaggttctcgcagagatctccgatcggc

SEQ ID NO: 88808 - DNA, 894 bp, Zea mays
  Clone ID: MRT4577_180991C.1
acaacacactcccctgccgctgtgccgcacccgcacccctccagcgcgcgcgggcacgagcacgagtacgaggctccatcgccggacgaccaggtagttgcactgccgccaccgtcgacgacgaccgaaggcgacgatggccaggccgcagcaacggtaccgcggcgtgcggcagcgccactggggctcctgggtctccgagatccgccaccctctcctgaaggcgcggatatggctgggcaccttcgagacggcggaggacgcggcgcgcgcctacgacgaggcggcgcggatcatgtgcgggccccgcgcgcgcaccaacttccccgccgacgccaacggcccgccgccgtcgttcctctccgcggcgctcgtcgacaagctgcaccggttcaacctggcgtccgtgcaggccgcgcagcggcagagagaggcggcggcggcggcggcggcagcagcagcaacctccgcgcccgcgacgcctccgacgccgccggccacgcagtggggcggcggcggtaggtccctggaggagcagcacgtggagcagatgatcgaggaactgctggactccgacttctccatggagatttgctgctagtgctaggctagccgcgacgcgacctgcctagcgactggctagcgcccccggccggcccgtcaccgccgcgctccgctccacctctcctctgttcttgttcttgcacttgcaccatgcgtcgcgctcgcgctcttctttgtactcgtgccgacgtgcgtagtatcgctcagccgctgcagcgtgcgtaggagcctgatttgtgtacgccacgtgtatagctgtagctgtacgtataagtatatatatgtaatcgagcattctcattcttgcaaatttaaaggccgcgtgcgtgc

SEQ ID NO: 88809 - DNA, 1052 bp, Zea mays
  Clone ID: MRT4577_180992C.1
tagtataggccacggccacctacgctacgctcaggcccgtatatggcccagtgcaactgggccgacggaaccaggccaccaatatcagtaggtctccaattatgaaatctccatatacacgtggtccatatatgctggtccaggatatacttggcctccaaatttgtgcattacgattggaattctaggctttgtttcttccttccgtagttccgccaatctcgctagctgaaacgacgccgatctgggagtgcgccgccaccacaaacgctccatcgccagtcatcacgccatcgatgccgagctactatggggccgtgatctcgccgttgccgacgctttgacctttgccgcacctggacgttgcaaggtcgacgcaacaagccaatcgagactgcaggaaggcgcggatatggctgggcaccttcgagacggcggaggacgcggcgcgcgcctacgacgaggcggcgcggatcatgtgcgggccccgcgcgcgcaccaacttccccgcggacgccaacggcccgccgccgtcgttcctctccgcggcgctcgtcgacaagctgcaccggttcaacctggcgtccgtgcaggccgcgcagcggcagaaagaggcggcggcggcggcggcggcagcagcagcaacctccgcgcccgcgacgcctccgacgccgccggccacgcagtggggcggcggcggtaggtccctggaggagcagcacgtggagcagatgatcgaggaactgctggactccgacttctccatggagatttgctgctagtgctaggctagccgcgacgcgacctgcctagcgactggctagcgcccccggccggcccgtcaccgccgcgctccgctccacctctcctctgttcttgttcttgcacttgcaccatgcgtcgcgctcgcgctcttctttgtactcgtgccgacgtgcgtagtatcgctcagccgctgcagcgtgcgtaggagcctgatttgtgtacgccacgtgtatagctgtagctgtacgtataagtatatatatgtaatcgagcattctcattcttgc

SEQ ID NO: 88810 - DNA, 2161 bp, Zea mays
  Clone ID: MRT4577_180993C.1
gggaactgattcgtcagcaatcacaaagaaggggatcttgtttatgttagtggtaagataaaaaaggtgcttgctaatggccattatgagttgaaggagtacacaattgacgctattgaaggagaaggggaacacagcactatgcttgataggaaaccacaccctatatacccgtcgaaagcgggattaaaacctagtctgcttggcctttcaatctctagggccttgaagatattgagcccagatgttgatccagtgcctcccgatgttctcgttgaattcaacttgcctaatctctttgatgcttacatgggaattcacaaacctaaggatcgatctgaagctgattttgctcgaagaaggcttatatttgatgatttcttttacctccagttaggaagactatttcaaatgcttgaagcagttggtacgcgggttgagaaagaggaattgttatacaagtgcaaaagtcatgagctgaatactgttggtgtagatgattggtctcctcttacaaagaaattgttgagggctcttccttattggcttactcctagtcagttggatgctgttcaagagattatatgggatctcaggagaccagttcccatgaacagactcttgcagggggatgttggttgtggaaagaccattgttgctttcctggcatgtatggaggttgttaattcaggatttcaggctgctttcatggttccaacagaggtgcttgctgtccagcattatgaacacctaacttcattgctagagaagtttgatggagatgagaaaccaaatattgccttgctaactggttcaacgtccacaagggagtcaaggataattcgagatggtctgaaaactggagagataggcatggtcattggaacacactgcttaatagctgataaaattgaattttcagctttacgtatctctgttatagatgaacagcagcgctttggagttgtacagagaggcaggtttaacagtaagctatatacttcttcctcaaagttgagtggtgaaaatacaagttcagacgaggcttctgattctgaaacatttatggctccacacgttcttgcgatgtcagctacccctattccaagaacattggcacttgctttatatggtgatatgtctcttactcagatcacggacctgcctcctggaaggcaacctattaaaacccttgctcttgaaggaaatgatgtagggtttgaagctgtcttccagatgatgagggatgaactgatagacgggggcaaggtctaccttgtgtatcctatcatagacgagtctgagcacttgccacaactccgtgctgcaacagctggatttgattccataaagcaaaaattcgaaggctatccctgtgggctattacacggccgcatgaggagcgatgagaaggaagaaactctcaacagttttagaagcggagaaacacgcattctcctgtcgacgcaggtgatcgagatcggggtcgatgttcctgatgcttccatgatggttgtcatgaacgctgagcgatttggaatctctcagctgcatcagctgcgagggagagtaggtcgcggtgagaggaaatccagatgcatattcctggcttcaacttcgagcacgctgccaaggctgaaggttctcgagaagtcctccgatgggttttacctggctaatgcagacctgctgctccgtggccctggcaatctactaggtaaaaagcaatctggtcatcttccagaatttccaatagctagattggaggtcgatggtggtattttacaagaggcccatcttgccgctctgaaagtgctggtcgcaagcaacgacctagcgttgtatccacggctgaaggtggagctcagcatgaggcagccattgtgcattcttggagattgacatgtcaacagtactgctcgtaggctcgtagcattgggcgacgcgtgtactgtggataactattggtcgtaggctcgtagcgtcggcaaagttgacatgccgtctggtgagcgaggcgtgtaccatgaataactgttagactgattgtgtgagtgtgtgtgggctggtaccattgttaggctgccggttcattagggttagagttgagtctatatattgtaaccccttctctatgcaatacaatgatccacttcactat

SEQ ID NO: 88811 - DNA, 352 bp, Zea mays
  Clone ID: MRT4577_180994C.1
ccagagctctagcggacaggatctgcaggtaggcccaacctagcagggacagactgggacacccagctaccggtgagatacccacggactccctcagactgggagcgacctacctcgtgctcggtctttggctggggtcgctctgcatgcaagcccggatcacctctgcgatgaccggtgcctcacgttacgtgtgagctccacccagcgctggatcaagcaccgaggctccactacgatcgtcattgtgtacccgctacacctgagcttaagaagaagaagagacatgacgtttcgcattggcgacattcttgtgagtgctagaaacataaccgcgatccgtcgatagatc

SEQ ID NO: 88812 - DNA, 280 bp, Zea mays
  unsure (1)..(280): unsure at all n locations
  Clone ID: MRT4577_180995C.1
agcagtggtaacaacgcagagtacttttttttttttttttttttggttttttttttttttttttttttttttttttttttttttttttttttttttttttttttttttgttgtttngggggcccaaaaaacctttcggcaagaaacaaaggttggaaaagggggaaggttcattacccaaggctccaacaaaccacaaaggtagcttgctccaacaggggaacatataccggttgctcacaaaaagaggtcttgcctgcttaccagccaaggagggggac

SEQ ID NO: 88813 - DNA, 813 bp, Zea mays
  unsure (1)..(813): unsure at all n locations
  Clone ID: MRT4577_180996C.1
tcggccgggaacgaggtgcttgctgtccagcattatgaacacctaacttcattgctagagaagtttgatggagatgagaaaccaatattgccttgctaactggttcaacgtccacaagggagtcaaggataattcgagatgcaagctgttctccctagttctttcactcactctcaagttccacatgcatatattaatatctccgctctattcatattctattacagggtctgaaaactggagagataggcatggtcattggaacacactgcttaatagctgataaaactgaattttcagctttacgtatctctgttatagatgaacagcagcgctttggagttgtacagagaggcaggtttaacagtaagctatatacttcttcctcaaagttgagtggtgaaaatacaagttcagacgaggcttctgattctgaaacatttatggctccacacgttcttgcgatgtcagctacccctattccaagaacattggcacttgctttatatggtgatatgtctcttactcagatcacggacctgcctcctggaaggcaacctattaaaacccttgctcttgaaggaaatgatgtagggtttgaagctgtcttccagatgatgagggatgaactgatagacggnggcaaggtctaccttgtgtatcctatcatagatgagtctgagcacttgccacaactccgtgctgcaacagctggatttgattccataaagcaaaaattcgaaggctatccctgtgggctattacacggccgcatgaggagcgatgagaaggaagaaactctcaacagtttta

SEQ ID NO: 88814 - DNA, 212 bp, Zea mays
  unsure (1)..(212): unsure at all n locations
  Clone ID: MRT4577_180997C.1
gcgcccacgcgtccgcggacgcgtgggcgcccttttgttccacaccgagatttcctgttctcgcttgagctcatccttaaggacacgcctgcgttatnctttataacacgaatgtgcccgcccccacccacaactcccccaccttgacaatagtcttttcgccccggatccgggcgcggcgaggcctgggcctttggagccaaaaggagggg

SEQ ID NO: 88815 - DNA, 202 bp, Zea mays
  Clone ID: MRT4577_180998C.1
tttaagcgtaccgggttacagttgtattgtttgtgatctactgagtcttcgtaccgacgtcataaactaaggacgtacaatatttatatgaatccaagtcgttataaatcaggacggacaaatggattgttcgacttttgtcgctcgacttaactgcgtttaactcagatagatttagagcccctgttcaatggtgctgctt

SEQ ID NO: 88816 - DNA, 350 bp, Zea mays
  Clone ID: MRT4577_180999C.1
aaggcccatattgtcttggtccaaacaatggaggggtacagcttatgccatcaaatgaggcaacttgcttggctaccccccctggtgcgcgcgctccaagactgtcgccagacaggcagggcgagcttccatcccgaggaacgaagtatacacacacattacacagaccaaaccctgcgtctgtttgtatatccggtgggcctatatttttattgagcaaccacctccacacggtgccttgagcttgacgatatgcatggccgccaatcggggcaccctgcacacgacctgggcgggcttgcagctggcaacgagcgtgaagccgagggcctgctcgccggacttcgccg

SEQ ID NO: 88817 - DNA, 486 bp, Zea mays
  Clone ID: MRT4577_18099C.1
accgtcctccgcgaaattctacttgtgtagcgggcgagggtgaggtgaggtgaggaagaaagagagccctcgccgcgtgcttaggccccccccaagacgccgagagaggaaagggattaggcagcaagaggaggcgctccgctctcggattagaggcgagcttcctatttccagcaaaggcaaggagaggatcagctagctagctgctaggaggccggagggagagaaagatcggaggaggagctgcaaaggctagcttttctttggtgcggctggtgctggtggtgaactggtctcggtgctcggtggtgcgtggtgtggtgcacactgcacactctccctctcgcgttcgtcttgatggtgggtggtggtggcagctgcctcgcatggctgggttctctctgaggggcggcggaggcgggaggggcggtgaccggggcggcgatcacccgatcggcgccgacagcctgttcctgtacgcgcgag

SEQ ID NO: 88818 - DNA, 956 bp, Zea mays
  unsure (1)..(956): unsure at all n locations
  Clone ID: MRT4577_1809C.1
cccaattgaggcacggtacaaggagtcgacagaaaggggttcctctgtagatcaactgggctactgcatcaactgggtcaccaatcttcttaaggtcttccagtttagaagattggtgacccaattgaggcacggtacaaggagtcgacagaaaggggttcctctgtagatcaactggtctactgcatcaacagtttcagagaggctgctttgtccagtgaccaaaagtttggccatatcgacatatctgagaaacagaaggtcatcaatgagtgctctgaagtagagaactggttgagagagaggaagcagcagcaggacgccctacctaagcacaccgatcctgtgctgctcgtatcagatctgaagaagaaggctgaagcacttgacaggtcctgcaaaccgatcatgactaaaccaaagccagctccgaagccacagactccgccaccacatactccacctccacagcctgaagcccaagcatctgaccctcaaacaccagaacaacaacaaagcgggactggtgcagctggtgagccgggtagtgagggaggtgtgcagcaggcctccggtgagcaaatggacatggacaggcccgatgattctgcggatgttgcggcataattgtggttgtggttgtcatctgtcttatgatcgatcaaaattttctgtttgtctggtaggtggatgagttaaggcaacagcatattctcccaagcgatttcgttttagggtttggaacattgagattgaggtaatgcgtcttgtccagcgttgttttggtctggactgtgaatcagaatagaaacgttgcatgatcgaattgcgccattagatctcataatcaaaaaacgtggatgattcgacaaaaggtatatttatctggatgtttcatgttaattcatgtcacatggattcctccaaaaaaaaaaaaaaaaaaaaaaaaaaanaaa

SEQ ID NO: 88819 - DNA, 293 bp, Zea mays
  unsure (1)..(293): unsure at all n locations
  Clone ID: MRT4577_180C.1
tttnataattttttttttttttttttttttattggggttttttttgtttttttggggggaaaacccaacccagtacttgacggttttaatcccacagcttgaacagagcacatcaaaaaccaggaccggtttgatataacggggtatataccccccattttattttatgtaaaaatttgcgccgaatatggccaggaaaaaaactgaggtgcattaaggatcaacgcgggggcctattcaggggatgaaaaaaatttgggccgtcaccatacacaatattgcccgccttaaat

SEQ ID NO: 88820 - DNA, 363 bp, Zea mays
  Clone ID: MRT4577_181000C.1
gagctttcttgtcggcggccggccttcctttttttttttttttttacataatgtttttgtgcgcaatcaaaaatctcggaacaggtagagaatcggggctactgatgtgatgcggtcaaacaaaattattttgaagcctgaacggttagcccatgcgatgtgacaattcatttacggcctgccaacaggcctcccttgttttatccagggtcccgatgggatgcagatgtgcccaaagtttacgacccatcatttgccgtctcgcgccccatttgtgcgcccccgttgcggatgctgtacacatccggggcgcccccgtcaagtggactacatctgacttgccacccttaggctgaacctagg

SEQ ID NO: 88821 - DNA, 236 bp, Zea mays
  unsure (1)..(236): unsure at all n locations
  Clone ID: MRT4577_181001C.1
aaaaggagagccctgaaaacccccccgggggggggggccaccctaaattttnnttaaaaaaaantnaacccaaaaaggggacacccccaagaaaancttcccttccttttgggaacccaaaaggcccaaaaatttccttccctaaacaacctgtggaaagaccctttaaatttttgactgggtaacccggaaagggtttgccccacccttttttttgaaaataaaccccccaaagc

SEQ ID NO: 88822 - DNA, 1483 bp, Zea mays
  Clone ID: MRT4577_181002C.1
tgaattcggcacgaggtccaaacccaaacatttttcttctccagcgagcacccaaaaaaaataaatagctccttccagctccggcctcgccggcattactcctcgcctcttccgcgcccaacactaccgcctccctcccacccctagtccccctacccccccatccaatcctctgctcgccttgcctcgtcccggcagcggcggcggcttgggcgcgcacacacaccaggtgttcgattggagtcctcgccgaagcggaagatgtacgtggtcaagagggacggccgccaggagacggtgcacttcgacaagatcacggcgcgcctcaagaagctcagctacggcctcagccaggaccactgcgacccggtgctcgtcgcgcagaaggtctgtgcgggggtctacaagggcgtcaccaccagccagctcgacgagctcgccgccgagaccgccgcggccatgaccgcgtcccaccccgactacgcctcgctggcggcgaggattgctgtgtcgaacctgcacaagaacacgaagaagtcattctcggagacgattaaggacatgtacatgcacttcaacaagagatccgggctgatggcccctcttgtcgctgaagatgtttatgaaatcatcatgaagaatgctgctcgcttggacagtgagataatttatgacagggatttcgactacgactactttggcttcaaaactctggagaggtcttacctgttgaagcttgatggtaaggtcgttgaaaggccgcagcacatgttaatgagggtttcactggggatacacaaggaagacatcgagtctgccatcaggacgtaccatctgatgtcccagcgctggtttactcatgcttcaccgacgcttttcaatgctggcacgccgaggccccaattaagcagctgttttcttatatgcatgaaagatgacagcattgagggaatctatgaaaccctgaaagagtgtgctgtaataagcaaatctgctggaggaattggtgtctcagttcataatatccgtgctactgggagttatattcgaggaacaaatggatcatcaaatggaattgttcctatgttacgtgtctttaatgatactgctcgctatgttgatcagggtggtggcaaaagaaagggagcatttgctgtatatttggagccttggcatgctgatatttttgagttccttgatctgaggacggaccatgggacggaggaaaatcgtgcaagggatatgacaagatcacggcgcgcctcaagaagctcagctacggtctcaaacagtaccactgcgaccgggtgctcgtaaggcacaacgtctatgcagtggtctacaagggcgtaaccaccagccagctctactagctcgccgacgagaccgccgcgttcatgaccgggtcccaccccgactacacctagctggcgagaaggattgctgtgtagaacctgcacaagaacacaaagaagtccttctc

SEQ ID NO: 88823 - DNA, 1679 bp, Zea mays
  Clone ID: MRT4577_181003C.1
ccggccggggtcccagtcccgcgcactgcccccggtctctctctctcaacacaccgataagcccagtccaccggatctcccgtagtccagagactgagttgaaggaaggaagccatgatgatgatgggcgaaggcgtgagcatgccgccgtggtcccaccacgtccctgtgagcggcgtcgacgaaggcgacgagatgacgccgtacccgcgacccgcgcaagtaccactactccggcgccgcctgcccggacttccgcaagggcgggtgcaagcgcggcgacggctgcgacatggcgcacggcgtcttcgagtgctggctccacccggcgcgctaccgcacccagccctgcaaggacggcacggcctgccgccgccgggtctgcttcttcgcgcacaccgcggaccagctgcgcgtgctcccgcccacgcctcagcagcagtccagccccaggggcgccgcctgctcttccccgctcgccgagtcctctcgtgcctcccccggcacgagcagagcgttcgagagctacctcaccaagagcatcatgtgctcgtcgccgaccagcaccctcctgtcgccgcccaagtcgcccccgtcggagtccccggcaattgtcgcccgatttccgccgtgggtgctggccgggcgccgggtcccccgtcaacgacgtcctcgcctcgctccgccagctccgcctcagcagggccaactcgtccccgtcgggcgggtggtgcggctaccctgcatccgcggtcgcgtacggatcgcctacggggggcgcgctctacggcctgtcctccaccccgaggtccaccgccggctccggctacatggccaacctggaccctctcgacgtcaccttcggcggcgacgaggagcccgtggagagggtggagtccggccgcgcactccgcgcgaaggtgttcgagcggcttagcagggagggcgctgtttccggcgacgccggtggccccgacgtcgggtgggtctccgacctcatcaactgaggcggcggcgggtccctggcatggcagtggcaatggcaatgggcatgggcatggagaaaggtgatggtgagccgtatcggagaaggatggcatccaaaaaaatatttccctgcatttgatttcgttcctcagttaattccgctaatccccgtgtacatatctatcaccctgtgaatattctcggttggtaagagggaggatgatgctaggcggtggatggatgggtggatttgttttggggttcttgaggtagcggaaaatatccaagaaaattagaagaaaaaaagtgtgtacagcagatgcagtaggcggtggcggtggttgtggcgaagcatggcgggggctgatgtgacgacgaaggcggccggatttccaccacggcttggtatttctgtgattccggaacatggtagtttgatgttgtttttttttttaagttagtggactagttggccattgcaacctgcttgtgaattactctcccattttgttttgtaatctgttaagacccagcattccctacagcatattttgtacctacatcttagtagttgccgaaacctcaaaatcacccgctattggaggtgaatttcccatgtaatcttctgctcatgtaaatggtttttttaatgaatcgatgtttatcgccctaaaaaaaaaaaaaaaaaaaaa

SEQ ID NO: 88824 - DNA, 1052 bp, Zea mays
  unsure (1)..(1052): unsure at all n locations
  Clone ID: MRT4577_181004C.1
acgccgacagcccttgccaccgccaccgcctccggntacatgcccaacctggagccgcttgacgtcagcttcggcggcgacgaggagcccgtggagagggtggagtccgggcgggccctccgcgccaaggtgttcgagcggctcagcagggagggcgctggttcctgctacccagctgccggaaccggtggccccgacgtcgggtgggtctccgacctcatcaactgaggcggcttcggcggcgggtcggtgctgccatagcagtggagaaaaggtggtggtaactgatgtcgtaggcggcggcggcggcggcggtggtttgtgccctcttgtgtgcggcgaagcatggcgagggcggacggtgacgacgaagactggccggatttccagctttggtgttcctgtgattccgcagcaagttcagttcgatgttgtttcaagttcatccgtcgtctgtgcactatgcatccggctagttggcgattgcaacctgcttgtggattactaccccccattttgttgttgatgttgatgttgatgtaatctgtttattaagacccagcattcccctacagcttattttgttgtacttactatatatctttagtaggtgccgaaatctcagttcacccgctattggaggtgaacttgccgtgtaatatcttgatcaagtaaatggtttaatgtcttatcgcgctcttgtgtcctaccaagcatgccgaggtccttcggtcccgtctaagtctgtccggatttccagctttggtgttcctgtgattccgcagcaagttcagtttgatgttgtttcaagttcttccgtcgtctgtgcactatgcatccggctagttggcgattgcaacctgcttgtggattactacccccattttgttgttgatgttgatgtgatctgtttattgagacccagcattcccctacagcttattttgttgtacttgctatatatctttagtaggtgccgaaatctcagttcacccgctattggaggtgaacttgccgtgtaatctttggatcaagtaaatggtttaatgtct

SEQ ID NO: 88825 - DNA, 2345 bp, Zea mays
  Clone ID: MRT4577_181005C.1
tcgaggccggccggggtccccaacccacacactgcccaccggtctttctcacacaacacagggatataagctcagtccacgagatctcccgtagaccagtggcgagggaaggaacgaaacagagcccgatcctagcgacaggccagggaagatcgccatgatgatgatgggcgaaggcgtgagcgtgccgccgtggtcccaccacgtccccgtgagcggcgtcgacgccggcgtcggcggcgacgagatgacgccgtacctgctggcggcgctgcggcagtacctgccgtgcaacgacgccggcgccgccgaggcggacgacgaggaggcggcggccatggccgcgggcgtggacggctacggctgcgacgagttccgcatgtacgagttcaaggtccggcggtgcgcccgcgcgcgcagccacgactggaccgagtgccccttcgcgcacccgggggagaaggcgcggcggcgcgacccgcgcaggtaccactactcgggcgccgcctgcccggacttccgcaagggcgggtgcaggcgcggcgacgcctgcgacttcgcgcacggcgtcttcgagtgctggctccacccggcgcgctaccgcacccagccctgcaaggacggcacggcctgccgccgccgcgtctgcttcttcgcgcacaccccggaccagctgcgggtgctcccgcccacgccgcagcagtctagcgccagccccaggggcgccggcgcgctgcccgagtcctacgacggctccccgctgcgtcgccaggcgttcgagagctacctcaccaagagcatcgtgtcctcgtcgccgaccagcacgctcctgtcgccgcccaagacgcccccgtcggagtcgccgccgctgtcgccggacggggccgccgccgccttccgccgcgggtcctggccgggcgccgggtcccccgtcaacgacgtcctggcctcgctccgccagctccgcctcggcacggccagctcgtccccgtccggcgggtggggcggctacccggcgtccgcggctgcctacgggtcgcccactgcgggcgggctctacagcctgccctccaccccgagggccacgccgacagccctcgccaccgccaccgcctccggctacatgcccaacctggagccgcttgacgtcagcttcggcggcgacgaggagcccgtggagagggtggagtccgggcgggccctccgcgccaaggtgttcgagcggctcagcagggagggcgctgtttcctgctacccagctgccggaaccggtggccccgacgtcgggtgggtctccgacctcatcaactgaggcggcttcggcggcgggtcggtgctgccatagcagtggagaaaaggtggtggtaactggtaagccgtaacagagaaggatggcataaaaaaatgttcccctttggttccagataattccgctaattaccctgtacatagatatctatcgccctgtgaatattctcggctggttgggtggagggctgatgctagggggtggatttgttttggggttcttgaggtagcggaaaatttccaaggaaaagaaaatatgtaaggaagtgtagatgtcgtaggcggcggcggcggcggcggtttgtgccctcttgtgtgctgcgaagcatggcgagggccgacggtgacgacgaagactggccggatttccagctttggtgttcctgtgattccgcagcaagttcagtttgatgttgtttcaagttcttccgtcgtctgtgcactatgcatccggctagttggcgattgcaacctgcttgtggattactacccccattttgttgttgatgttgatgtaatctgtttattaagacccagcattcccctacagcttattttgttgtacttactatatatctttagtaggtgccgaaatctcagttcacccgctattggaggtgaatttgccgtgtaatatttggatcaagtaaatggtttaatgtctttcgcccagcgtgtgtttgtcgtcttttaatgaatcgatgtttatcgccctaaaaaaaaaaaaaaaaaaaaaaaaaaaaaaaaaaaaaaaaaaaaaaaaaaaaaaaaaaaaaaactgttgttatgttaaaagttctccggtggtgtggccactatgcatcgggttagtgggggatgccaccctgtttgtgaattactccccccattttgttgttaatgttaatgtgatctgtttattgaaacccagcattccccaacagcttattttgtggcacttgctatatatctttagtaggtgcggaaatctcagttcacccgctattggaggtgaccttgccgtgtaatctttggatcaagtaaatggtttaatgtct

SEQ ID NO: 88826 - DNA, 145 bp, Zea mays
  Clone ID: MRT4577_181006C.1
aaaccccaccagtgcatccactatatgtatgttcaacaacaattgccatcatctagtaaaaaatggtacatttcaccaccctaattacaatcagctgcttagaatcgagggagaacttggaagtgaaggcgtccggacgcgtggg

SEQ ID NO: 88827 - DNA, 2305 bp, Zea mays
  unsure (1)..(2305): unsure at all n locations
  Clone ID: MRT4577_181007C.1
ggtactcctcgaggccggccggggtccccaacccgcgcactgcccccggtctctctctcaacacaccgataagcccagtccaccggatctcccgtagtccagagactcagttgagggaaggaaggaaaccgagcccgaccctaggtagtcatgatgatgatgagcgaaggcgtgggcatgccgccgtggtcccaccacgtccctgtgagcggcgtcgacgaaggcgacgagatgacgccgtacctgctcgcggcgctgcgccagtacctgccgtgcaacgacgccggcgccgaggccgaggccgaggaggatgaggcggcggcggccatggcggcgggcgtggacggctacggctgcgacgagttccgcatgtacgagttcaaggtccggcggtgcgcgcgcgcgcgcagccacgactggaccgagtgccccttcgcgcacccgggggagaaggcgcggcgccgcgacccgcgcaagtaccactactccggcgccgcctgcccggacttccgcaagggcgggtgcaagcgcggcgacggctgcgacatggcgcacggcgtcttcgagtgctggctccacccggcgcgctaccgcacccagccctgcaaggacggcacggcctgccgccgccgggtctgcttcttcgcgcacaccgcggaccagctgcgcgtgctcccgcccacgccgcagcagcagtccagccccaggggcgccgcctgctcttccccgctcgccgagtcctacgacggctccccgctccggcgccaggcgttcgagagctacctcaccaagagcatcatgtgctcgtcgccgaccagcaccctcctgtcgccgcccaagtcgcccccgtcggagtccccgccattgtcgcccgacttccgccgtgggtgctggccgggcgccgggtcccccgtcaacgacgtcctcgcctcgctccgccagctccgcctcagcagggccaactcgtccccgtcgggcgggtggtgcggctaccctgcatccgcggtcgcgtacggatcgcctacggggggcgcgctctacggcctgtcctccaccccgagggccaccgccgcatccggctacatggccaacctggaccctctcgacgtcagcttcggcggcgacgaggagcccgtggagagggtggagtccggccgcgccctccgcgcgaaggtgttcgagcggcttagcagggagggcgctgtttccggcgacgccggtggccccgacgtcggttgggtctccgacatcatcaactgaggcggcggcgggaccctggcatggcagtggcaatggcaataacaatgggcacggagaaaggtgatggtgagccgtaacggagaaggatggtatccaaaaaaaatatttccctatatttaatttcgttcctcagttaattccgataatccccgtgtacatatctatcaccctgtgaatattctcagttggtaagagggaggatgctaggtggtggaagtggaaggaggggtggatttgttttggggttcttgaggtagtagaaaatatccaagaaaaatagaaaaaaaaagtgtacagcagatgcagtaggcggtggcggtggttgtgtccctcttctgtgcatagggttagggtgttggtggcgaagcatggcgggggctgatgtgacgacgaaggcgggccggatttccaccacggcttggtatttctgtgattccggaacatggtagtttgatgttgtttttttttaagttagtggactagttggccattgcatcctgcttgtggattactctcccattttgttatgtaatctgttaagacatcagcattccctacagcatattttgtgtacctacatcttagtagttgccgaaatctcaatcaaaaatcacccgctattggaggtgaatttcccatgtaatcttctgctcatgtaaatggttttttttaatgaatcgatgtttatcgccctaaaaaaaaaaaaaaaaaaaaaaaaaacaaaaaaaaaaaaaattgctgagatttgttcaaaaaactgcttatatttgcaaanaaaaaaaaaaaaaaaaaaaaaaaaaaaaataaaaaaaaaaaaaaaaaaaagggggggcggttttaaagaatcaaagtttccttcccggggattggaagttaaaattttttttttggggcccccaaatttaatttcctgggccgggttttaaaaacgtggggctgggaaaaacctgggggtcccccaattaaatggcttggaaaaaaatcccttttttgccgggggggataaaacaaaaagggcccccccctatttcctttccaaaaagtg

SEQ ID NO: 88828 - DNA, 216 bp, Zea mays
  unsure (1)..(216): unsure at all n locations
  Clone ID: MRT4577_181008C.1
cggccgacgacgcgtccgacaaatacacacaacttcctttgtcattattngaaaaaaccacaacagggattcggtgatgacctaggcgctcaggaaacccaaaaggatacccaaccacccaaatggacagacagaggtaatcgcctaccgtaaccgcgagatcgagaatccaggcactgtgaaatcaaaaagagagcacctaccccaccacgagga

SEQ ID NO: 88829 - DNA, 307 bp, Zea mays
  Clone ID: MRT4577_181009C.1
ggcacgccacatgataagcgcacgggaggacttacagctgcaatacaggatgactcagaaatcggcaatgacatggtgacggaatcgccgtagtcgctggcaaagctgccacgcctctcgtgcgccgatactacctcaggttaacacgcgcgggcaggcaatagtacgttctaaccccggttgggtaattgaagtactagctggtagctgatcactctgtgtttggcgtttctgtcctgttcgcaggaaatgtgaccatggcggcctcgtcgccgctggttcttgggctgaggctgggcctcagcgg

SEQ ID NO: 88830 - DNA, 564 bp, Zea mays
  Clone ID: MRT4577_18100C.1
ctaccacaccctccagagcaggcagcagaagtttcctagtgagcttaccgcgtccagtgcctgaaactgtcgtctgtgctgtgctccgactccgagagaagcttcgggtgatcggtcggtcgccgccggaatgggagccagcctgtcttgcttcggcgggtcaggaggcgggtactacgccgacgagccggggtacgagcagccgcggcggtcgtccaggaaggtgcggccgagtgacgaggatggcctgtggtacgttggcgagcgcgacgtcgacatgaaggcgtcggcgttcatcgccaggttccatgccaccgcctccagcagctaggtccgtggagctagccctgcaggtgtccatgtgcatgcacgccgcgccgatcgtatcaccatgtgaaatctttggtctttctgtgggtctctcgatcaacccatccatgtcaataggtcgatctattctcaaatatcgtctgtaacttatgtaaggatgtgtacatctgatcgtcctaaataagagcaatactggacgagctaaaaaaaaaaaaaaaaaaagcgaccaaaaaa

SEQ ID NO: 88831 - DNA, 744 bp, Zea mays
  Clone ID: MRT4577_181010C.1
cgccgggtcccccgtcaacgacgtgctcgcctcgctccggcagctccgcctgaggagggccaactcgtccccgtcgggcggctggtgcggctaccctgcatccgcggtcgcgtacggatcgcctacggggggcgcgctctacggcctgtcctccaccccgagggccaccgccgcatcctgctacatggccaacctggaccctctcgacgtcagcttcggcggcgacgacgagcccgtggagagggtggagtccggccgcgccctccgcgcgaaggtgttcgagcggcttatcagggagggcgctgtttccggcgacgccggtggccccgacgtcggttgggtctccgacctcatcaactgagcgcggcggcggcagtggcaataacaatgggcacggagaaaggtgatggtgagccgtaacggagaaggatggtacggagtatccaaaaaaaaaatatttccctatatttaatttcgttcctcagttaattccgataatccccgtgtacatatctatcaccctgtgaatattctcagttggtaagagggaggatgctaggtggtggaagtggaaggaggggtggatttgttttggggttcttgagggtagtagaaaacatccaagaaaaatagaaaaaaaaaagtgtacagcagatgcactagcgcggtggcggtggttgtgtccctcttctgtgcataaggtaagggtgttggtggccaagcatggcgggggctgatgtgacg

SEQ ID NO: 88832 - DNA, 293 bp, Zea mays
  Clone ID: MRT4577_181011C.1
gctggggggacaagttagtttcactgagattgctacatctttttttggcatttatgagattattcattttagaaagtatatataactaggctcctctgaaatgcagaccagtttagctagggcggaaaaatacagaccctgtttattggcagtaaacaagcatttatagcttgttatatataaggctcatcaaatgcagctttggggaatatgtagatattgttccttccctcaagacctgtattaatggaatgttgtatccttacctgggatacaaggtgcaggtgtagaga

SEQ ID NO: 88833 - DNA, 903 bp, Zea mays
  Clone ID: MRT4577_181012C.1
gccggccggtccggcagaggaaataaaggattttaaaaattgtcgcccgacttccgccgtgggtgctggccgggcgccgggtcccccgtcaacgacgtgctcgcctcgctccgccagctccgcctcagcagggccaactcgtccccgtcgggcggctggtgcagctaccctgcatccgcggtcgcgtacggatcgcctacggggggcgcgctctacggcctgtcctccaccccgagggccaccgccggctccggctacatggccaacctggaccctctcgacgtcaccttcggcggcgacgaggagcccgtggagagggtggagtccggccgcgcactccgcgcgaaggtgttcgagcggcttagcagggagggcgctgtttccggcgacgcgcggtggccccgacgtcgggtgggtctccgacctcatcaactgaggcggcggcttcggcggcgggtcggtgctgcataaccctggcatggcagtggcaaaaaatttgttttggggtttttgaggtagcggaaaatttccaaggaaaagaaaatatgtaagcaagtgtaaatgtcgtaggcggcggcggcggtggtttgtgccctcttgtgtgctgcaaagcatggcaagggcggacggtgacgacgaagactggccggatttccagctttggtgttcctgtgattccgcagcaagttcagtttgatgttgtttcaagttcatccgtcgtttgtgcactatgcatccggctagttggcgattgcaacctgcttgtggattactacccccattttgttgttgatgttgatgtaatctgtttattaagacccagcattcccctaaaaaaaaaaaaaaaaaaaaaaaaaaaaaaaaaaaaaaaaaaaaaaaaaaactcgagaggggcgcggtacc

SEQ ID NO: 88834 - DNA, 1695 bp, Zea mays
  Clone ID: MRT4577_181013C.1
cccacacactgcccaccggtctttctcacacaacacagccacacagggatataagctcagtccacgagatctcccgtagaccagtggcgagggaaggaacgaaacagagcccgatcctagcgacaggccagggaagatcgccatgatgatgatgggcgaaggcgtgagcgtgccgccgtggtcccaccacgtccccgtgagcggcgtcgacgccggcgtcggcggcgacgagatgacgccgtacctgctggcggcgctgcggcagtacctgccgtgcaacgacgccggcgccgccgaggcggacgacgaggaggcggcggccatggccgcgggcgtggacggctacggctgcgacgagttccgcatgtacgagttcaaggtccggcggtgcgcccgcgcgcgcagccacgactggaccgagtgcttcttcgcgcacaccccggaccagctgcgggtgctcccgcccacgccgcagcagtctagcgccagccccaggggcgccggcgcgctgcccgagtcctacgacggctccccgctgcgtcgccaggcgttcgagacctacctcaccaagagcatcgtgtcctcgtcgccgaccagcacgctcctgtcgccgcccaagacgcccccgtccgagtcgccgccgctgtcgccggacggggccgccgccgccttccgccgcgggtcctggcccggcgccgggtcccccgtcaacgacgtcctggcctcgctccgccagctccgcctcggcacggccagctcgtccccgtccggcgggtggggcggctacccggcgtccgcggctgcctacgggtcgcccacagcgggcgggctctacagcctgccctccaccccgacagccctcgccaccgcctccggctacatgcccaacctggagccgcttgacgtcagcttcggcggcgacgaggagcccgtggagagggtggagtccgggcgggccctccgcgccaaggtgttcgagcggctcagcagggagggcgctgtttcctgctacccagctgccggaaccggtggccccgacgtcgggtgggtctccgacctcatcaactgaggcggcttcggcggcgggtcggtgctgcatagcagtggagaaaaggtggtggtaactggtaagccgtaacagagaaggatggcataaaaaaatgttcccctttggttccagataattccgctaattaccctgtacatagatatctatcgccctgtgaatattctcggctggttgggtggagggctgatgctagggggtggatttgttttggggttcttgaggtagcggaaaatttccaaggaaaagaaaatatgtaaggaagtgtagatgtcgtaggcggcggcggcggcggcggttgtgccctcttgtgtgctgcgaagcatggcgagggccgacggtgacgacgaagactggccggatttccagctttggtgttcctgtgattccgcaacaagttcagtttgatgttgtttcaagttcttccgtcgcctgtgcactatgcatccggctagttggcgattgcaacctgcttgtggattactacccccattttgttgttgatgttgatgtaatctgtttattaagacccagcattcccctacagcttattttgttgtacttactatatatctttagtaggtgccgaaatctcagttcacccgctattggaggtgaatttgccgtgt

SEQ ID NO: 88835 - DNA, 301 bp, Zea mays
  unsure (1)..(301): unsure at all n locations
  Clone ID: MRT4577_181014C.1
gccggccgggatactaaaatgagattttgtttttcatggctataaaattaattaatatataaacatacaaatgtaaaaaaaaaagtacttttcaatggactaaacttgttgtccaggactaaagaggtttgttcccttttttttgcacatacaaatgtacttgtagtttcttttttttcttcttaaagttaagacactttattaaatcaaaaaaagtattacatatttttcagtacaaatagacaagaaagtttgtnntttgtnncttagtttcttcttcaatccttaatttttcgcatca

SEQ ID NO: 88836 - DNA, 532 bp, Zea mays
  Clone ID: MRT4577_181015C.1
tttccatttcttaccagccggggttgcttgcatgggcactgctctagaggccctgctgaagcctgacagaccgctcatgggcggactaacaacccccgagggcagaaaagccggacacgctctcatggatgtgaatgcgcactgatggccctgagtgctgatcctaaccaccaacgtgtgggccgctctgctcttcaagctctccttcaatggcatgttggctcaaacgttctactttgacaatgacatatctgttatatggcaggcaatccgctccaccgtatctgaggtggttaacgacgccttcaacgtcacaagaattgacccccaactgctgaacgcaagtgttgacttaatagggtcatgcttgcttaatgacatcctgaacctggtgtacatatggaaatgcaacggcgctggacaaagtggtcatgtactggaagccagtgatcaatatcactactaccactaagatcgcatcgtgaactgtgactatgggctacatgatcaacaccaagatgcggcctgaaga

SEQ ID NO: 88837 - DNA, 569 bp, Zea mays
  Clone ID: MRT4577_181016C.1
cagcatatgttgcggttcctgagcgtgggcggggcgccgaccggcctgatcaacgttgacggctttctttcatacccgtctcctgccccagccttcggatttgatgaggacgaccgcgctcgctcgtccggcaaagctgttgtcgggtggctgaagatcaaggctgcgatgcggtggggtatctttgtcaggaggaaagctgccgagagacgggctcagcttgttgagctggaagactagcagtcgcaggtgcttgggctcggtgttgcacatatttatgcggaagggttactagaactgcaaaatattgtataatacgcttcccttttggctgatctttttaatttgcacaatagccccgttggtattgtatattactgggtacagacgtacagtacatgtacatgggaggacgatcaggatcggggcttttttacgaatgaagtcacgttggttgtatacgtgtctgatacgcttgaccttacttgtgctttgaaatattcttgtcggagactttcagacgaaataaacgaaagggaagttccgaaggtcaaaaaaagaaataaaaa

SEQ ID NO: 88838 - DNA, 266 bp, Zea mays
  Clone ID: MRT4577_181017C.1
tctagtacgcgagcggctcccttttttggtacctggacgggtcttttggttttggttggcggttcccttaatggtacctgaacgggacctggtttgtgggggaagggttaaccctggtttatttggaaaaaggaactgaaggggtaaattaatcgggggtaatttcgtttttaaaaaaaaaaaaaaaaaaaaaaaaaaaaaaaaaaaaaaaaaaaaaaaaaaaaaaaaaagaaaaaaataaaaaaaataataaaaatatgctatcc

SEQ ID NO: 88839 - DNA, 1012 bp, Zea mays
  Clone ID: MRT4577_181018C.1
cattgccagactcgaggccggccggggtcttggagttgcatgttggaaggcggccgatagaggcaggcctcagaaccgtatccattggaagacaggaaccagggggttttgctgctgttctttggaggagaagagaaatgggaggcttgctcttgccgcatcaccgaacctttccaaattctttgcaagcttccatcccgggacctctctctcttcacaaaggcgaccgcaaaaaccttcattactttgcacctgatgtgcacctcttctgttccctgcggcaaggctttccacgctcatcttggtcggccgtcatcagatcagaagccagcggcaacgcggtggcgtcgccaggcacggtcatcaagcgtagcaaggaggagctcatcaccttcttcagagacatacagacatccattgccgagtgctcgcgtaaagcttccaagaggacgaggaagcagccgcctgatctgttccaagaggtccgcaggagggaggaacagtcacacggtggaggagatagcggcaccgacgacgtttcagagggaccgaggaaagtgaagagtcttgaggacatgaacgtggctggattgagagagttggcgagggccagaaggatgaggggttactccaagcttaagaagggcgagctcattgatcggttgagaggggctactacgtaataaactaccatgatgcagagcagcttcgcagttaatagggacacatgttcttttcgaacgtatgatgagattaccgatcaaaaaattgtatgatgatgagattaccgactttccaaacgatctagtcagttcattgataagaactagaacaatgtgtgtagttattatactatagaaccggtggagctgtattgttgtactacgccgaaacttttgtgtaggcatggcaatctcctgttgttacgtaagttactttgttatgtacggaattagtttctctaaaaaaaaaaaaaaaaaagtatttcaaaaaaaaaaaaaaaaaaaaaaaa

SEQ ID NO: 88840 - DNA, 381 bp, Zea mays
  Clone ID: MRT4577_181019C.1
tgcacgcgtccggtagctgggaattcggctcgaggggcgacgggactaccttcgttacgccctcgacaacggctaggtgtgcgggggaaccagggtgggccacctacaatggcacctgggacactaagtactcctgcctctcacgggctcgcatcctagctggtgggggcggccaaggaggagcggttgcagctgaacgcggaggaggtggccgtggtggaccaggtgcaccccaacggggagtactacgcgtgctaacgcatgaaccgaaaccaccgtggaccgacccacaacgaccgactcacgccggggggggtgctgtacatgcggccatggaacaacctgcagtacgtgttcggagacggcttactgctgaccgtc

SEQ ID NO: 88841 - DNA, 414 bp, Zea mays
  Clone ID: MRT4577_18101C.1
ccactaaacccaaaatcctttcttttttctatcacacccaaaatcaaacaatgcaggatttattcaaacacacctctcccttaccaccctaaacatttctctatttactaatttattcatctcattaccaataattcaacaacactacatttaaacaaattatcttaaacataaactctacaccatttataatatccacaaccctacaattaacatttccactcaacaaaccttacatctccatctcactatttaaacctttaatttctacttttgatactaacactaaaaaaactaccaattttattatttacaaccacaatcccagtaaattctaataaaataactatcccccacctacaataaatctatccctttatttaaataacacttacatattatttcttcctcaaa

SEQ ID NO: 88842 - DNA, 506 bp, Zea mays
  Clone ID: MRT4577_181020C.1
atgtaataatattgtgcttttattaatttggttttaatttttacaattatacaggtactatggttcgtcataatattaatgattcttaaacacaacttgttttagggaaggcacacttgacaatagccaatactacttatgaaactatatatgtaagcagtgactaggaactgtcgatgcttgaagctccccaatatgtggtaggcacacaatatagggtacaagcttttacaggtttctaaaaacccgtgaagtgtaaatgtcctctttattaaggaatcccagaaatgaactaggaaagttgcaacattctaagccctggtcacctaaaaagctgaatgacctggtctagctatgggtcctgaactacagtaccattgaagcagaattccttcttcagatccttgaggaacaaaatataggctgaactctttctttataccctggactgtagtcagactgtttctggcgttaaactgctggatgctcacatgcacataatcctt

SEQ ID NO: 88843 - DNA, 524 bp, Zea mays
  Clone ID: MRT4577_181021C.1
cggacgcgtgggctgccagcgtatgggcctgacgggaaacccattggtcctcctgtacgtatatctttccaacactatatgaatttgttcacattattctaatttatgtttaaagtgattggtgtaaaaaattcatccaaaaatataagcacagaagaatgtttgctcatggatgaaattatacgtgttgagtagcaaatgttttgtgttggcagtaaagcagaacaaatctttacttttttgtggaaatatgcatgttgttaactagtgaataatattcgctacaatttgcagatgggaaatccgtggatctacttatacccagaaggcctaaaggatatccttatgatcatgaagaacaaatatggaaacccacctatctacatcactgagaacggtaagtatgatggatctgatggtcatgttgcgccgtacttcatgcattgctatggtttttatatataacatagaataaattttattttaatgaaacacaaaatatatgttctctattgattaggtga

SEQ ID NO: 88844 - DNA, 566 bp, Zea mays
  unsure (1)..(566): unsure at all n locations
  Clone ID: MRT4577_181022C.1
ttttntttttttntttttttttttttnttttttttttttttttttttttttttttttttttttttttttttttttttttttttttttttttttttttttttttttaaagaaaggccaaatttttttttcccccaaggaaaaaacaaaagggggcgcccctttataaaaaaaaaacatccttcgaaaaaaaaaacggccccaaaaaaaccaacgggaaaaaaaagggttggggtaaaaaatggattaaaaaagggacaaatactggcaaaaaaacaacaaccgaaactggggtttggggagtttggatgcccgaccaaccaaccaaccaacctttttcggtttttttttaaggcacaaactcaagcccaacccccgttttccgggggggtaaccaaactagcccttttaatttccccactggaaagggtctccattcggggcgccctttgggggggggtttccgctgttatccccaggttcgtttggagggggggtttccaccgattttggtggggggggagctttgcccccccggggttaattttcggacgcgggggggaacccgg

SEQ ID NO: 88845 - DNA, 289 bp, Zea mays
  Clone ID: MRT4577_181023C.1
gatgcttcagatccaattaatataatacaacaacatccgtgctcaagctggtcaccgaatagtatgtaacagtagcaataattatatattctactaggtaaaaaaaaaaaaaaaaaaaaaaaaaaaaagagcgaacataaaaactacaactaaaagaaaccctttaaagaggaaaaaatagcacgcatagaagaaaaaatggacatacgctaaaaactgagagaaagggggccccgctcacaatttctctcacccttctagcggggagcatagggcgcccggcctgaaa

SEQ ID NO: 88846 - DNA, 422 bp, Zea mays
  Clone ID: MRT4577_181024C.1
ctcggggttcgggttcccaaaccaatgggggggggggccccgtccttgtcggggcactttctccgggacctggaggccccccccccccttgccgagggccctttcccttggccgcaccggccccccctccgtctccttggcgccccctggcgcgaccagcggcgggcgtgacccgcctccggcggggttgttgatcccgccgggaaagaacttgccgccccgcggcggcccttgccgggctggtgtcctatagcctccacaccgcgggttgttgccctccaaacccccggcccccgcggtcggcccgggagcgtgattagggggtggccttccctcggctccgacccccttgtgcccccctccgattctccctgaaacatgggtgttgagcgcccccccttctctggcgcccccccgggggg

SEQ ID NO: 88847 - DNA, 864 bp, Zea mays
  Clone ID: MRT4577_181025C.1
cgttgcctcgtgaccgcgcccagggtccgaactcccgaagcgtcgcgccgccgcccatcacggacatcggacaggagaagagaagcgggagcaccggagcaggcaccaccgccgaggcgtcgaggtcgccgtgctccccatccgctgaggtagctgctctccggcctccgcggctgccggctccgccaacgcccagtcccaaggcgagcaggcacccacggcagcacggctgtcgcggtagtatttaaggaacagggaaacatctgctaccgcccaatctttccccttcccggactgctcgctggacgccgaggacgtacgtgtccgccgtctgtttccactcaccgtgtgatactgtgatggtggacttggacgagccgctcgatgcggctgtaactgcggagaagggcaaggcggcgctacaacggttacttgaggctgaccctgcactcttcctctccccctctgcggaccttgctgctgctgcccgagcggcctcgcagcacatctactcctcactggtgccactctaccctgctcagcctccaccgctccctaccctcctcacggaccctgccttcgatgccgagcagatttggtcccagatcgagctgcttgcccgcccactcctccctcagctgggccgccagctccgtcgcatcgtgcagcaaccctcctcgcaacagcctcctttgaaaatgcctgctgtcgccgagggtgagcagttggaggaggatggagaaagtagcgattcaaaggaattgaagaatgcggaggagttggaggggacagaggatggggaggagttggaggggacagacgatgaggaggaaatgggtgacaaggaggaggaagaacggaact

SEQ ID NO: 88848 - DNA, 322 bp, Zea mays
  Clone ID: MRT4577_181026C.1
acgcacgcgctctctctatcccctataatcctttgccatatattgatccgtctctgttacttcggtaagggggtcttcttcccttttcccaccgaagttcccccttctttcatcgatatctttttttcctgtcaccggccgcgacagggttccgttttccttgctccggccggctgtaaaagctttcgggcctcttaggtgcctcaaatccggtggtgctcggtcttttggtcctgaatccagtgggaagggaaagggtcgcttcagtgttgggtgactccgagacatgcctgtgctctacgcttaccgagattaccggtgc

SEQ ID NO: 88849 - DNA, 837 bp, Zea mays
  Clone ID: MRT4577_181027C.1
ctcgaggccggccgggctttctctctgctctcgcctgacgcccgaccgaagctcccacgttccagccgccgagcagcgcctgcacgatcccgtccacgcccaggagccaagcacccgacccgcgctcaggcgccttgctcgccctgcccctgccgcgaccaagcgcacaggcccgacgctctaagccgagccgtcgcgacaccgaccacgcgcccgagcactacgcagcggtcgcgcgcacaccgagccacgaccccgccgccaaccgaagccatcagtgccccgctcaagccggtcgagcgcccgcctcgcgatcccgcccgacgcctgcacgacccgatgtcgaccgagccccggagccgaatcgacgaccgcgaccgttcctctgtgttaatggggttaatggagttttatgcaaccgttacttctctccattgatagacgccatttatggtgcttgaagacgccgacccttcctctcctgccctctctctataaaatccgacgagcccttgctcctccctacacgagttttctcctccccgagctccctctctctttctcacatttcttactcgcccacgccgtcgccggagttcaaccacgccatcgcagtctgccccaccgtctgtggagactcactggagctcgctgttcctcgcggagctcgtgctcaccgtccgcatttccccgccggagttccatccgcgcagcacgacgatcgagcacgttcgccgtcgtccgttcacccaggttgatacaaccgttaatgattttctaatcatgtttgaattttttattatcttatgaactattgttgtaatataatgtgatttg

SEQ ID NO: 88850 - DNA, 627 bp, Zea mays
  Clone ID: MRT4577_181028C.1
ccgggatctcatccgagacacacctttttactctgggctcgagtcttttctaacaccactctgccctttctcacattcaacctccagtcatgggtctgactttgaagaagcccgagggcgtggccggttccactgcgcccgccatcattgtcggcttgtttgttgcttttggtggtatcctcttcggatatgatactggtaccattggtggtatcctgggaatgaagcactggcgtgaggtcttcagcactggatacgtcaaccccaaggacaaccttcctgatgtcaccgccgaccagacctcgctcattggctctatcctctctgctggtacctttttcggtgccctgactgccgcccctactggcgatttcctcggtcgtcgccttggtctcgttgccagcaacattggcttctgtcttggtggtattctccagaccggtgctactgatatccccctgtttggtgctggtcggttcttcgctggttaccgagtcggtatgatctctggcaccattcctctctaccaatccgagactggccccaagtggatccgtggtaccattgtcggttgctaccagcttgccatcaccattggtcttttggttgctggcatcggcgacaatg

SEQ ID NO: 88851 - DNA, 440 bp, Zea mays
  Clone ID: MRT4577_181029C.1
cccctggttggctgttcttcgattaaagcaccacttggtgcggccttcacaggaggccagattcgggacgggggatcgacccccagccggccggcttctcccttggagcagtcactctggttggctgtagggcttataatgtctgtttttttttctggctttgatcgagcatggcgctcgaagggcacatgtagataatggtgtatttttggatcgtttagggcttgtgttctttcccaccgtttgcttgcaatagactcactgaatcgctagtttgccttgtgccagtgagaaaactggtaccagttttgtgatgataggtttagaggaatcgagtcaattttgggtttctcgtgttacagcgctttcagcaatagtacctaccggtaggggtggtagtaggggtgataatggatgaccattcaaatgtttcttcacgg

SEQ ID NO: 88852 - DNA, 357 bp, Zea mays
  Clone ID: MRT4577_18102C.1
gcatacgtacgactctagtctatgcacggcacaagaatggcgcatgcgacaagatgtcatgctgctaaaaaggaactacacacccttcctaagagagaataataccctacaacgcctaaaacagcggtagataatgtactctgatacccacatctctaatacaagacagtctgtacccctgtattaatcacaatctggagagcaacgtgaccaggaatcgatataacatacacccgacttaaataagcatagacctaaactaaggggcctgcatgaactcatgatgaaatggactgctaactaatgctattgaaggttgaggagaaccgattgaagaaaactatacattaactgaca

SEQ ID NO: 88853 - DNA, 609 bp, Zea mays
  Clone ID: MRT4577_181030C.1
aatcgggctctgcctcaaagctaaaatatagtacagtagctatctgttcatgtcactgtttaccagttcgtgccatagacgcatctctaaaaggacatcttatgtaaccaccagcaaataaattgtcagactaaagcacgattctttctccaagttcacctcaacattggcaccaatttagcgatgaagacaaataacttcaagcctttcaatagagataacagataaacattggatgcctcagcatggctacaattttatctgggtgtaagccttcagacaacacaatctaacagacatatcatagcaagcatggtcatactccactcccagctgtaccgctactggaacaagcatgcctcattggaaaattccataatctgaaatcctaataaaagtttgtttgcagcctaggcatatccgcacttgagggtgataactgatatcttgtctctaacttacccctcagagcacagtaaattgatcctcaaacaatcatggcttatcaaatgagggtcctggatggatatgaacaatttacatatacaaaatctttcctttaatcattttttgggtcttaggccaatagtccttgatgctatctgctgc

SEQ ID NO: 88854 - DNA, 117 bp, Zea mays
  Clone ID: MRT4577_181031C.1
cgtggagatccaaatcggccgcagaacgcacgcctaactgcatctcaacactggatggggctacgaaccttgagcacgggcatcggatggcacccaagagagacgtactccaatgta

SEQ ID NO: 88855 - DNA, 412 bp, Zea mays
  Clone ID: MRT4577_181032C.1
acaaggacatctttgggagagcaattaagagatacatccaaaagcctgataagaaacagttgctgctgtgcctcttggactggatgattggacaaggctattctgtagactcgtcatcaaggaacttacttttgaagaatgcacaactttttggcgaaaaacaagttatagcagaaatcctttctaagcagcagatagcatcaaggactattggcctaagacacaaaaaatgataaaggaaagattttgtatatgtaaattgttcatatacatccaggatatgcctaggctgattgtttgaggatcaatttattgtgctctgaggggaattttccaatgaggcatgcttgttccagtagcggtacagctgggagtggagtatgaccatgcttgctatgatatgtgtgttaga

SEQ ID NO: 88856 - DNA, 268 bp, Zea mays
  Clone ID: MRT4577_181033C.1
cacaaacgctgacagttaccccataagaacgggagggtcttcagcggctctagggaatgtagaccaaccttcagctcgtgctaaaagtatgatgtgcatgcaacaaagacgaaaagcttacagtcaactaccttctggatcatagccatgagattgacgagcagcaccaatcgaccttcggtggatggaggaaaccattgcagatgctgaacaacaagtgtcgttcttatcctatgctgctgactatctatgatttccatatatattt

SEQ ID NO: 88857 - DNA, 1381 bp, Zea mays
  Clone ID: MRT4577_181034C.1
caaagtttgtcacctagcatacaaaacagttgaagatatgcatgcaaagggtcatcaattaaatgaggagctttgttctcatgtaatggtacagctaggaaaggcaggtttcccttctgaagcattttctgtgtataatatgttgagatatagtaaaagaacagttcacaaatctcttcatgagaaggtcttaggcatcttagttccagcagaacttctcaaagctgcttatatagttgttaaggacaatgctgatctgatatctccttcttctttggagaagtttgctaaatcgttcatggtctcaggcaatataaatctaattaatgatgttatgaaagccctaaaccgctccgggtggcgtatcagccagcggctctttgggagagcaattaagagatacatccaaaagcctgataagaaacagttgctgctgtgcctcttggactggatgattggacaaggctattctgtagactcgtcatcaaggaacttacttttgaagaatgcacaactttttggcgaaaaacaagttatagcagaaatcctttctaagcagcagatagcatcaaggactattggcctaagacacaaaaaatgataaaggaaagattttgtatatgtaaattgttcatatacatccaggatatgcctaggctgattgtttgaggatcaatttattgtgctctgaggggtaagttagagacaagatatcagttatcatcctcaagtgcggatatgcctaggctgcaaacaaactttattaggatttcagattatggtatgcggtatatattgaatcaacttgagtgctctaacatctcatggcttacgtctatgtctgttgtggccaggaattttccaatgaggcatgcttgttccagtagcggtacagctgggagtggagtatgaccatgcttgctatgatatgtgtgttagattgtgttgtctgaaggcttacagtaagtttttgatacatatggacatacccatacagctaaagcaaagacaatttgatttgattttagaggattttgcatgtaattcaacatggttgaggtcactgtacctagaaagcagcatacagatctaattttgttgacaatcgtacaaggtattattacttaattactttggtgaaaagaggttgctttgaagatttgacttcacgttgtacatacaggcagagtatcagacaggtggatttttcctaaaaagtggggaatatgtttctaacctgttttgttctttaggaaactggattgcacactattgtgcctttatgcaaaccaagttatgtatcatttttaggtgatgaattgtatctttttttagaagatgaacagttatgtatcctttttagtggatggattgttattat

SEQ ID NO: 88858 - DNA, 523 bp, Zea mays
  Clone ID: MRT4577_181035C.1
tcgggaggtcagcatccggtccactgcgccagagcctttcagcttcgtcatcccgcccaagtgcaccgtgaggcacgacgtgccagcggtggtcttctctaccggcggctgcggcaccaacttcttccacgccatgactgacctcattgtcccactctacatcacagcccgtgagcacaacggccacgtccagctgcttgtcgccgactaccagcctgaatgggtggccaaattcagaccgatcctcactgcactgtccatctacccggtcatagacttcgacgcggacactgccgtgcgctgcttcccgtcggcgcatgtcgggctcgagagccacaggatacttggcatcaacccggcgctctcccggaacagctacactatgatggggttccgtgacttcctccgcgacgtcttttcgctgcggcggccatgggcgacacccgtaagcaggagcagcgggcagaagcctcggctcgtctttgtcctgcggcgccactctagggaggtgacgaacgaagtg

SEQ ID NO: 88859 - DNA, 397 bp, Zea mays
  Clone ID: MRT4577_181036C.1
ggcccgggtcggattttccgggggggccccacgcgcccgttatagcgcctttttttttgtccaccattggggaaaaaatgcttaggggtgcatgggtttggataaccaaaccttgtatgacatatgtttcaggactgtgaaggtgaccaccgctagctgtggtgatctgaaccatttgagctctgtatccaggagcggcgtcacctgctggctaaggattgctggtgagatgaactcccagctcaagatgctggatgcgatacctgaaccccttcccgcgtctgcactggtttatggtcggcttcgtggcggtgacgtgcggaggctcctaggagtaccggggcctgagagaacgcgagtgtcacgcagtaaatgtgggatgacaagaacatgatgt

SEQ ID NO: 88860 - DNA, 785 bp, Zea mays
  Clone ID: MRT4577_181037C.1
ccggccgggacacgcgcctggattctcctcgcccctcgcctccctccaactgcagagagcgccacaaggtcctgcttcaaagactgcccaacgccccctcttctctcatgccgattattcctgtcaccttcttaactcgtttgtttccctcctcttgagccactgaagcgtttacagagcgcttcgttctagcagtagcggacaagggagacaagaggaggaagagatggcaggctgtgatggagccaagtcatcggcgtccatggaggaagaggtaatttgtgcatagtttctgtgaactggcatgattcttggccgaagaaaaggaatcaagctaggctagaggttgcagttcacatgttatccatcatcagttgttacttgcttgctgcacatgcattgtatatgcatgccttgttcatttcccctacctgactacttggatcaatactgccctgctttgattaatttctggattattagcctcaaaacgaactttttttggtggggtagttttcattggaacttaacttagtacacgcatcgatagagttggagttttgcagagcccagagcaatggaatgtctcaattttgatacacaattattatacatcgaaggaactcttactggcttcacctgcagccaagtactggaagcggtcaagcaggagaggtcacgatcgggtggccaccagccaggcgagcttggacattgacatgatgggaccctgccccatggcgggttgtacttgcacgtgatggtgccctgactgcgacggatcg

SEQ ID NO: 88861 - DNA, 251 bp, Zea mays
  Clone ID: MRT4577_181038C.1
tccactgcgtctcgcgccagcgcggtggcggccgcggcgtaacgcgctggtcatgtatgcaatcaacagcattctacgtgcgactggacccgggtagtgggtgcctaccaggagacatctgttcaattggagcaagtgttatcattgaactggtgtggtcaggtgcaacaacaactagtactattcaaccagttagttggcgagagccgtgctctctgtctaacacacgaacaggtcgtgccgtactacct

SEQ ID NO: 88862 - DNA, 1676 bp, Zea mays
  Clone ID: MRT4577_181039C.1
cccccccgcccgcccccacgtctgcgcgaggcagcagcttagcctagcactgctgcagcttgcttgctttgctttgcttctccaattcttcttggccaggcctcagagcagagctttggcttggctagtcgtcgtccgcggatagtctccgctgcaccgtgtgcgtgcaagcaaggcaaggcaaccagccagccgcggcgacgaccgatcgtcaacaagctcgatcgccttggccggcggccgggcgggccaccgcaagccgcgagcgatggaggagcagctgggcccggtggcggtgacgcacctgctgcagcacacgctgcggagcctctgcaccggcgacgccccgcagtgggtctacgccgtcttctggcgcatcctgccccggaactacccgccccccaaatgggatctccctggcgccgcgtacgacaggacccgagggaacaggaggaactggatcctggcatgggaggacgggttctgcaacttcgcggcggccagcagctctgccgccgcgtccgcgtgcggccaagagggggcagcggcagctgcggcggttgcatatgccggggactgtgaggcagctgtgcaggatgcggtgaagcaccagcaccagcaggcgcagggcctgcagcctgagctgttcttcaagatgtcccatgacatctacaactacggcgaaggtctgatagggaaagtggcggcagaccacagccacaagtgggtgttcaaggagccccaggagcacgagacgagcagcctcatctcctcctggagcaaccctgcagactctcatccgaggacgtgggaggcgcagttccagtgcggcatccagaccatcgccctgatcgctgtcagggagggcgtcgtgcagctcggctccatgaaaaaggtaacggaggacctgagctacgtggtgatgctccgccgcaagttcgggtacctcgagagcatcccgggggtgctgctcccgcacccgtcgtcggcgggcgtgttcgcggccggtgggtgcgtggggcccccgccggacatcgccgcggcgtggtcgtcgggcctgatgccaccgccggccgccggcgccgggccgccgctggagctctacgacccctacggcgccggcgcgatggccgccgggccaggcgccgccgccgccgctgcgtccatgcacatcatgccgtcgatgagcagcctggaggcgctgctctccaagctgccgtcggtcgtgccgccggccccgcagccagccgggtccgtgcccggagcagcgccgccgtccaaggacgacgattacgacgacgtgcagcagtgccatggcatggacgacgtggcggcgagcaacggcgcagcagggttcgtcgagagcgcgagcccgagcccgagcccgagcccgagcggcgctgcctccgcgcccatgtcgtcgtcgtcctactttgtcaacgtgggcagtagtattaatcccggcgatcatgggttttagctcgtcgtggcagcccggccggctgctcgtctcgtctcgtctgatggcatggccatggcgtgcttgttgattaattgtgctggtcttcgctagggcgaaacctatcgatcatatattaccagttgccgtcgctatatgctaattaattaatgtagttaacccaatgatttggcaaaaaaaaaagagaggaaaggaa

SEQ ID NO: 88863 - DNA, 884 bp, Zea mays
  Clone ID: MRT4577_18103C.1
gcgtaggaaaaaattttaggtggttgctcaactgcttgagagcctatgccatgcgacccccccagccccagagagtaccgtacgtgttgtctcctgctcaattatacaacattaataacacaacgaacaatggatcaggaccgtccatttatcagcatgggcagcgtcgatctgtccaccgaggctagacggaaaactcttcaatctaaaaggcccaacaaattacaggtaatccaaaattggactatgaggcatcgaactctaagtactcgatcaatctgtcgtggagaagaccgtgaaaccatgccttgttgagctcagcgaggaccctgacgtcgatgtgaggtactacgcgaaccaggcgctgcaggcgtgcgatcaaatgatggtgtcgagctaactagccgtgtgcccgagtacttagagttcgatgcctcatagtcctcgctgagctcaatctgtcgtggagaagaccgtgaaaccatgccttgttgagctcagcgaggaccctgacgtcgatgtgaggtactacgcgaaccaggcgctgcaggcgtgcgatcaaatgatggtgtcgagctaactagccgtgtgcccgagtacttagagttcgatgcctcatagtccaattttggattacctgtaatttgttgggccttttagattgaagagttttccgtctagcctcggtggacagatcgacgctgcccatgctgataaatggacggtcctgatccattgttcgttgtgttattaatgttgtataattgagcaggacacaacacgtacgttactctctgtgtctgtgtgtgtttgcatggcattgtctcgcaggtagttgagcaaccacgtaataattctttccagcgcaaaaaaaaaaaaaaaaa

SEQ ID NO: 88864 - DNA, 1853 bp, Zea mays
  unsure (1)..(1853): unsure at all n locations
  Clone ID: MRT4577_181040C.1
aacacctcacactccattcacgccagggatcgatcgcgccgctatagctgctgcacgcctgcacgctttgcctcttcttcgttctctgccgctgcgctagctagctgcggctccgagcctccgacgcaggaagtctaatgtggaagtctctcagaactgagtacttttgttagaacaaagatttgttcagtcaagctttgcaaattatcatcatagttgggatgatatccatgggtactttaatgagtttatggagccctggttgccgagcttatctgggttctctgacaatggaactgtaatatttgcaacagaacctttcttgtattggaagaaagtttcaagaggggttgacaacttataagtgtaagtttgatgacgtgttcgtgagggcgaagtgggagagcaaaattacttctggcatgcagatgtcaacagatcctaaccactacggggtatttccacattcattctgcaaccaacatgtggtttcatttcagacgagttcagttaccagtgtatcaggagccataccagtttgtctagacacttccagtggaatgaatggcaatatggcgatgttgaacactacaacttcaacgattgtatccactggttcaccaaacatgagtgctgagtcttcttgcccgaacctcaagtatactgcaccgttggctgtggagtggtcctatccggagctgcaattgttgaatgatggcctcaacaagtatgcaaatgaaccaggaatcatgaagtacataaagatagcagccacgttaccagacaagacagtaagagatgttgccatgagatgccaatggatggcagcgagaaaagaagctacaagacgacggaaacctgaagaacattatcttggaaaaaagataaaagatagaaaggataaaatggctgagccgtcatcatggggtaccaatcctcctgttcagactgagatgagatcttcctcttctatgcctcctaacgccaaacacaatgggtttctctctgcagactctcaaattgatcatggaatgctaaatgtattggaagaaaatgctaagctactcaatcaaatagaagtaaatattttaacatcacagataatacttttcaggcccataacaatattgaacttttccatcacgcaagaaggaacatcaatggtcttttacaaagcatgagccaaattcccggaataatgagcaagatgcccccattgcctatttcggtggatgaaaggctagctagctacatactccctcgtgctcctacggctcaagttcttggcagcagccatttgaaagaagaacgaagagtatggtaggccactgctagacagggaagcagctcaattttcagcagcagtttgaccaaaaatatctgaagagccatgtgcttgggagtctgcatggagaagcataggtgaaagaacgatctggcttttctgatggtctcaaagctacagaagcaacatgatccaccacttcaccacatggccttaaagaacgctgtctagcttgccttgtcaggatgctctgtattagtgatcaacaaatttgagatagggagagttttccgtaatctgcagttttcctcaccttggttgcacatatcgattctttttgggttttgtcctggtgatcgaggttaacagaagtgtagcgtagaaattgaactttggtatgaataattagcaggaaaagcgtagcctttttgtcagttactacaatggtaaccaacctcctgtgtatctagtattctagttctagtatgatgcatatgcaagcctggttctctaaacgtgtgattgattgccnnanaaaanaanaaaanaaaaaaaaaagggcggccgc

SEQ ID NO: 88865 - DNA, 2198 bp, Zea mays
  Clone ID: MRT4577_181041C.1
gcagcttagcctagcactgctgcagcttgcttgctttgctttgcttcttcttggccaggcctcagagcagagctttggcttggctagtcgtcgtccgcggatagtctccgctgcaccgtgtgcgtgcaagcaaggcaaggcaaccaggcagccgcggcgacgaccgatcgtcaacaatctcgatcgccttggccggcggccggccgggccaccgcaagccgcgagcgatggaagagcagctgggcccggtggcggtgacgcacctgctgcagcacacgctgcggagcctctgcaccggcgacgccccgcagtgggtctacgccgtcttctggcgcatcctgccccggaactacccgccccccaaatgggatctccctggcgccgcgtacgacaggacccgagggaacaggaggaactggtacgcgctgctaactgcacacacagcacgctctcatattccttcctccttcctttgtggttctgtgcatgtcttcggtggagtcccatgtgaatgccctcggtgtgttcttgcgcgtctcgcttaggattctggcatgggaggacgggttctgcaacttcgcggcggccagcagctctgccgccgcgtccgcgtgcggccaagagggggcagcggcagctgcggcggttgcatatgccggggactgtgaggcagctgtgcaggatgcggtgaagcaccagcaccagcaggcgcagggcctgcagcctgagctgttcttcaagatgtcccatgacatctacaactacggcgaagggtaggtggctgactagtccgcatgcacaccacgattagcgagccggttaaccttcctctcctgttaatgatggcgccggggccctcctcctcctcctcctgttcttggtgcggtttcctttcgtgctgcagtctgatagggaaagtggcggcagaccacagccacaagtgggtgttcaaggagccccaggagcacgagacgagcaacctcatctcctcctggagcaaccctgcagactctgtaagaagctcctccatctctgtctatcttttacacaaattaaactgcaccgtcgtttacctcaagccactaatctcctgtgtgagccatgcacatatggcctgtgttctttcgcagcatccgaggacgtgggaggcgcagttccagtgcggcatccaggtgcacacttttaggccttgacaaatcgcaatccggccccttttgatcagaggcagcagctagcgctagctagctgtgggctgtgtggcctacctctctgctgcgatgccaagacatggccagctagctgactctgccatgccatggccaattggcctgcctgcctgcgtcggcttttcttttttctttttttccccccctctcgctcacattctccgctttgctctgcacttgtgcagaccatcgccctgatcgctgtcagggagggcgtcgtgcagctcggctccatgaaaaaggtaacggaggacctgagctacgtggtgatgctccgccgcaagttcgggtacctcgagagcatcccgggggtgctgctcccgcacccgtcgtcggcgggcgtgttcgcggccggtgggtgcgtggggcccccgccggacatcgccgcggcgtggtcgtcgggcctgatgcaaccgccggccgccggcgccggtccgccgctggagctctacgacccctacggcgccggcgcgatggccgcagggccaggcgccgccgccgccgctgcgtccatgcacatcatgccgtcgatgagcagcctcgaggcgctgctctccaagctgccgtcggtcgtgccgccggcgccgcagccagccgggtccgtgcccggagcggcgccgccgtccaaggacgacgattacgacgacgtgcagcagtgccatggcatggacgacgtggcggcgagcaacggcgcagcaggggtcgtcgagagcgcgagcccgagcggcgctgcctccgcgcccatgtcgtcgtcgtcgtcctactttgtcaacgtgggcagtagtattaatcccggcgatcatgggttttagctcgtcgtggcagcccggccggctgctcgtctcgtctgatggcacatggccatggcgtgcttgttaattaattgtgctggtcttcgctagggcgaaaacctatcgatcatatattaccagttgccgtcgctatatgctaattaattaatgtagttaaccc

SEQ ID NO: 88866 - DNA, 2191 bp, Zea mays
  Clone ID: MRT4577_181042C.1
ccggccggggccagtgtttccatcccgcagcgctgaattcaagagatctcgtctgcccctcgtcctcctctcttcgggccatcacggcggcggcagcggcggctcggctcgtttgcggtgtgccgcaagttgtgcaactgaactgcgctttgcccgcccccggcccttcctttttgggcgcatataaacgagcaacgtctcgcctttggggtcggcggggccgccgctttttagttgcgctctcccctcctctcccccgcaccctgcctgccttttccattggagcgcacaaagccggacggcaccaccatttaaagaaggccaaccaagcacacggcacggcgaagaagagaccaccacctcacactccgggattcacggcaggatcgatcgctatagctgctgcgcccccctgcacccttgcgtcttctgccgctgctgcgctgcggctccggcacagaactgagtacttttgttagaagaaagatttgttcagtcaagctttgcaaattaccatcatagtttggatgacatccatggttactttgatgagtttatggagccctggttgccgagcttatctgggttctctgacaatggaactgtaatatttgcaacaaaactttcctcatcttggaagaaagtttcaagagggcttgacaacttttaagtgtcctgtgaagcttgatgacgtgttcgtgagcgcgaagtgggagagcaaaattacttctggcatgcagatgtcaacagatcctaatcactacggggtatttccacattcattctgcaaccaacatgtggtcatatcaaagacgagttcagttactagtggatcaggagccataccagtttgtctagacacctccagtggaatgaatggcgacatggcaatgttgaacactacatcttcaacaattgtatccactggttcaccaaacatggttgctgattcttcttgccagaacctcaagtatagtgcacccttggctgtggagtggtcctatccagagctgcaattgttgaacgatggcctcaacaagtatgcaaatgaaccaggaatcatgaagtacataaagatagcagccacgttaccagacaagacagttagagatgttgccatgagatgtcaatggatggcagcgagaaaagaagctacaagacgacggaaacctgaagaacgctatcttgggaaaaagataaaagataggaaggacaaaatggctcagccatcatcatggggtaccaatcctcctgttcaggctgagatgagatcttcctcttttatgcctcgtaacgccaaacacaatggatttctctctggagactctcaaattgatcatgaaatgctaaatatattggaagaaaatgctcgactactcaatcaaatagaagtaaatattttaacatctcaggctcataacaacattaatcttttccatcacataagaaggaatattaatggtcttctacaaagcatgtgccagattcccggaataatgagcaagatgcccccattgcctgtttctgtggatgaaaggctagctagctacatactccctcgtgctcatacggcacaagttcttggcagcagtcatttgaaagaagaaccaagagtgtggtaggccactgctagacagacagcagcttaatttgcagcgacagtttgatactgtagaaaaaatatctgaagagccatgtgcttgggaatctgcatggagaagcataggtgaaaagaaggatctggcttttctgatgtctgaaagctatagaagcaatacgatccacttttcaccacatggccttaaaaaacgctgtccagcttatgagtttgagatagggagagtttccgtaatctgcagttttcctcaccttggttgcacatatcgattcttttttcgggttttgtcctggcgatcgatgttaacggaagcgtagcatagaaactaagcttggtatgaataattagcaggaaaagcttagcctttttgccagttactacaaaggtaactaaccttctgtgtgtatctagttttctagtataatgcatatgcaagcctggtcctctaaattgcaacctctctcctcatgtatgtgctgcgtctctttacaaccgcaagaaattagcagaattctaatcaaagggcctgtttggctatcgagggtcccagtaaaaaaaaaaaaaaaaaaaaaa

SEQ ID NO: 88867 - DNA, 1352 bp, Zea mays
  Clone ID: MRT4577_181043C.1
aaacgatgggtacctcgaggccggccggggccggggactatcccctaccagcccaccatcgcaaggtgtttgtttccattccatcggtggcacgagacaggagacgccaaggccatagctagagcctagagcagcagcagaggcttgacctgaagctccacccgccatggcattcacgcccgctacggcctgctgcaaggcttccctggcgctggcaccgcgggcgtcgccccgcggcccggcggcctgcgcgcaggcggcgctcctctgcacgccctccacctccgtgttccgcggcctccgggcgcccgcatccgccgcgccggccccgcgccggcgccgctcggcggcgtccacgggcatagtctgcggcaaggtcgccaagggcagcgtgccgccgaacttcaccctcaaggaccagaacggcaagcccgtgtcgctgaacaagttcaagggcaagcccgtcgtggtttacttctaccccgccgacgagacgcccggatgcacaaagcaggcgtgcgcgttcagggactcgtacgagaagttcaagaaggccggggcggaggtgatcggcatcagcggcgacgacgcggcgtcgcacaaggcgttcgcgcagaagtaccggctgccgttcacgctgctgagcgacgaggggaaccgcgtgcgcaaggagtggggcgtcccctcggacctgttcgggacgctgccggggcgccagacgtacgtgctggacaagcagggcgtcgtgcagtacgtctacaacaaccagttccagcccgagaagcacatcggcgagacgctcaagatcctgcagaccctctgatccgatcaacctcctcactgttctgggccatgctctgcattcgtcgctgtaaaagtaccggactatgtagtagtgtagtgtatgtaaccaagagctgatgacctgatgttttgttccatccttcagtgagtctatctatcacacgattctggctcgtttgatcgaccagcatcttcctgtttgtcatggtcagtttcacttgtattacaactgtacttttggtcgacagtctcagatgttgtagctcgttcaacccaaaattttccccaccccccccccccccccccacccccccccattcccccctgacccccatgagccccctcgcttttttcacccccaccccaggcgcgcgtcgcgctttccctgtacggctgctgctccaggcatctgcgctcgcgccgcgccagcgcgccttggccgtgaccgtgaggcccacagcgacgacgccgaggtcgagccaaaggaggaagtcgctgccgcacaccaccccgccgccaaagaccaaggttgctgacgacggggaggc

SEQ ID NO: 88868 - DNA, 224 bp, Zea mays
  unsure (1)..(224): unsure at all n locations
  Clone ID: MRT4577_181044C.1
acccacgcgttcccttggtccaggccgctggggccaccgacgcgtggcgcgcacggggaggacgaagaagaggaggaggaggtggaggcccccgaggtgcggagccgtcacatggcnaagctccacgcgcaggacggggtcctgcgccacatgctgaaaatgatggtagcttgcaactcgcgcgggttcgtgtacggctggatcaacgaagcctacgagcccat

SEQ ID NO: 88869 - DNA, 198 bp, Zea mays
  Clone ID: MRT4577_181045C.1
acggttattctgcccaaaatgccttgtgctgtgaattacatctcctgcttgtcccaaggacagggggggaacatacccaacctggagcagcattatggtctgagcaagaactgcacatgaagtgactatcctgatagaggcctacacgaccctgagggacacgggccctgtcccatgcaatcaacatgtgagagacct

SEQ ID NO: 88870 - DNA, 427 bp, Zea mays
  Clone ID: MRT4577_181046C.1
aaaaaaaaggggacccccgaaacacttttaaaaaaccaaaaaaaaaggaacaacgaaaaaaatggccccgcctcccctaaggggggagccctccccctgggttaaaaaaaaaagaggggtttaaaccgggggctcctataaacccaaaaaaaaagcggggaaaaaccccaccaacaaatagcaaaacggggggtttttgggtaattttaaaacccccaaaaccgggggggggaaaaaatggggggttttggaaaaaccgcggaaaaaaaggggaatttggggtcgggtttaaaaggccccccaaattttgcacgtttggggcccccgcctggatgtccccgaaaacccctgggggggggggggggggaaaccccaagggggggtttttgggggcccccaaaccaaaaattggggaaaccaaaattgg

SEQ ID NO: 88871 - DNA, 612 bp, Zea mays
  Clone ID: MRT4577_181047C.1
agtcaccagcgccgcctccgccgccgcccccggacgcgagctcctccaccggcgtctatcccgaggcatgaccggcgctgcccccgccctcctccaccaccacggagtttcaagcagagggacactacctgtctatcatggcaattgcagattcgtcccaggatcttgtttcctcagcaaatcaactattttgggaccattgactgtgtctttggtttgtggtgctagccccaacaaccatagaccaaggaatccagatatctcacaacaacagaagaggggttcatcatcaagggggaaaagcaagccattccaagaaagggacgactctgagaataatgatgaatttgatagtgatacagtatcctccaaaaatggaccacctatgtctttgacaagcaactcacgcccccatgcaacatcagctccaggggaaagggaaaaggagattgtagagctatttaaaagggttcaagcacaactgcgagccaggggaaaaggcagggaggacaagaagcctgaacctgcaaaatctcagggtgagaagggaagtgtcgattcccttcttaatctgctcaggagacactcggtggaccaaaaacggaagagcag

SEQ ID NO: 88872 - DNA, 411 bp, Zea mays
  unsure (1)..(411): unsure at all n locations
  Clone ID: MRT4577_181048C.1
gccggctcacgcagaatagcactgcaggcctcagcctccctgtgcgctgtgcctccccaaaccccggcaccaaaaagggcctccgcgactgcgaccgatggctgccgccgaggccattgccaggggcgcgctgtcccgctcccgcgtggtggcgaggggactcgtgcacgcggcgcaggtggttggcctggccgtgttcctccgcgccttcgccgagttcccctggactgccgccgcggccccgcccatcctccgcgccgccgcttccttcctcgccccaccgcgcctctacttcctcgccgccaacgtcatcgtggtcgccctcgccacgctcttccgccgcgacgcggcctcatcctcgccgccgggctccagcgggggggacgcgcagnacccgttccttttgttcct

SEQ ID NO: 88873 - DNA, 228 bp, Zea mays
  Clone ID: MRT4577_181049C.1
tgcatttccttctcccttggcggccgctcttgcttgcttcttgagggccaaattcgccttatcctcagccatatttccctttcccttgcagagggctgttggggtcgtcgaaccccctccccccggggggggggggggaccctccgtaacacgccgcccgcgcttggcgcacccggctggctgggcggcaaccccgggggtcctgtcaataaggcaccacccctcacc

SEQ ID NO: 88874 - DNA, 116 bp, Zea mays
  Clone ID: MRT4577_18104C.1
ctgcagtccatgtgctactactccgcgcggaaaaccatgctcaagctcagtagcctcgtcgatgtcgactcggagctgctcaagaccttcgattcgcctcggcatcgcgctcaccg

SEQ ID NO: 88875 - DNA, 756 bp, Zea mays
  unsure (1)..(756): unsure at all n locations
  Clone ID: MRT4577_181050C.1
acgcctgcaggtatcggtccggaattcccgggtcgacccacgcgtccgaattgcccgggccgcggtgcgcgtcctttctcgaggcgtgcctcgccggcggagtttcggagcccgcgttcccgtcgcggccctccggtgctggtgtccgcgtggcgcggagcgaggccacacggcccctgctcgaggcccgcgtcgccatggccgcggttcccgagttgctggagcagcaggaggaggaccgcagcaagttaagatctgtgtctgtggacctgaatgttgacccatcgcttcagatcgacatacctgatgcactcagtgagagagataaggtcaagtttacagtgcacaccaagaccacactgtccacatttcagagcccagagttttctgttacaaggcaacatgaagactttgtgtggctgcatgacactcttactgaaacaacggattatgctggccttattatccctcctgctcctacaaagccagactttgatggccctcgagagaagatgcagaaactgggagaaggggaaggatctatgacaaaagaagagtttgccaagatgaagcaagaactggaagctgagtatctcgctgtctttaagaagactgtgtccacccatgaagtctttcttcagcggctntcttctcaccctgttctcagtagagaccgcaactttcatgttttcttggaatatgatcaggatctaagcgttagacggacagataccaaggagatgttcggaggctttt

SEQ ID NO: 88876 - DNA, 365 bp, Zea mays
  Clone ID: MRT4577_181051C.1
agacaaaggacaccttagggctggacggcaccaccttcaggatcagcgtgaggcctgaccgttgctgcatgatgacatatcttgcaaaataggatgatacactcataggacatcatactgaagctggactctggacaagatccacatgatctacgctgtggatcacaaagggaacaccgcgggagtgatcaccttgagggacatcctctcacaactggtgcatgagccacaccattacttgggggatttatccgttggcgaagttcccctgctctgcacacagcaccgtatgacacatcttaaaagcccaatcacactgatgtatatgcgcaaatgcacatctagagctattctcttatgaagat

SEQ ID NO: 88877 - DNA, 248 bp, Zea mays
  Clone ID: MRT4577_181052C.1
cggacgcgtgggcggactcgtgggcggacttgagttttgacgcgtgggcggacacgtgggcggcgatctagtcggctgcgtgcggcgcagcgatagcggggcaaaaccagctgctgatcgtcgtgccgactttgacgatgctcggcgcaatgaaggcgccactagttagcgccacccgctggcacgcgctgttgaagaagaagtcatactcgctcacgggccagttgcgggccttcatcaagaagatc

SEQ ID NO: 88878 - DNA, 260 bp, Zea mays
  Clone ID: MRT4577_181053C.1
ggtaccctcggagcggccggcatcgccggctgttctcttcctgtaatgtcacatcccccgatgcctgtgcgcaggtcagtggtcatgacgacgacgggcgcccgtgctctcgccgctctgctgctcgtcaccgtcaccgccgacgtcgccgttgtcgacgatgggtcgactctcgcggacatcgagaagtgctttcgtagcgcgggctacatactgtacgagagggtattggtcagactactgtgtttggggcgttgttc

SEQ ID NO: 88879 - DNA, 547 bp, Zea mays
  unsure (1)..(547): unsure at all n locations
  Clone ID: MRT4577_181054C.1
actcctataggggcgatcggtacctcgagncngccgggccgaccccccccccccccccccccctctccctctggactccgcagcgcttcctccggtcttctctggccggatccctgcccccaaaatcggattgggggagggctcgttgcgttcgaccagacggcgtgcggcggttctccggcgccgaggtgtgtatagactatgttgtacagtgtatgggatgctaactcaaggatgtgcgacaatatggttatgaagaggagctatggacaaagactaaggcaaaaggtcaaattgtcaatagtgttgaaggagcaaatggattaccttgatcactgggcagcgctgcaaacagagcattcttcttctttatccagcgcaaccgaaattattaaagtaagcacattgcgtcttccagtttctggaggggctaaggctgatgtactcactgtgaacaatgctgacagctcagcagttgacattatagcaggcggtgggggcactgcatttgccatttgctatcacagttacagggttcactttctct

SEQ ID NO: 88880 - DNA, 582 bp, Zea mays
  Clone ID: MRT4577_181055C.1
aaaaaaccgcggtccatccgccttttgggcgtaaaaataacaaattctgtggggaccccgcccgcccccaaattttaaacgggtccaccgggggggggggggaggccaacccgctttttttaaaaagggctggggggagtaccagccgaggttgcccccgtacccccccccgcgcttgtccaaaaagcccttgtgccccccgccgcggcccacgggggcggggttttccccccccccggatcctttggccccgtccctgccctgggggagggccccgctcccggaaaccccccccccccccgtctcggccctccacggcggcctgggcccggggaccaccttgcagaaccacggtttgggctagggccccccctcccaaacccaaaaggcccttttgggggaaaccaccgggtcctagacaaccaggtccggggggtgcaccaggtcctccccttttggtccccggtttgggtggatttggcccccccctggaaatggaatgggccccgtccccttctgggaagaactgcggccctgggaaagctcccccgtggagggcccccccccggaaactgggggggg

SEQ ID NO: 88881 - DNA, 143 bp, Zea mays
  Clone ID: MRT4577_181056C.1
tttggggaaggctgtacccccggcaggacccggcccgacttcccggggaggaccatgccgtccgccacgcagtcgcccgagatagagcaggatgacgccgccaccggcgtgcagccaacttgtaacttactccgctggagcct

SEQ ID NO: 88882 - DNA, 217 bp, Zea mays
  Clone ID: MRT4577_181057C.1
caaggagaacaaacacgacatttcactttacaagagaacgctcctatatcatcgcccgtgttcattcatgcattgcattgcgtatgcacactgtgcgtgcctgcccacaaagtttcgacatacacatccaatcctctatggacttgtaatcgtgtccactccatcgagacatccatcgatgcttgctattatattcgtattccacattatatataag

SEQ ID NO: 88883 - DNA, 160 bp, Zea mays
  unsure (1)..(160): unsure at all n locations
  Clone ID: MRT4577_181058C.1
actgcattctgatgggagttagtaataaacatagtcctataagatacatactacaaggtggggggggggggggttcntaaactaacatatacctataaatcatccaacggcttgacaccatgttcttggcatgtacacatgtgcccacgatgtgcttgat

SEQ ID NO: 88884 - DNA, 285 bp, Zea mays
  Clone ID: MRT4577_181059C.1
gccggccgggccggaaagcgaaaggagagaaggaatccgatccatccaagccaagccaaggcagagaagaagaagaagaggaggaagaagaagcatcggcagcatgtctctgtatctgcgtctgttcatatgcctgatgccgacttgtgctgtatgtagttgcttgaattcagtcgtgttttgctaccgtacccaccccatgcatcatctgtcaccgcgacgcaataatcatagtaataacaagttcagagattgatggaaaaaaaaaaaaaaaaaaggccccta

SEQ ID NO: 88885 - DNA, 347 bp, Zea mays
  Clone ID: MRT4577_18105C.1
gcctcttacactgtaggaccagaataggcctgattcgatgtaagtgatcggctgagtacctaatacgcttgatgagctggtccgtccttgcgtgcacaacatccttgtgtctattgaaccactggctattgatgaggactattacgctcgggttgaatgacggtagatcatctcaaaccttaacagagcacctgggcttgctactataattgctgctatgcgactccacatagatcacattgatgaagatgggataaacaacaatgtgtacggcagccaatgtggaagcttatgctttggatatccgtgacctgtaaccatgcttgaacgcttactgttacagtaag

SEQ ID NO: 88886 - DNA, 220 bp, Zea mays
  unsure (1)..(220): unsure at all n locations
  Clone ID: MRT4577_181060C.1
ccatcgtcgatttcttgtaaacaccaataagaagaaaggcaagtcattgaaatgcacaagtagaccatcgtgccaagcctattccccaaaggagcaaccttgtattccagatggtatagaacttaaatgtagtgtatgggaatccgatattgtagcctttagtaccagatgctcattacatgttgggaactcggtactatatctgattcccaaccagtnc

SEQ ID NO: 88887 - DNA, 228 bp, Zea mays
  Clone ID: MRT4577_181061C.1
gcatcccacccatggtcaggccgacgcgcagcatcatccctgggaacgatcacggtgcagctatacgtggatctcctctcacacaaggtacatcatcagtcccatagcgctgaggcgtcgaacctatcagaagtcgctgtgtccgaagctgaagaagcagtcgctgcaccgctcatcgcaaagcttgaggagaatgtcagtgcagccgtgacagataccgcaatatat

SEQ ID NO: 88888 - DNA, 588 bp, Zea mays
  Clone ID: MRT4577_181062C.1
cattgggtacctcgaggccggccggggtccaggtctgcctgcctataaagtgaaagtgaagccagggaagaggcaaagcgaaaggagagaaggaatccgatccatccaagccaagccaaggcagagaagaagaagaggaggaagaagaagcatcggcagcatgtcggaggggactgccaactgcgtggacatcctgatcgccatcatcctgcctccgctgggggtgttcctcaagtacgggtgcggccacgagttctggatctgcctcctcctcaccttcctcggctacatccccggcatcatctacgccatctacgccatcaccaagaacacctagctagtcatccttgccgacgacgatccatgtctctgtatctgtgtctgttcatatgcctgatgccgacttgtgctgtatgtagttgcttgaattcagtcgtgttcctgttttgctaccgtacccaccccatgcatcatctgtcaccgcgacgcaataatcatagtaataacaagttcagataatcgaattcattcgctgctggaaaaaaaaaaaaaaaaaaaaaaaaagtactctgcgttgttaccactgct

SEQ ID NO: 88889 - DNA, 868 bp, Zea mays
  Clone ID: MRT4577_181063C.1
attggggtaccccctcgagggccggcccggaaaaaaaaaaaaaaaaaaaaaaaaaaaaaaaaaaaaaaaaaaaaaaaaaaaaaaaaagcgaaaggagagaaggaatccgatccatccaagccaagccaaggcagagaagaagaagaggaggaagaagaagcatcggcagcatgtcggaggggactgccaactgcgtggacatcctgatcgccatcatcctgcctccgctgggggtgttcctcaagtacgggtgcggccacgagttctggatctgcctcctcctcaccttcctcggctacatccccggcatcatctacgccatctacgccatcaccaagaacacctagctagtcatccttgccgacgacgatccatgtctctgtatctgtgtctgttcatatgcctgatgccgacttgtgctgtatgtagttgcttgaattcagtcgtgttcctgttttgctaccgtacccaccccatgcatcatctgtcaccgcgacgcaataatcatagtaataacaagttcagataatcgaattcaaaaaaaaaaaaaaaaaaaaaaaaaaaaaaaatatatccaacaaccagcagtgcaacaagcaagatttacctgcccatcgatcatatcgtcaactggtccggcagttcgcgacaccatgagctccacggagtgcggcggcggcggcggcggcgccaagacgtcgtggcctgaggtggtcgggctgagcgtggaggacgcaaagaaggtgatcctcaaggacaagccggacgccgacatcgtggtgctgcccgtcggctccgtggtgaccgcggattatcgccctaaccgtgttcgcatcttcgtcgacatcgtcgcccgacgcccacatcg

SEQ ID NO: 88890 - DNA, 260 bp, Zea mays
  unsure (1)..(260): unsure at all n locations
  Clone ID: MRT4577_181064C.1
ttctttgcttctttcatggagtttcttttcccanatgtatcctaatttttggcctaattcttcttctgatgatcgatttaacctctgatcaaaaagaagaccttggttctatttcatctcttcaacaagtttagtaataagcataacggccctattgttccgatggagagaagaacctataattagcttttcgggaaaatttccaaacgaacaatttcaacgnnaaatctttcaatttcttatttttattatggttcaac

SEQ ID NO: 88891 - DNA, 837 bp, Zea mays
  Clone ID: MRT4577_181065C.1
cgcagcgtgaaagaaagaattggatgctgctgcttagcagcgaaggaagcgggcaggaaggccgtgtggggtccacacctccccggacacccgcgcagccgccgcccacgcttggtccgtcgaccgccggccgatcgattgatggatgcatgcatccaccgtccacgtacgcggcgacgagacgtgttgcgtttgcgtgccaccggactagctagtagatcgctcgactggtatgtagctgtcgccatcccatcgccctccctctcgtccaaggtctgcctgcctataaagtgaaagtgaagccagggaagaggcaaagcgaaaggagagaaggaatccgatccatccaagccaagccaaggcagagaagaagaagaagaggaggaagaagaagcatcggcagcatgtcggaggggactgccaactgcgtggacatcctgatcgccatcatcctgcctccgctgggggtgttcctcaagtacgggtgcggccacgagttctggatctgcctcctcctcaccttcctcggctacatccccggcatcatctacgccatctacgccatcaccaagaacaactagctagtcatccttgccgacgacgatccatgtctctgtatctgcgtctgttcatatgcctgatgccgacttgtgctgtatgtagttgcttgaattcagtcgtgttttgctaccgtacccaccccatgcatcatctgtcaccgcgacgcaataatcatagtaataacaagttcagagattgattcattcgctgctgtactcctcctcgtctcttcagtatgcagtactttattactttccaaaaaaaaaaaaaaaaaaa

SEQ ID NO: 88892 - DNA, 485 bp, Zea mays
  Clone ID: MRT4577_181066C.1
ctgatccacgccagcggtttctgcgagaggagcgctttggtctcagtgatgggttctgacggaaccgggtgcttttggtggcgcagtgttggaacggaggtggaggggccggcggcgaaggggacggcatcgcgacggccaccatcatggtgcttggtgacacctgcacgcgcgggtgtcgattctgcgctgtgaagaccagcaacaaaccgccgccgcctgatcccctggagcctctgaacacggctttggctgttgcaagctgggggtatgatctctagtaatcctgcctggctgatcatctgctgattgtgaactgttaggttctcagaactcgtgattgatcgatgcaattgtaaatttgtaattggtgttaggccctgtttgtttccatagtgctaagtttagcacaacacttttttagtaaagttcatatatggaaccaaacattcatactaaaagggcagtgctgaagtttagcacct

SEQ ID NO: 88893 - DNA, 314 bp, Zea mays
  Clone ID: MRT4577_181068C.1
gcacgagatgaaagctatgttctagtggtcccaagataaaaagtgtagcttgtctttcacaattcaatggtctgatgaaagttcattgtggatactggatattactgcacaaccgttaatcgcacttggttttttttttcatctatacggaaaaatatttaggaataattaaatacctcctggaatcatcaacagctcgctggtctatcccaggtaaatcaatcagctttaatgagggagctgaacaagaagcaggaaaaggactgtgaggatttcataaagcagcacaacaaaataaaaaaaaaaaaaaaaaa

SEQ ID NO: 88894 - DNA, 155 bp, Zea mays
  unsure (1)..(155): unsure at all n locations
  Clone ID: MRT4577_181069C.1
ggngtcctttaccgtttcgcggccccactgcggctgcaccgacggcaccgcgagcgcgaggccttggccggcggctcgcgccagctccccgaccgcggtcatgaactgcgcggcgcccgggccgttggccacggcgtggctgaagcggaagccca

SEQ ID NO: 88895 - DNA, 281 bp, Zea mays
  Clone ID: MRT4577_18106C.1
ggatatatctagtatttttggtgcctatccaaccgatcaggcaaaaattcctacccatccaaccccaaacggagcatgtaaccttcctccacgacaaagaaataggacaggtctccccggccacaaccacggacaaggcacacgtcactacggcgttggttaccgggcctctctaaaggatctgcctaaaaacaggccgcatttgacgtaaataccagccttggagctgacgcccatagaccccagctcctggaccacgggacgtagggtgcaagggacat

SEQ ID NO: 88896 - DNA, 395 bp, Zea mays
  Clone ID: MRT4577_181070C.1
aaaaaaaaaaaaaaaaaaaaaaaaaaaaaaaaaaaaaaatttaaatttaaaaaaaaaaaaaaaaaaaaaagacgaacgagtgaaagcaaacaaccggaaacgccccacccccagcaacacaaagggaaagaaccgcgccgcccccccaacaacgggccccactagaaaaaccccggcccgacccaaaaaaaccgcctaacaagacaacccccactagccacccagcccactacccaaaaagcccgcacccgtcaaaaccccccaacagtaccccaaaaagaaagccgaatgcaacccccccacaaaagggccatcaaacacaaaaaacgcaataatcacgcccagggcgacaaaaacaccagccagaacgcaaacaccccccccccccccctccc

SEQ ID NO: 88897 - DNA, 305 bp, Zea mays
  Clone ID: MRT4577_181071C.1
gctctcacaacattttttcataaggggaccacctttgttgatgaggttaacaaaggcagttataacattcggctccgcaagacagcatcaacacaggcttttgtggacgccttcgttaacctaaaacgcttgcatgcaaaaacatttatatactagtgcaactcgccaccggtacccctcacaccccatccttataaacccgccagtcgtggatagtcgcaaaatctaaaaccctaacctttgttgttgttgccgcgtggtccaccgtccgagccatgtcaaccttgctggcccccacgcgtccg

SEQ ID NO: 88898 - DNA, 435 bp, Zea mays
  Clone ID: MRT4577_181073C.1
acacaagcgccgggggcccacatgaaacacggaaaaccaggacccggacagggggagccaaaaaacacaccgtttaaactaagtaaggaacaaaattaacgacgcaggcaaaaaaaaagaagcgggtccaggataacaggaacacccctctctcaaagaagccccacccccaccaccttttctccctaagtgaaaaactttaactaaccaaaagaaagcactcaccaagggccggaaagggacccattatgggaaaccataaaaaaacccaccccggcagaaaaaaataaaacaggggtgtggttgggaccccagaagcaagctagctcggccccgccccggccggaactacggcaacccaaaaaggggggggggctttttcaccccgctggcccccagggggtcctgggggtccttctttttctggaggggccg

SEQ ID NO: 88899 - DNA, 313 bp, Zea mays
  Clone ID: MRT4577_181074C.1
tttttttttttttttttttagcaaatgaacaaaagtaatacaaattcataattcttacgtttagaataattacaataatcagactaaataaatagtaaaatattcaaatgtataaatagcgaataattctaatgtcaattattgcatgaaaaatatttctcttcagttttctataattcaagaggtataaacaaaaaaacatgtagtttaaggagagacgtgcaaatttcggcccaaaaggcccattcaaatgcgtctttagggtttcccagcccccttttttttttctccttcccagtgcatggggatggcg

SEQ ID NO: 88900 - DNA, 797 bp, Zea mays
  Clone ID: MRT4577_181075C.1
ccggccgggaaaaaaacccaggggtaccagcgggacgtggtcgtgaacttcggcagcgcggcgtcgggcatctcgggcgcgtccatccgcgtgatgcagatggacagcagcttcccgttcggcacctgcatcaacaccaacgtgatccagaacccgggcttcgtggacttcttcgccaagcacttcgactgggccgtgttcgagaacgagctcaagtggtaccacacggaggcgcagcaggggcagctcaactacagcgactcggacgcgctgctcgacttctgcgaccgctacggcaagcccgtgcgcggccactgcatcttctgggccgtcgccaacaccgtgcagcagtgggtcaagaacctggacgacgaccagctcgcgtcggccgtgcgggcccgcctgcagagcctgctcacccgctacgccggcaggttcccgcactacgacgtcaacaacgagatgctgcacggcagctactaccaggaccgcctgggcgacgacatcaacgccttcatgttccgcgaggccgcgcggctggacccgggcgccacgctcttcgtcaacgactacaacgtcgagggcggcagcgaccccaacgccaccccggagaagtacatcgagcagatcagcgcgctgcagcagaaggggcgcggcggtgggcggcatcggcctgcagggccacgtcaccaaccccgtcggcgagatcatctgcgacgcgctcgacaagctcgccaccaccgacctgcccgtctggctcacggagactgtttgtgagcgagtaccgacgtcgacct

SEQ ID NO: 88901 - DNA, 2891 bp, Zea mays
  Clone ID: MRT4577_181076C.1
cggacacgtgggctgaaagctgctaaggttggagatatgaatgttataaagatgctcctgatgggtaatgttgatgtcaatgaagccgactctgaaggaaacacagcacttcactggtgccttagtggtgcttcatgtaccaaggaaccaaggattgtgtggcttctgctcaagaatggcgcaagagttttccaggggaacaaattagggctcacaccagtacacagcgctgcagctaagggcaattacaaagctcttcagtcacttctgcttcatgcccaagattgtgttgatatacctaccaagaccaaagaaacgccattattttttgcagtgaagaatggttctgtggattgtgcaaaacttcttttgcgtttcggggctgataccaaagcccggaacctgagaaagcaaagacctattgatgtggcaacatcccaggacatgcgtttcatccttagctctgcaaatgtgttactattttcagggaaccataactcacctcaaaagaatcgtgtgatgagaaaggaaatttacaaagagcttggtgatgaatttgacgattttgacaaggattcctgtgatgaaagctacactgggcttaagacatcagtagggcaacgtgatttctgctccagtaatctttctgcacaagggcctaagagtaagagccaatatgttccaaaacaagcacaaggttcaaagtttgtgcctcggaataatcattggccgaagcatgattacactcgcaaaatttttgttggaggactcccaccttcagtagactcagaataccttattgaattcttcaatgctgagtttggtcctgtggaggaagcagtagtcatcggcataccaattggcaaccgagttcagtcccgaggttttggctttgtaaaatttgagagagaagaggatatgataagtgcaaaggaagctcatcatgtttacatgcttgggaagagagtggaggtaaaggatgctgttgctagagcatacttgcctttagaagaccaaagatatacttctttgaggcaattcatcaaggagcggccaaagatccacagggtgctggatggtgaactgactgaggaacacaacatccagaagcggcgaccattgccagaaaagtgtcttccatcctggttcgccggattcaggaagtggttacctggatttcttgaagatgaaacagcacgacttagaggagagaggtatccgttgagctccctgaagggtgatttcagagcgacttgcaggatggagcttgatcacaccgcacttggttatcctaagctaagtgactttatccgctccctccctggcatctgcagaatgtgtgtagttcctgttggaagtggacctgcaacgcacatggtcctccttccaccgctctcacgaccgaagtatgtacccctgctagagccttgttcctttgatcatgacgagcttgcagaatcagtatcagatcagcactccccacgatcaccacttaacactaacatcgcggatgactccccacgtaacactgacagccagcagggtgatgatgcatgcagtgagaccaatgttcagatccagcaagttgatgatgcatgcagtgagacttgtgttcagagtcagcatgactatgggaaaagccagcaggatggaagttcctccgacaatggtagcttactggacgatattcctgccagtactacaaagcttgatctgattgagtctgtaacttcagtaaagcctgctttgattgaacctgtacttccaagaaagcctgatctaattgactctgtacctccaagcaagcctgatttggttgagtgtgtacctccaaggcccaaattgattgagtccgggtttcttcctcaaaagaatgaatccgggcctgtacagaagcctaatttgcttggttttggaccttcaagaaatcttgagttgattgagtccaggccttcagcatgcttcattgatagtccttttgaaaggacagcagttactcctagcagctgcgaaggtgaaatgagattctctttcttccagtctcagtgggacaagtacctggcaccatatcccaggagtgactcctgcatcatatgtcgatcttgtgaagctgggatgcaacttgttccctgctttcataagatatgtgttgcgtgcatgatgaggtgcaatgtcagagcatgtatggtttgtggcacttctgtaagtggagttaagtcatcccctgcagtggatgcgacatacagatacatgggactcaccgagcgtgttttagatctgagatgccagttgatggtggtctgccgtggagctgaggcaatagtcagatgctcaccatgtatgcacaccatcgcttgccggggttgcttccttgcctcagtgacactactgaaatcctgcaccacctgtggctgcatggttgaacacttcaagatcgtttgacaagacttatctcccaatacacagtagtattactaagcaatctaaggtatagaataaagcaagcagtcctacgatctgaaggggagatctgattactctcgttcggttttgccacacttgtgggatgcgctaacaggctattttggtagtggtataggcaccctcgctcttgtgagcctgaggtgctctcttttgctccctttctgttcttccgtagaaacactttttcagtatcagacatgctcgatttatatgctattgctatttctgcttctatgagcttgttatggtatggcactagcaagttctcggtaatcttccatgtaaaacccctcatctctgttatatggcactttttctatgtaaacctgtgtaagtactactagtatcaaaaatggatcttttatgcatcaaaaaaaaaaaaaaaaaaactcgagagtacttctaga

SEQ ID NO: 88902 - DNA, 697 bp, Zea mays
  unsure (1)..(697): unsure at all n locations
  Clone ID: MRT4577_181077C.1
tcccgggnccactctactactcgnaattactaccagcagcttgcttcacagtagaagagagcgagaggatggcgtcaccgaagccctcgtcggcggccctgctcctcctggcggcggcggccgtgctggcgctggcgcgcgcggacctgacgcacgacaactgcgtgaagaacaagaaggtgacggtgcagaacctgtgcagggccgctgccccgccgtcggctgcgccatccagggccgctgctccgtgcaccaggtgcccagcggcgactgccgcaacgtccaggagatgaagatcatctactgcaacccgcacgtgtgatgcgatgcggacatggggtcgtcgcgccatctcgcgacctgtgttgtgctttctttcatgtcgccgtcgccgtcgtgtgtccaaccgccattgtcgttaggttgttgttgattagccgtttgcttcgctcagtagcctcgctctccagtgtattatcactcgcatcgcatgcatgtgatgtgagccactgcacgcgtgagtgtcacatgagtcgtcgtcctgtctcgtctcatgtgtttgaaattgtaggcagcagaggatcgagatgcgtgtctgctttgttcgtgttcactgctgtcagtctgtcaccgagttcaataatttagctttgtttcatcgggaaaaaaaaaaaaaaaaaaaaactcgagggagggc

SEQ ID NO: 88903 - DNA, 572 bp, Zea mays
  Clone ID: MRT4577_181078C.1
gccggccgggccggggaaccaagcagtaacattaatcacccactctactactcgaagttactaccagcagctcgccgctgcagggccgctgccccgccgtcggctgcgccatccagggccgctgctccgtgcaccaggtgcccagcggcgactgccgcaacgtccaggagatgaagatcatctactgtaacccgcacgtgtgatgcgatgcggacatggggtcgtcgcgccatctcgcggcctgtgttgtgctttctttcatgtcgccgtcgccgtcgtgtgtccaaccgccattgtcgttaggttgttgttgattagccgtttgcttcgctcagtagccttgctctccagtgtattatcactcgcatgcatgtgatgtgagccactgcacgcgtgagtgtcacatgggtcgtcgtcctgtctcgtctcatgtgtttcaaactgtaggcagcagaggatcgagatgcgtgtctgctttgttcgtgttcactgctgtcagtctgtcaccgagttcaataatttagctttgtttcatcgggaaattggaaaaaaaaaaaaaaaaaaggccccta

SEQ ID NO: 88904 - DNA, 341 bp, Zea mays
  Clone ID: MRT4577_181079C.1
tgcacgcgccgcggacgtaattaaccgcgtggtcgagctgatttttcggcggccgccgtcctttttttttttttttaagaaaggaccacgcacgacatgcctgtttaccctaaatgagggttcaaatcaaaccatgggtcatgatgcaacacgaacaggtgcccaaacaagacgctactcatgacaccaggtggattcagatacttggactagatggacggattcgacaaagttcatgtactactcacgcaggactaagaggaacgcgcaacttacgaagacagtgcaaatgacgcgacatgttatgacgactcaggccgaacaagacaaactgcctaata

SEQ ID NO: 88905 - DNA, 337 bp, Zea mays
  Clone ID: MRT4577_18107C.1
atttatcaggcacatatatgttattcacgaatataggtatatatataataagatatctgtgactaatttttaatgcagatcatcggatgcaatacattatcttatatttgaactttccaattttcatccacggcatgtggtttggtgctgaaattgtttgatgttgttaaagtgatgacattgttgaattatggtaaaaattattgtttagagttgaatgttaaaattatagagggtaggtgggtaacatgtatccgtcggttaatggacaccggtgggtactgatatagatccataactacgagcgtatatggatataaatatgggttgcgtttgg

SEQ ID NO: 88906 - DNA, 384 bp, Zea mays
  Clone ID: MRT4577_181080C.1
tgcttcatggctttctacgactctcgtatttcaatctactgcaactaccgtgcacactctagtcaacgcccgcgggaaggcggaatcagaaattagatctgccctttctctgaccttgtgtatgcctgcgaacagagctgatcctgtacgaactatgacctacttcatctcctgtaacatccacggaagaataagccatgcaaggagtgatcacaaagttcgcggttacatccatggtgatgtggatggccccggttgcaatcggttatcggttttactaaccacacgttaccaactctgacttgcaagtcattctctgtgcaaacactcaccaaaagtcaactgactgtcatatcggttaaaatggtgatactgttaaacata

SEQ ID NO: 88907 - DNA, 780 bp, Zea mays
  Clone ID: MRT4577_181081C.1
gcagcggaaatcttattaccaaattttataagggacatcaagttttacaatgtacatgatcggagtgattacaaaagtgattcaaagaaataactttgaactattataaattatttgtagttttgaaatatatgctagcttaagtgaccatccttaataagaagtatagaagggttacttagacttataagaaggtcgtgtccaccggcgcttaacaccaatcacaatcaagtgactcgtaacctgggataaacagtacgttagtgtttgttagacgtcgatcacttgacgaccatcctttgtcttggcattcgtcagattatccatcttcaggtttgttcatcagcatcaccacgcggagtagcccgcacttggggtcgacttggctcgtcttccgcatcacgcgattaagtatcgtacctcatgagatgcacaatgcacatgtatgagcataaagtaaccgaatgatacagaaaagagaatcaaatacttagcggcaagacatcaacacaatcctacgtaagcactagacacctataactcactaaacacaacaatcacgattttctagttttaccagatttaactcaaacatcaaggaacaataaattatacgcacgtctactttccttagctaaggtccaacaccagaagactatcaaacctagattcatttattaggaaaacaatagaccatataagttccacctttctatttgactaaagcataataccgaaagactaattacttagactcattattttggaacacgaaactcg

SEQ ID NO: 88908 - DNA, 1381 bp, Zea mays
  Clone ID: MRT4577_181082C.1
cagcactgccacacccggacgcgtgctgggattctcgttttaaacccctgacccccatgcatctcgcacgggcacgggccacggttataaataaccacacaccctcaagggctgaaccgaaccaagcagtaacattaatcacccactctactactcgaagttactaccagcagcttgcttcaacagtagaagagagcgagccgaggatggcgtcaccgaagccctcgtcggcggccctgctcctcctggcggcggcggccgtgctggcgctggcgcgcgcggacctgacgcacgacaactgcgtgaagaacaagaaggtgacggtgcagaacctgtgcagccacgacgtgacgctgacgctggagccgctggccaacagcccgccgctgttcgcgggcacctacacgctgcacccgcgcagccacgccgagttccccgtgtgctggtggacggggcgcctgcgcgcgcccgacgccgcccaggtggagttccacgtcggcgtcgacggcggctccttctacctggcccccaacgcgcagccgggccagcgcgtcccggtctccgtcaccccgcacggctcgccgctgcagggccgctgccccgccgtcggctgcgccatccagggccgctgctccgtgcaccaggtgcccagcggcgactgccgcaacgtccaggagatgaagatcatctactgcaacccgcacgtgtgatgcgatgcggacatggggtcgtcgcgccatctcgcgacctgtgttgtgctttctttcatgtcgccgtcgccgtcgtgtgtccaaccgccattgtcgttaggttgttgttgattagccgtttgcttcgctcagtagccttgctctccagtgtattatcactcgcatcgcatgcatgtgatgtgagccactgcacgcgtgagtgtcacatgagtcgtcgtcctgtctcgtctcatgtgtttgaaattgtaggcagcagaggatcgagatgcgtgtctgctttgttcgtgttcactgctgtcagtctgtcaccgagttcaataatttagctttgtttcatcgggaaattgaatggatgtctgttgttgtttaatctatttttaatttttgaataataataataatatagtttattttaaataaaaaaaaaaaaaaaaaaagccgttgctgaggactgcgaacacccagattacgccaagctgctgaaggcactctgcgctgaaaacaatgttcacctggacactggtcctgccgaaaagactcttgactaatgggccgaactttgcaagattgactctgaaagcaaggcaagaaaggttaaacactgctcctgagtcgacatcaaggactacgaaaaaaaatctgaagacctaaacatagagcaagagtatgac

SEQ ID NO: 88909 - DNA, 157 bp, Zea mays
  Clone ID: MRT4577_181083C.1
tgctttttgcccaagcttggacctgctcagaaggagcgttttatctacacgaatggccgattatatcacgaggactctggcttgagcctgacatgacaggggctgccaggggacacgacggataggaataggctcatagcactcgctggacaccaag

SEQ ID NO: 88910 - DNA, 731 bp, Zea mays
  Clone ID: MRT4577_181084C.1
cgtaaaagggtatcaaggaagggtaatcaactttccaaggaaggaaatgcatcaacggtttagcacacaactcctatcacctaatgcatcaaacaaggtgataaagattttaaaatataaggaggtggcaaatgcaccggagcttgcctagaataaacactaggttagtgtttgttaagtggcgatcaacttttgttctaatacttgtttcgtctatccatcttcagttccgttcatcagcaccatcttgtggtcaactcagttctggttctccgtatcacgtggttaattcacgtaccatactaactctgacgcgctatccgcgagcacgacaaggattccagttcggcccttgtgtcgattacttggggaacatcactctgctaactccgtcttcacccgactcttgggattttttgatgacgcacggaacgacgacgaccttcgattgaagtcttcgaccgagcacttgataagcgatgcacacggacctcgcttatttttgcctaacgtccgggattcaggattcgacgaggttgagcagagaagaatgaggttcgacgggcttgacgacgatacgggagggtgacgtatatagagctgcaagtctagcaagctgacgcaagtgacggaagcagcctcgtacgacagcacataggctttgcgtcgacagtctatgggttttgagtgcttcatcgaataggcgggatacgagacacgacatcaacgac

SEQ ID NO: 88911 - DNA, 755 bp, Zea mays
  unsure (1)..(755): unsure at all n locations
  Clone ID: MRT4577_181085C.1
cgggtcacatggggcgtgttgtagatggtgcgattggatttgaagctgacaagttaggatcaccctagtcataacggttgatgcgtcgtgtacgttgtgactcgagaagatgtcaatgagtcctcatgcaaggcgctagatgtagccaatgtcgagacggttgcacagatgatgtgggcacaacgatgagccatgggattaacgaagacacatcaaggcggttgttgtggaagacagccagggccgtcaaagacgtagatgaatacgatgacatagtcggtggagagatgatacaatcaaagcctccaaggatgaaccgtgtgctggggttgccatacccgacaacttgtcgtggacaaatgcacaatacacacactagtgttgtcaatactagatgtataaatagaggggccccaactatgcatcaacgtatgagggactaggagagatggccacttcgataaattgcattgcacatagcgagagattagaagatgccgatgcaacacactattgtcggagtagacgaagtaggtggagttgaggtggcacgctaatgacatggtntttgttagtaaaaaaagttgtacggaggcagacacttctaacttgaaggtagtaggcttgctcggagtgagtagttcagacgtgaggcaccgtgagcgtcgggtagagctccaagttgacgacgaagactcgatcaagaggatgaagaccttgtgtcgacatatggcgcaacaaagatggggacacat

SEQ ID NO: 88912 - DNA, 158 bp, Zea mays
  Clone ID: MRT4577_181086C.1
cccacgcgtccgaccacgcgtccgtccaagcgtccgcggaagcccgtggggctgacggggttccggtgccgctgcggagagctcttttgcggcgcgcaccggaactcggaccggccgggctgcagctacaaatacatggtgagccgcccgggacgcca

SEQ ID NO: 88913 - DNA, 765 bp, Zea mays
  unsure (1)..(765): unsure at all n locations
  Clone ID: MRT4577_181087C.1
cctctggcaaggctttcttcataccacacacacacacacacacacacacacacacacacagaacacagtcgtcgtccgctccgaaatggcctacgcgacgcagcatcggcgccgagccattcttgtcctggccgccatcgccctcctcctggtgtctcccattgcagccgcagccgccgtcgccgccgggtgcgagggcgacaagctccccgcgggccggatctacgcgcactgcgcggcgctcccgtccctcggcgccaggctgcactggacgtacgacgccaagacggggtcgctgtccgtggcgttcgtggccaagccggcgggcgcgggcggcgccgggtgggtgtcgtgggcgatcaacccggcgggcgagggcatgaagggcgcgcaggcgctgctggccctcaagagccccgccgccccctcgtcgtcctacgtagtcaacacctacaacgtgaccgggtacaccgcgctgggcgccgcgtccacgcccatcgcgtacagggccgcggagctcgccgccgacgagagcggcggcggngaggtgcgcatctacgggaagctgcagctggcacccggcctggagaaggtgagccacatctggcaggtgggatccacggtggccaacggcgcgccggtcaagcacgcgttcgacacggccaacctncaggccaagggcacgctcgtnctctccggcgccgngctgcccgtggaggcggcgccggctcccgcccggtgggctctggtggtgcctcgcccgcg

SEQ ID NO: 88914 - DNA, 204 bp, Zea mays
  unsure (1)..(204): unsure at all n locations
  Clone ID: MRT4577_181088C.1
ggaaaccaaatataagcatataacggttgtttttatgtaaatagttgatacccagttgtagagggggattataaactccaaatacatacctaaggtagcatttcaacttatcatacattcaacactttagcaacaggggggctttgcagggggtataagtcaaatatgtacaatatccacanaataggtctaacaggtagggtt

SEQ ID NO: 88915 - DNA, 699 bp, Zea mays
  Clone ID: MRT4577_181089C.1
gtaccctcgggctcgccgggctcctactgtctcacacacacacgcacacagacaactggtttacaaagccaagtgagagctctagcaattcatctagctcggtcggtaggagcgccgccttcattgtcggacggagacgcaccaccgttgtgtaaccaccacaagatggaccaggagcagcccgacggcgagtacgggtactgcgagaccgacggggtcaccgacaccgttgagggtgagtgccagaggcacaagaaggaggacatggagcacagagcacagagcacgtaccatcggccgtaggctcgagcgccatctggcgcctggcgaccttcgcactctacgagaggcacgaggcgactaaggacccctggcacgcgcacaggcacaagatcacggtagaggtcgctgtcgcagcgtgcgcaggtgccggcggctacggatgacacgagcaccaccagaagaagaaggacctccaggacgccgaggaggacagcggagatatgaagcaccaccacctcttaggctgaccgtagcaccggccggcgcgcagaccgagctagctagctacggcgcacacaagcacacacctgtttaattctgtactgcatgcgtgtagaatttgatggtgtcacaataatgagtgcctctacggaccttggtagctgcttgcttgtggtgagtgagagtgtgagactg

SEQ ID NO: 88916 - DNA, 223 bp, Zea mays
  Clone ID: MRT4577_18108C.1
attaacgaagcatcaatgacattaatctgggatttgggcattccattatatcatatctccattatcattgcactgcatacacaaaacaaacatgattctgcaaaccctacattaccaatcacagcttctagtaccatttcccagcatctcatcattaaatgcatgagcatctattaaccaaaaggggggagatttgagaataggaataggaaatcctgaataa

SEQ ID NO: 88917 - DNA, 701 bp, Zea mays
  Clone ID: MRT4577_181090C.1
atttatttggactatctgctgacactgcaaacacggtgaaagctttgcgtgatattactgaaacaggtgttgagcctttgtccctaatgtctcaactcgccacaataataactgacatccttgctggcacctacacattcgcacaggaaagaattcgaagaaaattcttcaaacgtccaaccttatcaaaggaggatatggaaaaactgcgccaggccttgaaaacactctctgaagctgaaaaacagttgagggtctctaatgataagatgacctggcttacagctgctctgctccagcttgctcctgataaacaatatgtactgccaagttcatcgacaagtacaagttttaaccagggtttgcctacataccctgatggggatatagcaaggaactctggtccacatgggttatcaagagcatgtgaccaggaaaatctgcaatacagaaatgctaatctggggatttgttctagccatgtcacggcaaacaattaccatggtggaaggagactcagggaacatacaccagatggccatatgctgtcaacaagtgctaccagaatgaatgaaggatctaaatgtagcaaaactgataacgagatgatttggcaagctgttctagaaaatgttcagtcagattcgttgagaaaaatgatggctaaagaagggacgggtgatctctgttagccttggcac

SEQ ID NO: 88918 - DNA, 404 bp, Zea mays
  Clone ID: MRT4577_181091C.1
ctcgagagcggccttcctctttttttttctttttaacatcaaaccaccaggtggtcttccatttaatcctaagtactttaaaccaacacatccatagtgttagggctaaatagttcaaaagtcaactcaagcaaaagttccaatgttttagcttatcaagtacttgatggcaacatccacacttatgcgggagaggaggcactcttcttgggagcagtcttagtcgcttatctgaagctgctcttgaaacggacaggcacgtggtgcatgtacctcatacttccggtaccagttgttttgcacctgatggcctgtaagactgcaattatacttgcggatgcggggcgcatgctaaccgcaagaggagcaggtactcttctggaggtggaacctgcggcgaacga

SEQ ID NO: 88919 - DNA, 486 bp, Zea mays
  Clone ID: MRT4577_181092C.1
agagaggagctcagatcaggcgcgagcggaccacggtggatggctagagggccagcgagcgctactaccagaacaacgagaacgatgccgggacctgctaatgcacacgccgcccacgtcctcacacaccatggagcgaagttcttcatgctgctcttactctaccagggctagcacgaccatactcttgaccaaggacactgtaagcgccactgtaggaggaaccccaatgacctgcaaacgcacaggcacactcacagttacagacgaggactggcatggggacagacactgtcaccaccactgtggttactgtgatctgcgttctaggatgagccacgcacgcttgcatggacaccgaactgaggagcagcattgctagtgcctaccagagctgttacaagtggccaacaatctcgtgctgctcttactctgaactatggcgttggtgagacgctcgggatcttctaacaaccaatgcctgcc

SEQ ID NO: 88920 - DNA, 679 bp, Zea mays
  Clone ID: MRT4577_181093C.1
actatagcttggactagatctcaaattctcccacagtttcccactcccccgtctcccactctcccccgcagtcccgcacccgccgtcttcccctccctcccccgtctcatattctccatagcagtgcggtgcatgactcgtagcaatccattcccaatcctaaactcgaaagatctcagctccgcctcactgatcgtacgtcacgccatttatgactccccctaaatatcagttgttggggagcaagtacgaaatttcaagaaaatgaattggcctagaaagagggtaataaaggaggatggtggagatgatggagatgaaacagctcatgattgagcccatcattgagacaggttgatgatctgggcgctgctaaaaggaacgcgtcgtccgacgagtcgatgtggtgcgagggcggcgggatgcttcaatgttccgaccaatgacgcagtattagtacgtgtgctggggcggagacgtgttcgacatcgtacacatgcctcaaagataggatcttccgtggcgcgttgaagccctagtaagcgacatcgcgctaagcgatggaataatctgcggagctgtggaacatgatgaaccaggtgaaggtgactgtgcaaaacagcctatacaactctgcgacaagggctactatctggacgatctcgagaaagtccatggt

SEQ ID NO: 88921 - DNA, 212 bp, Zea mays
  Clone ID: MRT4577_181094C.1
acttgacccagcagttaatggaacactctttgttctcggttcatgcatgaaagcggctagtaaaattgtggatgtggcatgctctatggctactacagcctacaacacgaggccaaggactcctgaagtcacactttacctgacatgggttgccgatccaactttctgtgctaccaacaagctatccaatatcatgatcgagaacccctcca

SEQ ID NO: 88922 - DNA, 274 bp, Zea mays
  Clone ID: MRT4577_181095C.1
gctagatttgtattactgttattcacttgacatgatgcaagaaaaggggaggtgcacctaaaggattatatcaaatttttattctcgaatgtgcaagagaactgcacatctttatattaagggggtgtttgcatacaccttgtccttattattcagtggcattactttattgtgtttacatttatacattttctatttatttcatttatttccctatgtttttcctatattttatatatttttaactattttctttatcattgttatttatttt

SEQ ID NO: 88923 - DNA, 154 bp, Zea mays
  unsure (1)..(154): unsure at all n locations
  Clone ID: MRT4577_181096C.1
tcgaggcnncggccgggaaatcccatctcagagattagtcgaagcaacgaggcgccgtcttccccttcacccnctccgggcctccctccaannaactcaaattggggacctagcaagggaagnncagatagaggcngnnaagagtngggataac

SEQ ID NO: 88924 - DNA, 501 bp, Zea mays
  Clone ID: MRT4577_181097C.1
gagcaacagtttatgcactcatccaattattctaacaattgaattaacttgataaagctacaatagcagaacaatgatacaatccattggaaaccgcttagattattaatacgaggtatagaagtacaataggaaataaggtctaaagatttgaaaagaacagaaccccagaaacaagcatctcggtactaattttcactctggcatcaagtcaacgaaactggcagtcacatcaacagtagaacccaaattgacgttcatttctttttactacaatacttatgtaagggcgtcctcatcgtcctcctttttcttcagctcgttcttcgccctgagcagcagggtggttttccaaggatccagacgtgtcatgctatcaaattctttgattgcatcagtgaatttggcaacatccccttcatccatagatgcagcaagatcagctaaaagcttgtattcacgtgtcccagagaaagtcgggtcaatttcctggtatcgctc

SEQ ID NO: 88925 - DNA, 696 bp, Zea mays
  unsure (1)..(696): unsure at all n locations
  Clone ID: MRT4577_181098C.1
gnaaaacaattgaggtaaataacactgacgcggagggaaggctaacacttgctgatgctttggtctatgcttgcaaccaaggtgttgaaaagattattgatttggcaacactgactggcgcttgtgttatcgcacttgggcctagcattgccggggttttcacgccaagcgatgagctagccaaggaggttaccgctgcttctgaggtatcaggtgagaagttttggagactgccactggaggagagctactgggaatctatgaagtccggtgtggctgatatggtcaacactggcggtaggcagggaggttctattaccgctgccctgttcctgaaacagttcgttgacgagaaggtccagtggatgcacatcgacatggccgggccagtgtggaacgacaagaagcgggctgccaccggcttcggcgtttcgaccctggtggagtgggtcctcaagaactcctcgtcatgaacaaaaccccttcggcccttccccacatgttacatgcttttccaagctgccagcggtgaagaaaggtggagagggtttaccatggtttttttccccccttttgtgctaccattccattccacagttgcagccttgcaaactgcagacccgcctcttggcatgccaagtgggcgtgtgtgataccgttgtgatagaataatcatcataaagggtttggactttt

SEQ ID NO: 88926 - DNA, 1817 bp, Zea mays
  Clone ID: MRT4577_181099C.1
aaacctagccccacttatctccgcatacgggcggcaggacggcgtgtcccccaagcggatcggaacctgcgccggtggacctcgcctccgccactcacgcaggaggattccctcctcccgccccatctcggtgggcgacggtgggctcgggccgtcgctgccgttgggctcgaggacgtgggagaatcggcgagggcgagtatcccccgttagacgaggacggatcgaggacgaccgtatgactctagggtgatctcctcgtccacctcctcgacgccaccgtaggtcaacgaggcgtacccgacgtcgttagcgtcgtcgggtgctgcgcccgccgaggtctccggggaaaaaaaaaaaaaaaaaaaaaaaaaaaaaaaaaaaaaaaagtgaaaagcaacctctttggactaaaaaaatccaattttctccgcgacgaaggagaggcatccctcccttccgcgtggtgtgctctctgttccctacgccgtttcctctcccgactctctcctcgccggcgacgccgcggagtaggtgcaacagaaactgctcgaggcggaggcggagcctgcggctgcacagacatgggtgatcacgaggcgcgcggtgatgacttcgagaagaaggcggagaagaagctctcgggctggggcctcttcggctccaagtacgaggacgccgccgacctcttcgacaaggctgcgaactccttcaagctcgccaagaactggagcagagctgcatcagtttacatcaagattgctaactgtcatttgaagggagatagcaagcatgaggctgcctcagcgtacgtcgaggcagcaaattgctacaaaaagttttcacctcaggaagctgcgcaagcgctaaaccagtctgttaatcttttcttggaaattggtaggttgaacatggctgcaagatacagcaaggacattggtgagatatatcagcaagaacaagatttagagaaggctacagattacctggaaagggcagctgacctttttgacagtgagggacagtcgtctcaatcaaacaccatcaaacagaaagttgcagaaattgctgctcagttggaacagtacccaaaagcaactgagatatttgaagcgatcgctcgtcagtcaatcaacaacaatcttcttaagtatagtgtcagaggaattcttcttaatgctggcatctgtcaactatgtagaggtgatcctattgccatcacaaattcattggagcgataccaggaaattgacccgactttctctgggacacgtgaatacaagcttttagctgatcttgctgcatctatggatgaaggggatgttgccaaattcactgatgcaatcaaagaatttgatagcatgacacgtctggatccttggaaaaccaccctgctgctcagggcgaagaacgagctgaagaaaaaggaggacgatgaggacgaccttacataagtattgtagtaaaaagaaatggtacgatatgttttggtttgtgcctccattgcattggaggcatcgtgttccttacaaacgagcatgatgaaattaatcgctggtctggttgtacagaacgtcaatttgggttctactgttgatgtgactgccagtttcgttgacttgatgccagagtgaaaattagtaccgagatgcttgtttctggggttctgttcttttcaaatctttagaccttatttcctattgtacttctatacctcgtattaataatctaagcggtttccaatggattgtatcattgttctgctattgtagctttatcaagttaattcaattgttagaataattggatgagtgcat

SEQ ID NO: 88927 - DNA, 286 bp, Zea mays
  Clone ID: MRT4577_18109C.1
attttactgcatctaatcgctgtggctctatctaataactgcgttgcgttcctgctttcaggtctcggtggagaatactcgacggactccgcaaccggcgtactgtcgacgctgttcgacttgggcggcctcgtggtcggcatcctcacgggccacatctacgaccatgtggacgcccgggctctgacggccgtgagcttcaccttctaggcgattcctgcgctcttcttctaccgcgtctacgggaacctcttgctggcctggaacatcgacctcatgctcatca

SEQ ID NO: 88928 - DNA, 200 bp, Zea mays
  Clone ID: MRT4577_1810C.1
atggttacatttttattttttggtggcccgcccaaattttatctgaaggggataaagctaacccttaacaaaaaaatagggtttgggccaattttagcttctacccttttgttaatcaattagcaacatcgtctggcgtctctgctgtaacctaaacaaaacactgcctgcaccattctttattttcaaaagtttacggc

SEQ ID NO: 88929 - DNA, 891 bp, Zea mays
  unsure (1)..(891): unsure at all n locations
  Clone ID: MRT4577_181100C.1
tttgcgggttccgggcccatttttattccccagcccccttttttttcttttttttttccgtcctttttttttttttttttttttttttttttttttttttttttttttttttttttttttttttttttttgatacacacaaattgaattgtgcggcaatcttatggagcttacaatgtatcgaatgtcacttggtcaaaggggtgcatttaaaaaggtgagtctctccttagtccttaccctctggagagcccagtatttcatgagttgtacacaacagtatttcatgagctgtacacaaattgaaaataaaaatattgtacaagggtgcatttcgtggcatacaaagtcacattgattctagagctcatggttcttgcatatatatcttaacaagatgatggatccatcaacttcacgaatgtagttgtatacttggttggctgtaccaatcacgaactgacaggttccccttgagtcaacatgtagtgtgacactgtagtactcaagattatctgctacgctcatcccatgacccacttctgctataggtcgggtcctcaccagaatcatcacatacaatctcatttctggcaactacatttccatctatgctctcatgaagtcaaacctctctagcgaagtggtggtatgtccatttacttaagtaataataatacggtggtaattgcggcacaatatcgtttttatgggtcacatggattgttcttgggacttgttagccaaggcatacaacaaatgcaggattgcctaaccgaggctgtccaaaagtcatgagctcaacgtcctatgatccgaatttaacatgtaaaaaatgtagagatatcaatgaagccaaccataaatagtncaagggcacaaatgaagctag

SEQ ID NO: 88930 - DNA, 539 bp, Zea mays
  unsure (1)..(539): unsure at all n locations
  Clone ID: MRT4577_181101C.1
caagccttaactatagcattcttctctttgccacactaacaagtgaaattgcattaataatatcttgcttccttctttgcaaacacactgataaatcatttgtatatccaaaaataacaaacattaagtgtgcatcaaaaacaaagtcaaatgactcaaatggctccaagcatagaatgtatccttgtccaatcacttctaattgtagtatcctctccaagaaatcatgagaacatctcggattataggatacatagtaattatgttgcatatagttttgtaataagagccccatcgagtctcaccaggcctaggcaaccccatctcttgattcaatcctctcccagtttcaagttcaccacattcaagtgatttcatgagattctcaagtctagcatctcgaagcataccatggcgcttataagaaactccaacgatattcaataagagagttancttgatcaaaaaaccacacancaatcattatttcccttggcaacacaacaagtactagttggaaggtgatcaatggatataat

SEQ ID NO: 88931 - DNA, 378 bp, Zea mays
  Clone ID: MRT4577_181102C.1
aaatgaaaaaaaaccaagtcggttgctagtacacattgcataggcaaaacacatgcatgtaaacacaaaactccaaatggcacaccatcccaagcggacataactgaacagctatcaataccttcagaaaccatattttgttaaaaaagaatttttacctggaggctagcccccaactaccacttattaccataaaacagcgctttatcgtggaggtaaaataagaatctttttgaatgacaaattgagtccccccatcacctattcaatttggaatcaagcctggacagcccttggtatggcactgcttctacctgaggtaaaagttcaaaaactccttcggtaagaggaaccttcacagtgtgctcgctaaaacca

SEQ ID NO: 88932 - DNA, 177 bp, Zea mays
  Clone ID: MRT4577_181103C.1
gattgatcaacttgaaggaactgatgggattcaccaaggaaatatgcaaaatacaatggatgctgacctatggggacagagagatatactaaaaatggttctcattaccaacactccaggttgatgaaggaaaccatactaactcctggataaaccaagagcagaacggaatttaat

SEQ ID NO: 88933 - DNA, 116 bp, Zea mays
  unsure (1)..(116): unsure at all n locations
  Clone ID: MRT4577_181104C.1
ccgggnatttgtctaggttctttgctgcctagaatggtttaggccattatctctatgtgagagtgggagtgtgggacagatgggagacagaggaagatgaattgcggttgtggaac

SEQ ID NO: 88934 - DNA, 1037 bp, Zea mays
  unsure (1)..(1037): unsure at all n locations
  Clone ID: MRT4577_181105C.1
tttgtcccgaggcgtcctgtccgcttgtggcggtgtagcaatgcaaagctccaagcgcaaggagacggggggatggagcaaacggtgaagcggccgacctcgtgctcccagccgtttccttcttcttccatgccgcgcgctccctcggcgcggggagagatcatcggtgggccgcttgcttgctcagcttcccttgccattcccacccaaccgcgtcgacccgccctagctgcgtgcggtggcgtgacggcggacgccgacgccgggctagctccacctccacgtcgtctcgggtggccctggcagccacgcccacgctggtgatcactctgggacgaacgcagaggggatttttttttttttttgttctttcttttacgcactttgcggagtgcggagagcaggagcaatggtgacttgaatgaggggctgggccaggttcaaaccgtggcctgccatgatgggccggggctgtcgacctgcaccctggagtagcatgatttcgttggacggatcaaatcatatccagtctgattggatgtctgtcgtgcctgcgtatagatagatgcatgctaatagtattaaaataacttattttataactactcatacaacatgtgactttcacatatggagcttgttcggctgccattttcatccanctgcagctgcaaacaaacactgttcctacagcagcaagcagcaggcggctgcagcagctgccactgtagaaactagcagccgaacaagccgccactgtagaaactagcagccgaacaagccgatggtgtcccaatgttatatggccgtgtcatattaaatcaatgttcctctgaaggaaacacagacaatatatgtccaaagcctaaggatatgtgaaaatctacacttatatgtcagggattataagttagaagccttgcggacaaaaaaaaaggttctgagctaggtgattatgtccaagacaccatgtctaggaagaatgatgttcatgatttgaaatctaaatttacttcgtttagcagaaaaaaacattt

SEQ ID NO: 88935 - DNA, 425 bp, Zea mays
  unsure (1)..(425): unsure at all n locations
  Clone ID: MRT4577_181106C.1
ggaggggggggaatctatctccatgtttaataaacctgaataaggtgctcggtttggatcaaaaaaaaaaaaaaaaaaaaaaaaaaaaaaaaaaaaaaaaaaaaaaaaaaaaaaaaaaaaaaaaaaaaaaaaaaaaaaaaaaaaaaaaaaaaaaaggggggggggggggaaaacttttttttatatnnccctaaaaaaaactccgggggggcaggggaaacgcgtgagtgcaccgagccgggagctccaagcgtggggggcgctggagtaaaccgggccccccggaagggggttttatgcccaatttttttaaaagggaaagtctcaaaaaaaaatgggaaaaaaaaaaattttttgggggggaccagtttaaggggaaattttggggatattttaaaaaatggggggtggttgggcgtgttttt

SEQ ID NO: 88936 - DNA, 396 bp, Zea mays
  Clone ID: MRT4577_181107C.1
gactagatgaagatcaagagaaaagacgtgtgaacgagactacgtgagtgtcctatggctgcgacatgcatggccgtctaccgaagcgtgccgacgacctgagccaccagagtcggattgggcttgctgactatcaactgcggcgtcagcatatgaccgcgcgcggggcgacttcaggggcgtacggctagccacaggctcgtgcttctatctggtacttgtgttacgacgcctgagggactacaagcgcgcgaggcccgggtcccaagtcagggcgcagtactagacacgctgtgtggccgatcacctgggtggtgacgcgggccttggcctggatggttgctgcaaggatgccgctggccggcgccgtggccgcggaatgcactctcagcgggg

SEQ ID NO: 88937 - DNA, 857 bp, Zea mays
  Clone ID: MRT4577_181108C.1
ttttaataataattattatatttaattttttataaggggttttttttttagcataagtaaaaaaacgaatgtttttcctttcacttccaagttgcaacaatgctggctggcgtggccaaaccgcagtagtacatgtatttacactggaggattatttaaaatagtgggggtggggagaaaagcaaagaagaaagaaaaaaagaattacgtaaatcttagcccccggattgattcgacaggggaatgaatggatggctagacttgacagtcgttctaaaaaatcctaggacttctttctcagccatctcacttcaccgcctccggcgtccgtccgggccgctctcgtcttgctcgtcgagctgtctgtctccgccgcgttcagctggaaacggaggtgcccagcgcgaagaagtggggaaataataccccacaaaaaacgggggggacgacggcgagatggccggcgcgcgcgcgcgaataggcactaggcaggcacacgggtggtggctggctccggcgagcagggcggcgcgctcaccagacggccttgtcggcggagaagccgcggaggagcggaagcgactcgcctgcggcgccgctcgggaccgccaccgccgcagcgtctgccgcagccacacgatggaccggatcttgctgctgcatttctccatgcccaccgcacgagcgaccgcacgcactcccggtcgccggtcgaggtgcctctagccgcgcggttggattgggaatgggccaatcaatggcgggggttcctggtagtggtgactggtgaggttgaaatgggcacggtggtgggctggtggctggctttttcaggcgggatccagcgcggccggggc

SEQ ID NO: 88938 - DNA, 984 bp, Zea mays
  unsure (1)..(984): unsure at all n locations
  Clone ID: MRT4577_181109C.1
ggtacccccgnggtcattggagccctcgaggccggccgggaccaggagctcacacacacatccaacagcaatggcgaccaccatcaccaggctcttgcaccacctggcgctcttactcctcgttgtccagttcgccgacgcagttttcgtcccaaagaccaagaactacgctgtgctgaagcctcagtcatggggcaccacctacatagtccatgccaacttcctcgccaagccgccccacttcggctccctgaaggagtggtaccgttccatggtgaccacccacgcctcttccactcgggcggcgagctccagcagcatcctgtacacctacgacaccgtcatgcacggcttcgcggtccagcttactggcgacgaggcccggctcatgtccagcgcgcccggcgtgatcggcgtgtacgaggacagggtgctctaccctcagaccacgaggtcgccggggttcatgggcctcgaacccggcaacggcgcctggaagcagaccgacttcggtgacggcgtcatcatcggtttcatcgacggcggcatatggcccgagagcgcgagcttcaacgacagcgggctcggccccgtccggtcggggtggcggggcaagtgcgtcgacgcccacggcttcgacgccaacttgtgcaacaacaagctggttggagccaaggccttcagcgctgctgcggacgccgtggcgggtaggaagagccgtggcgtcccgtccccgagggacaaggatgggcacggcacacacgtggcctctacggccgccggtgctgaggtccggaacgccagcctctacgcgttctcccaggggaccgctcggggaatggcgcccaaggcgaggatcgccatgtacaaggcatgcagcgagaatggctgcatgcatgcggacatcgtagcagcggtggacgctgcggtgaaggacggcgttgacatcatctacatatccctcggacgaagtttttccatagc

SEQ ID NO: 88939 - DNA, 461 bp, Zea mays
  Clone ID: MRT4577_18110C.1
cccgacctataccaatttgaagagacaccgcaaaaaccagcccacggagaaggggcaatcatacttggaacggaggctcacaccacgacgctgccaaaatacagaaccggaccagcggcacaggccaagccaaagagagaactaggaaactcctgcagccacgcacaacaaaccaagcaagcgcgacaacccacctcacgaaccaggcgccacgacagacacaacgagctcgcacatggagtggagccacaacatacaaaggggggagccgatccccaagaagactacagggccgaaggaaacaaacaaacggatcaggcaaacccgccacacatatcgcgagaaacggaggggacataacgtgagactaggcaaccacaaggaactggggagaccctagaaccacttccggagaacaagtgccgggccaaacgcggcggactcctcctgcgagagccaca

SEQ ID NO: 88940 - DNA, 384 bp, Zea mays
  Clone ID: MRT4577_181110C.1
gtccaaaaataatctagattatataatccattggggtaaacaaacaggccctaagtaaacaagattatccttgacaatgaattaactgaagcaaagatcctccactggtgacagggattgcatattacgcttcatgggtatcgtcctcttcttcgccatttgtgccggtaacatgatcagatccatcgccgtcatcccgacttggtcttgttaactaaatgggtgatggcctagctagaatcgatcatgaaggggcttcttctacaggtccccgagagtgatggcccactccggctttgtttgggtacagagggattgaagtgtattgaggtgtattgaaggggattgaaaaaaaattagtttatattacacttcaatacacca

SEQ ID NO: 88941 - DNA, 4127 bp, Zea mays
  Clone ID: MRT4577_181111C.1
aattcggcacgaggaatctctcccacacacactcacacgctgctgccggctgccctcctcccgccccactcgtcccctccgaaccaagcccgatccctccatccccaaatttctcctctcagcgcgtggggcagaggcggcggcagcgagggcgcgcggaccgctacgggcacgggagcagcggtggctgcgcaggcagctgtcagcatgcggcatggtgactacggcagcccaggcggcgccggtgcggatgcagccggcggcgggcgaccgtgaggcggctgcgggagcggagaagtccggtggcgcctgctttgttttgtggtcctatttttgatttgcgaaaggatccaagagagaaaggagggggagaaggcgagaatccaagacaagagcgagcatggagtttgctacgggtgccatgggtaccctcctccccaagctgggcatgctgctgcaggaagaactccacctgaagaataatgtgatggaggggatcaagagcctcactgccgaccttgagagcatgcaagctgtgatcatccgtctcaagaccctatttactggacatgatcctaatctcatccttgacttcagcgtcttcctgcccagggagtgggccatcactctcggggacctgtagaagaagccccttcatgatcgattctagctaggccatcacccatttagttaacaagaccaagtcgggatgacggcgatggatctgatcatgttaccggcacaaattgcgaaaaaggggacgatacccatgaagcgtaatatgcaatccctgtcaccagtggaggatctttgcttcagttaattcattgtcaaggataatcttgtttacttagtcgttgtgcttagtccttgtgtgtatgccacggctgagaccgggtctttcttccttgcatgtagcgttgagtggtggagcttaatttgtttgaagatggtgacgagccagcgaaaaagatcaagacagtctctgttgttggatttggaggactcggcaagactactcttgttaaagcagtctatgacaaggttaagaaggagtttgattgcagtgcttttgtatcaataggtcagaaatgtgatctcaagaaagttttcaaggacgttctttatgatcttgacaagcaaaatcatgaaaatatcattgcatcagaaatggatgaaaaacaactcattgataagctacaggaattccttgcagacaagaggtacttggttgttattgatgacatatgggatatatcaacatggaagctgattagatgtgctttggtggaaagtaaccctggaagtagaataatcataactactcgcatttgtgaagttgccaaaaaggttggtggtgtttacaacaagaaaccactctctcttgatgactccaagacattattctatactagagtatttgctggtgaaagcatgagtcttgataacatatctggtgaagtgtgcaacaaaatcctaagaaaatgtggtggtgtgccattgtccatcattacgatagctagtctgcttgttggtaaacagagggaggactggtctaaggtgtatgattatattggttttgggcatgaagataacgaggttattgggaacatgagaaagatattagctttcagctattacaatctacctccttatctaaagacatgcttattgcacctaagcatatttccagaagatcacaagattgagaaaaattcattgatatggaggtggatagctgaaggttttgttattggcagagaagaactagggttatttgaggttggagagagctatttcaatgagctcataaatagaagcatgatccggtggatagagctctctagtagaagcaagattcgagatggttgtggtattcatgatatggtgcttgatcttatccgcactttgtcaggtgaagtaaacttggtcacggtatcagatgtggagcagcagtgtaccacatcatcatcatattcaccagtcagaagcattagcgctcgaagattagccttccacaaaaaaagaagcattgaacacaaccctggcacagaaataggacaggtgagatcattcaatgctttcaactgctctggtagtaggatgccccgacttttaagcttcagggtcttacgtgtactagctctggagaactgtaatttctcagcaggaaactgttgccttggaaatattggcaaattgcatcagctgaggtacctagggctagtggagacatccattcgtgacgacttgctgcctggagaaacaggacgcctcaagtttctgcagacactagatgtaagacgaagtggcataaaaatattgccagcgtctgttggtgagctaaggaaactgatgtgcctgcgtgctaccgagggcacaaggatgatggccgagattgggaagctggcgtcactggaagagcttgaggtacactctgtggacaagtcgccaaacttcgccacggggctggggcagctaaccaaggtgagggtgcttgagatccatttcgacgaaatggacgagagcacagagaaggctctcatggagtccctgcgcaacctgcggaaaatccagagtctgcagatatggtccaagaaggagaggacaattgaccttggcggcttgttggaagactggacgccaaccccttcagatctccgtcaactgatgctgtgtggcatccatttgcccaggcgtccgtcatggattgatccctcatgtgtcccgctcctctcgtacttgtcgctcacggtccaggccgtgcaagtgcaggatctagaaatcctcgggaggctgccgttgctcagctacctctacatctggagtgagggcatcaactgcttatcctatactgctaccagcagagacgagtttcagaatctgagacatctggacacaaacctggagatcatgtgtggacagcagggagcactgcctatggttgagaagttgacatgccgtgccagcatggggaagtatgttgcctttgccaggagcagcatgcctttcgacgatggcagcgtggtgaatcctgctactgttgctgaggcagaattgccagtaattctacctttggacattggctggcccgtgaacatgccttgcctccggggcatcacctatttgctggattaccaggactgcagtgccaaggagtgggctcatgtggagacattgctcttgcacgtgagaaaaatccaccccaactgtccacccttccgaatcaaaaagaactgcagagacaagaagattaccttgatcgacgcattcagctaccttgaagctgtcaaggatgtgttcaagggcaacccctccaaatactcggagttttttgatctcatgattgattacaagagagacaggtcccttctattgcatgctctcctttcatatcttggcatcgcttgcattgcatgccaagcatgatgtgtccgtttcgttctatcgttaacactataatattcctccttgtttgtttttcttatttatcagaatcaaaatcaaagatgtgatcatccgtctcaagaccctatttactggacatgatcctaatctcatccttgacttcagcgtcttcctgcccagggagggtttgtttggataatctcggattgaaatggattgaggtggtatgtggtgtattgaagtgtaatatgaactaattttttttcaatccccttcaatacacctcaatacacttcaatccctctgtacccaaacaaagccggagtgggccatcactctcggggacctgtagaagaagccccttcatgatcgattctagctaggccatcacccatttagttaacaagaccaaggtttcatttaaacaagctagctagttcttttcatgtactactagttcctaatgcctttgttgtaatttttccagtcgggatgacggcgatggatctgatcatgttaccggcacaaatggcgaagaagaggacgatacccatgaagcgtaatatgcaatccctgtcaccagtggaggatctttgcttcagttaattcattgtcaaggataatcttgtttacttagggcctgtttgtttaccccaatggattatataatctagattatttttggagaattatataatctggattatataatttggatt

SEQ ID NO: 88942 - DNA, 260 bp, Zea mays
  Clone ID: MRT4577_181112C.1
gcctaaaaagattgatattgttaagggagagagcaagctgggttctaaaggcacagcactgaccgttaaacgttagggctggaatgcacccatgatgcgggttacatgcacgatatgcatgaaggctacacatgaagctggatgaatgtcagattaatccagaatctaacttgtgttaagctcgaggaacgaactatgctaccgggtgtacataatcatgagcacaagctatacacgaggacatcgaagaacacaccatt

SEQ ID NO: 88943 - DNA, 2373 bp, Zea mays
  unsure (1)..(2373): unsure at all n locations
  Clone ID: MRT4577_181113C.1
atcagactacagtgcggttggaggaagggaaccggacaaatcaccccgtcgtctcgtcccgtagtcactcgcagagtcgcagtcgcagcccctgcgcccaccgggaccgtgatggagagctgggtccgcgcggtggtggaggccatccactcctctcgctcccagacagtcatctacctcgccggcggtgcatcccaggcgctcggttggctcctctccgtgcccggcgcttcgggcaccgtcctcgaggtcgtcgtgccctactctagggcctccatggcgcagctccttggcaagatgcccctgcaattcactagcaagcaggctgcagaggacatggcactggccgcatacaatcgagcactcaagctttctggaccaggtctgcaagttatgggtgttggatttactgggtcactggcgagctcacgtccaaaacatggtgaccacaggttttatgtgtcaacatggacacataattgtctcaggacatcacatgttaccttgtcgaagggtttacggagtagggaggaagaagacaaggtttcaagctactttttgcttaaggcaatagcagatacctgcagagtttctgcaaccattcagtcagacattcacaaatctgaaattccagaagaaatcatggaacaatttgatgaagatcaagaactccagcaagttattaatgggcaagtttgcatgaaagtatataattttgctgctccggcggaaagtaacttgaacagaaaaataattctgcctggttcgttcaaccccttgcacgatggtcaccttagattgctagaagctgcagtaagcatgtgtgatgatgggcttccattctttgagatatcagcaattaatgctgataaacctccactatctattgcagaaattaagaggcgtgttgagcaatttagaaaagcagggaagaatgtgattatatctaaccagccatacttctataagaaagcagaacttttcccaggaagcgcttttataattggtgcagacactgcagcaaggcttgttaaccctaagtactatggaggagattacaacagaatgctggagatacttctcgaatgtaagagcatagggactacttttcttgttggtggtcgaaagattgaaggagatttcaaggtccttgagaacttagacattccagaagagctgagagaaatgttcatttctattccggaggaaaagtttcgcatagatatttcatctactgaaataagaaagagccaagggctctgatgtatcaagtggtcgtattctacagcagatttgggatgattctccacgactatagaaggtacatttggatgctagcagtcaagtctgaattctccaagcttactttttcacatttgtggggttgtattcacgcattctattgcagattatgataggtccattcatgcatccttgcaaaggaactgttgatgtattctcagggagaatattttatttaacttttgtcttgactgggccccttggtattttgttcagcaaattggaatcaatcctcttgtagaacctcttgatgtcttcactaccccttgcggctaggtggtcaacctctgtctcatatctttggtacaacgctggcaaagtgtgggcgcagagaaatcctgtggatgaaatataagaattgttaaatgtatgtcataactgctttatatattgtcttgccttgttataaaagtcacaattttctgcgctgtaagaacttacaacctctgacactattagcagtgacaagaccaccaggaggaatttcttcagatccttcccgcatgcaatgtcataaagagcagacacggtgtgtgccagtttgtaatggatgatctgtgctatttgtcggaaggcatgctcagagatgatcacttctgggatccttggaggagctatgttcaagaggggcgcagcattcgaccagatgaagacgacgagcatggccaggatggctatctggcaaacgagcggtacaatgctgtactcaactacctcgaacaggtaccataccaacgtggccccagcgagcaggcctgcagacaaattcctgtccttccacagcaagatgtccgcggctgcgagaggcacagataacaacgggggtccatgagtaaaccgggccatgacgcacgcagatggcgtcgcctagctaatagtttcccagaaagaacaagaacagcagagagcagcagcgtacgtacctcgccctccaccgagaagctgatgaatcggcttgcgcctgctatggccgncgccgncgcccacccctcgtncgttgccatgatcgcttggaaaattagggtgcatgatgtctatgtgagttcgggggcgtataacctggtatatatc

SEQ ID NO: 88944 - DNA, 379 bp, Zea mays
  unsure (1)..(379): unsure at all n locations
  Clone ID: MRT4577_181114C.1
gtaccctcgnggttcggcgcggggtgcagattgtgagtccaatcactgtgttacacttgacatcaaaatgaccacacaccaagacagcgccaaggacgttccaaaggagcaccacgtccatcgaactggatcatggcttcccgcagaccatcgccatgtcagggactggatctcagaaatcattgagcatgtcgacaagaacccaaaggaccttcatcctgtcatcaaggagttgagggagctgatcgagaacaacacgagaatctatcttctcgtgaatgctatgttcgaggaaattacaacaaagaaaccttacgccaacgacccggaaggtcacaagcaagtgcgagactaccaacatacgctcgagctctttgag

SEQ ID NO: 88945 - DNA, 326 bp, Zea mays
  Clone ID: MRT4577_181115C.1
ccagataaatcgcacacaaaggatattgtttacactggcactacatcccatggtgaggcctcacacattattaccaaatcatatgcgataaaagacatagctcgttcgatagtcggtggctgtcctacaacgaatagattcatcaaaggggaccacctgcgtgggaacaattggggcttgtagtcgaatgctgcaaccaatacattagccactgtcaatggattatgtgactggtcaacatgccgtaggaacgcaacatatgcggatattgctgcatgatggactggaagaccatgccgcaaatcggctgcaacctgtgctacagc

SEQ ID NO: 88946 - DNA, 461 bp, Zea mays
  Clone ID: MRT4577_181116C.1
ggccgcttttttttttttttttttctttttttttttttttttttttttttttttttttttttttttttttttttttaaaccccccaaaaaaaagtttcacaataaaaatccatacatggactggtgtttgcgcgggggctcaccttcagcagagggctaaccatagaaagaacacgatccgaatttgggttacaaaaaacatccagggctgttacgagcgagatctagctaaactgaaattctgggcctgcctttggggattttccgggcaataaccttgggcccacccttgggggatttacggggaaaaaaaccatgggttcttttccgcttgattgtactgggctggaaaatttttttcgggagcaaccgaaagggggcattaggaacaggatcctcgacgtcgtcgatgaaaaaacggagcgagggaagtccccaggggaaggatatttcgccgggga

SEQ ID NO: 88947 - DNA, 1256 bp, Zea mays
  unsure (1)..(1256): unsure at all n locations
  Clone ID: MRT4577_181117C.1
agcatcactcgatctatcatgttcactggtagatcgtggtaagagtagagtacaaaaaaagaagaaggcaataccacattctcgtgccttttccagtacgcggaaatggaacacgaatgaactgatacggtagtgtatagtatttgccttttcagcagcgcacgcacgcacgtacattgccaccccggggtagcaaatgagaaagacaacgcacgcgtacgacgagttacccttactacccactacacgcgccacgccggtggcgagcggcggtggtggcgggcggtcgttctgggcgctggcggcctgcccgccgccgccggttcccggcctgagacggaggacgctcggccgaccgggctggcacagtcgtcgagcgacgcggcggcggcgacgaacacgtcgtcccagatctcggcgaaggcgcgcaggatggcgtcgtggtggtgcggcgcgttgagggtgaggaagcgccggagcatctcgcgcaggtcctcgcccgccacgatcccgttctccacgatcatctgcagcatcgagcgccggaagtcgcggagcgggtcgtccgactgcttcaccaccgccacgctgccctggagccccgcgcccgcgtcgacgaagcggttctcctccgagtccctgggctcgcccttggccgccctcctctgctgctcgtgccgcagcgccggcggcgagagcttgccctcgcggtcgcggcggtgtcccttccgcgcgccgccccacgacgcgacgctccgctccagctcgccgagctcgcgcagcaggccggagaagctcggcgcggtggcggtgctctccggcaccatccggcagccgccgtccttgtagcccagcccctccaccgcgtcttcccagagcgaggacgccgacgccgacgtcagggtgtccgtcgtcgtcgacgcccacgggttcagcccgccggcgctcgtgcggcgcgtcacggtcgacgtccctgtcgtcgccgactgggacggggacgcggacgcggacacggacaccgacacgctcttggcgtccttgcagccgcacccaagcgcgaaccccgggccgctgccgctgccgttgccgccgtggcgcctcttggccggaacggcagggctcttcatggcgcgtgctcgtgccgctacctcactcaccgagtgtagtgtggtgtggtacagtagccttgggcagaggacagtgggcgtgtatctgggtgtcgtggtaaaaccaagaattacggnccggtcctgcag

SEQ ID NO: 88948 - DNA, 223 bp, Zea mays
  Clone ID: MRT4577_181118C.1
tcccactcgtccgcttttctatagcatgtatcagtccaggactcgttttttttctgtcgagtatccttgcaagttccgactccctcactcatctccgttcgtccgtctcaccgacccctagctcctctccacgccggacacgtccagattctatgcctactactatcgctaacgctcttttatctccgaggctatgcaccatcttcttcattccattctccca

SEQ ID NO: 88949 - DNA, 449 bp, Zea mays
  Clone ID: MRT4577_181119C.1
attcggctcgaggtgactcgttcttcttcgtcgttatcttcttcttttgtatgtctgtgtttgtattttctgtcaccttaaaatgtcttgctgcggtggtaactgtggttgcggaagcgcctgcaagtgcggcaacggctgcggaggctgcaagatgtacccagacttgagctacacctagtcaaccaccaccgataccttggtcatgggagtggcaccagttaaagctcaattcgagagtgctgaaatgggtgttcccgctgagaacgattgctgcaaatgtggagctaactgcacctgcaacccctgcacttgcaagtgaagtgttggatagctaaagcttcaagcagaaatggcccttacaaataatgataaaaactatatgtattttcaaaactccaaaattatgtagtatgtattatgttgcactctgatgttttgtgtctaaa

SEQ ID NO: 88950 - DNA, 354 bp, Zea mays
  Clone ID: MRT4577_18111C.1
gctacctctccgactactgccgcgcgctggtgaccttcgaagcgctcgccgggacagcaagcttcgctcgcacctggttgccgttctgccgcaagcacggcgttgagcctagctgcccggaggcctacttttgccagaagagggacttactcatgaacaaggtgcgtgtggatttcgtccgggagcggcggaaggtgaaaccggagtacgactagttcaaagtcagggtgaactctctgccagaggccatccgccggcgctccgacgcatacaacgccgtcgaggagctgcgcgccaggagaaggcagcaggaggaggccatggtggtcggcaccattcttggagcgttgcctg

SEQ ID NO: 88951 - DNA, 364 bp, Zea mays
  Clone ID: MRT4577_181120C.1
caacaagcaaaataaaaagagcaaaccaaaaccaacaatatatttataatggcgaccaaaatatttttaatgggaattgttcatattaaataaccataaccccccaaccccacaatatttactcaattctaacaaactcctatatcattatccttttccccaataccattcatcaaacaaaacttcaatatgtaaaaacccatctcttcaaccatatcatcaacaacaagcaatagcacaaaacaacatacctttaatacccttttttcatcaatcactatccctatctatttaacaatcatttaaacacaaccatatttcacatcaacattaataactactgctaccttgtatcaaccaaata

SEQ ID NO: 88952 - DNA, 465 bp, Zea mays
  Clone ID: MRT4577_181121C.1
ggggacgccgtcgcctctggccgacggtccgccctagccgactaccgacggaagatgctcagctgtagggagctggcgtcgctcgtcggtaccgtgggagaaagccttagcaatgcacagagggatgttaccaggactgaggaccactcgagatctcgtgggagcgtgcggctgagaattgggagaggactctccgacctctttgttcttgagcgctttatctgcgaaggccgtcggcggaccgggctgtgagggagggctgccggggtgacagatacagagagtgaagagggcttgtgtagctgatgaaagcgctagacttgactaccctgacgtaatgacacactcttatccgtgttgggcgctggcacatgctggttgtaactgagctaactccaagatccagcaggtgaagggttctgtgcttgtttgcagtggacatgtgggggatcttgggatgctctg

SEQ ID NO: 88953 - DNA, 698 bp, Zea mays
  Clone ID: MRT4577_181122C.1
tggtacgcctgcaggtaccggtccggaattcccgggtcgacccacgcgtccgctatgatttgtcacactcacttcagtataatcttaccgtcctgcgaatgcccctggagatgttaaagtcagaaacatccaaggcgtgccaggagagcttcgacatctttgaagatgaaggattaattacacagggtggcagtggtgtatttgggatctctagtgagccttatatgaagtatgtatggaacggtgaacttctggatataattaaaaacactgtgcatcgtgactggctattgtatatcattcatgggttctgcgggcagtccaagcttttgatctatggacgaccagtgtatgtgaccctaatagccaggagatccagtaggtttgctgggacgcgctttctcaagagaggcgcaaactgtgagggtgacgttgcaaatgaggtggagaccgagcagatcctctgtgatgcttctgtgatgtcttttaccgcaggcagttactcttcttacgtacaagttagaggatccgttcccttattctggtcccaagacatctcaactatgatgccgaaaccacccattacactggaccaggcggatccctttgcacacgtggctgctcttcactttgaccagatgctccagaggttcggctcccccatcatcatcttgaacttaatgaaagagagggagaag

SEQ ID NO: 88954 - DNA, 487 bp, Zea mays
  Clone ID: MRT4577_181123C.1
tcgaggccggccgggctgggctccactgcttcctcctccctctagatctcccccccccccacgcagcaaggatcgagatgaggaggagcaagatggattgaagaggaagagaggatcaaggagatgttctacccccatctcttgcagattttcttggggaaaccctaggtggctacactccatatcatgcctagtacatttttcttcttcgatgaaggtgcttgttgctcatccagggaagtgggaagtagcagcacatccaccttcactctcataataacgctgcttaggcgcagtcatgatttaattagaagcttcttgtcaaaggatgtttgtttctaactagttgtgcgcactggttaatttagttcatgctgttatggttgtcttcccattgctagtagattattaatgtcgattatgtgttcttatcatgatatctatttatactttgttgcttcaaaaaaaaaaaaaaaaaaggccccta

SEQ ID NO: 88955 - DNA, 157 bp, Zea mays
  Clone ID: MRT4577_181124C.1
tgtgtgccaagcacgcaatcctgactacattatatttaaatacattgagttcagctcgtcaaaaaaaaattaaaaatatataaagggtggtcgttggaggggattcaaaagtatccaaacttgcttgctgatgttttcactcttttatagtttcact

SEQ ID NO: 88956 - DNA, 439 bp, Zea mays
  Clone ID: MRT4577_181125C.1
acacttggccgcccctctctccttttcccttgggctggctgtcctctcctcccatggcagcccctctccacggcttcctcctccctctagatctccccccgcgcagcaaggatcgagaagaggaggagcacattgaattgaaggggaagagaggatcaaggagatgttcttccccatctcttctgcagaatttctttgggaaaccctaggtggctacactccagatcatgcctagtacatttttcttcttcgatgaaggcgcttgttgctcatcaagggaagtgggaagtagcagcacatccaccttcactctcataataacgctgcttaggcgcagccatgatttaattagaaacttcttgtcaaaagatgttgtttctaactagttgtgcgcactggttgatttagttcatgccgttatggttgtctttccattgcc

SEQ ID NO: 88957 - DNA, 1190 bp, Zea mays
  unsure (1)..(1190): unsure at all n locations
  Clone ID: MRT4577_181126C.1
ggacttttcccccttggctggtcgccccctctcccccattgtagcagccctccatactttttcctccctagatctcccccctcccgacgcaacaaggatcgagaagaggaggaacaagatggattgaagaggaagagaggatcaaggagatgtgctacccccatctcttgcagatttttcttagggaaaaccctaggtggctacactccagatcatgtctagtacatttcttcttcttcgatgaaggcaagtgaatgtagcggtggttgcttccgttctgacctgttatttctattgcctacactctaatattcagaagtattggattctttcataattggactttatggtgatgctttacttgcttgcattatactgatgcttaatcatatattgatgatgattatgattcgagtatgatttatgagattaattcacacccctgaaggtaaatgaagtattatttgaggttggtattgtatctgaaggtaaataaagtattatttgaggtttgtattgtatctgaaggaagtgaaggttattgataaatgcagcatgccatatactntgcatgactcatttgcatctgaagttttttcgaaggcaatggtcatatgcattgcattcatatgcattcattgcggtgatatttgcagatgatgtggttttacaccctcagaggtatgaagacagagtacctacactttgcactcctatgcatacattgaagtgatatttgcaagttttgttgacgcaaggaagtgttatagaacctattgtgttttttcgagaaatgagatggtattggttatattaggactactgagttctatatctacaagtatttctgatcttaattgtgattcttttaaaatgttgattaattcaatttgtggtttaaatatctcatcaaaacaattcgcttgctgagatgttttatatcactcttgcattactcaatgcaggtgcttgttgttcatccagggaagtgggaagtagcagcatatccaccttcactctcataataacgctgcttaggcgcagtcatgatttaattagaagcttcttgtcgaaggatgtttgtttctaactagttgtgcgcactggttaatttagttcatgttgttatgggtgtcttcccattgctagcagattattaatgtcnattatgttttcttatcatgatatct

SEQ ID NO: 88958 - DNA, 1172 bp, Zea mays
  unsure (1)..(1172): unsure at all n locations
  Clone ID: MRT4577_181127C.1
cgggnaaaaaaaaaaaaaaaaaaaaaaaaaaaaaaaatttaaaaaaaaaaaaaaaaaaaagaaaaaaacccttttcccttgggctggctgccctctcctcccatggcagcccctctccatggtttcctcctccctttaaatctccccccgcccagcagggatcgagaagaggaggagcacattcaattgaaggggaaaagaggatcaaggaaatgttcttccccatctttttttgcaaaatttcttggggaaaccctagggggctacactccaaatcatgcctagaacatttttctttttcgaccaagcggcttgttgctcatcaagggaagtgggaagtagcagctcatccaccttcactctcataataacgctgcttaggcgcaatcatgatttaattagaaacttcttgtcaaaggatgttgtttctaactagttgtgcgcactagttgatttagttcatgccgttatggttgtctttccattgctagcaggttattaatgtctattatgttctcttatcatgatatatgtttatattttgttgcttccccatttatgtaattttcaaaggggatgctgtcgaaattttatatatgaatgttagatgtgtagtttagtagcattctgggtgtttgaggatcttggggtgttacatgtacaatggcaccgatgaagatgactttttgtactgcctccgaccggataataaggaaatatttgtatgtcgggagatggcaagaaacataggatttctgaagctcgaagttggtctttcagcaatgtcgaaggatgacctcgcagacagccttgcttacaatagtctgaagggcttaatcttgagcaacactttaagagcacagaaaaatgttgaggatgaaagttgtcaaatagcccttggtaaccttcgttcagaggttatcaaactgagcaatgaagccatagagaaggataaaattctgctttccttggtagacagagttaaggccagagaagccaatnttgttgcccccggcgacccccctagaantgaaattgaaaaattaaagaaaaaacttgtggaaaagaacgtggattttgaggaagctaaagaaaactaagaaataagtgaatgtactagcgcaaggctacaaaaccccgcagattatttttttagaanacccccccccccc

SEQ ID NO: 88959 - DNA, 451 bp, Zea mays
  Clone ID: MRT4577_181128C.1
attcgccctttcgagcggccgcccgggcaggtccacacttggccgcccctccctcctttccccttgggctggccgtcctctcctcccatggcagcccctctccacggcttcctcctccctctagatcttcccccgcgcagcaaggatcgagaagaggaggagcacgttgaattgaaggggaagagaggatcaaggagatgttcttccccatctcttcttgcagaatttcttggtgaaaccctaggtgcttgttgctcatcaagggaagtgggaagtagcagcacatccaccttcactcttataataacgctgcttaggcgcagtcatgatttaattagaagcttcttgtcaaaggatgtttgtttctaactagttgtgcgcactggttaatttagctcatgtcgttatggttacaaaaaaaaaaaaaaaaaaaaaaaaagcttgtacgtgc

SEQ ID NO: 88960 - DNA, 237 bp, Zea mays
  Clone ID: MRT4577_181129C.1
atggcctctagagacttcagtggcggccttggtgcagttggagggacactggggtgtctggccacgggcggtggtggcgtgacgtcgatggcgagcgtgtgcggacgtgcaaacgatagtagaggctcaggtgatacttatagaagagaaaggaggatgaatcaggctccaaatcggcggctatctctggtgattgaaaatccaaatgatagcagagactcgggtgatacttattga

SEQ ID NO: 88961 - DNA, 356 bp, Zea mays
  Clone ID: MRT4577_18112C.1
gtggtcaccatggaccaaaccctacccatacccccggcggcggcgacggcaagcgggccaagctccacccgggggacgcggtggaggttttactacggctgacgggccgagagggaggaccagcatgagacctggcacgcaagagcggcccggtgcaactctatccgaagaagagcgtgcaagacatcggccaggagacgggcaaggactggaaggggctgcgcgtaacagtaaagctcacagttcagaaccgccaggccaaggactacgtcgtgcgctccgccgagcggctcgagatcaacgcgctcaaggagcccgagagggaccggaagaaggtcaagaacatcaagcacagc

SEQ ID NO: 88962 - DNA, 910 bp, Zea mays
  Clone ID: MRT4577_181130C.1
gctggtcgtcctctcctcccatggcagcccctatccacggcttcctcctccctctagatctacccccgtgcagcaaggatcgagaagaggaggagcacattgagttgaaggggaagagaggatcaaggagatgttcttgcccatatcttattgcagaatttcttggggaaaccctaggtggctacactccagatcatacctagtacatttttcttcttcgatgaaggtgcttgttgctcatcaagggaagtgggaagtagcagcacatccaccttcactctcataataacgctgcttaggcgcagtcatgatttaattagaaacttcttgtcaaaggatgttgcttgtaactagctgtgcgcactggataatttagctcatgtcgttatggtttgtctctcccgaaataagaacactagcccggaacagaacaaaaaggcttcgggcagcctcgacccccggccggggtgtagatgcggaaaacttcttaccaaggtcaagccctgaaaaatcaaactggtggtggacttccggatcgtacttagggatttgcccgaactcccggtaaaggtactttatacatgctgggaatgaggggagtagcagcacgtccactttcactctcacaataacgctgcccaggcgcagccatgatttaattagaacttattgtcaaaggaagtttgttttttaactagtcgtgcgcactagttaattcagatcatgtcgtatgtttaacttctctttgctagccgattaataatacttagtatgtttttgtcatgatataagtttatacactgttgccccctcatttatgcaaattgcaaaggggatgctgccgaaattttatatatagatgtcagaagtgttatttagtaccaaaaaaaaaaaaaaaaaatttgcggcc

SEQ ID NO: 88963 - DNA, 451 bp, Zea mays
  Clone ID: MRT4577_181131C.1
ctccttttcccttgggctggctgtcctctcctccatggcagcccctctcgacgatttcctcctccctctagatctccccacgcgcagcaaggatcgagaagaggaggagcacattgagttgaaggggaagagaggatcaaggagatgtttttccccatctcttcttgcagaatttcttgggaaaaccctaggtgcttgttgctcatcaagggaagtgggaagtagcagcacatccaccttcactctcataataacgctgcttaggcgcagtcatgatttaattagaaacttcttgtcaaaagatgttgtttctaactagttgtgcgcactggttgatttagttcatgtcgttatggttgtctttccattgctagcagattattaatgtctattatgttctcttatcatgatatctatttatattttgttgcttccccatttatgtaatttt

SEQ ID NO: 88964 - DNA, 535 bp, Zea mays
  Clone ID: MRT4577_181132C.1
ggccgcttttttttttttttttttatagtattttttttttttttttttttttttttttttttttttttttttttttttttttttttttttttttttaaagaaaataaaagtggcatcatttttttgggtcctgggcccaggataaaacacaagcacatgcttacacacacgtttacttacgatggaggaggaagccccgcttattggggcataaaaagggggcaaacaaacgtacgcgcgcaaaaaagggggggggctggattttactttaacacacccccgcgtagaaaagggggggggacgacaattcgggaggataaaacagccaaaaaaggggggttttttttcgccggcggcctcctgggggtccttggggtccttttttttttcggggggctcggggaagggaaagccgccgggaccaaaggccgccgtcgccagagaccttctccttaattttgggggggggggggggctccgggtctttttttgcccggggcttttagaaaaagtgcgaaggccccgggggaaatgg

SEQ ID NO: 88965 - DNA, 1318 bp, Zea mays
  Clone ID: MRT4577_181133C.1
gactccccattgggttgcagccgccccctccctctcttgctctcctccccattgcagccgccccctaccctctcatggctccctcctccctctagatcccccccacgcagcaaggatcgagaagaggaggggcacgttgaattgaagaggaagagaggatcaatgagatgttcttccccatctcttcttgaagattttcttggggaaaaccctagggtcctacactccagatcatgtctagtacatttcttcttcttcgttgaaggtgcttgttgctcatccagggaagtgggaagtagcagcacatccaccttcactctcataataacgttgcttaggcgcagtcatgatttaattagaagctttttgacaaaggatgtttgtttctaactagttgtgcgcactggttaatttagttcatgccgttatggttgtcttcccattgctagcagattattaatgttgattatgttttcttatcatgatatctatttatactttgttgcttcccggacctaatgttggaacctccccgctcttttgctgttacatatccgggctgtcagaatgcagcatgccatatacattgcatgactcatttgcatctgaagttttgtcgtgacctatggtccgaccgtaccggtacaatttagcatcgtacgttgcccgagaaggggtacgatgcggcttcatacccttagaggtatgaaggcagaggacatatgcattgcattcatatgcattcattgaagtgatatttgcagatgatgtggttttatactctcagaggtatgaagatagagtacctacacattgcattcctatgcatacattgaagtgatatttgcaggtattattgacgcacggaagtgttatagaatctattgtggttgttcgaggaaatgagatggtattggttatagtgggactactgagttccatatctacaagtatttctgattttaattgtgactcttttaaaatgttgatgaattcaatttgtggtttaaagatctcgtcaaaattattcgcttgctgagatgtttcatctcactcttgcattactcaatgcaggtgcttgttgctcatcaagggaagtgggaagtagcagcacatccaccttcactcttataataacactgcttaggcgcagtcatgatttaattagaagcttcttgtcaaaggacgtttgtttctaactagttgtgcgcactggataatttagctcatgccgttatggttgtcttcccattgctagcagactagtaatgtctattatgttttcttatcatgatatctatttatactttgttgcttc

SEQ ID NO: 88966 - DNA, 587 bp, Zea mays
  Clone ID: MRT4577_181134C.1
cggccgggcttgcagaaaaaaaaaaaaaaaaaaaaaaaaaaactctccccaattgggttgcagccgccccctccctctcttgctctcctccctgttggcagccgccccctaccctctccatggctccctcctccctctagatctctccccgcgcagcaaggatcgagaagaggaggagcacgttgaattgaaggggaagagaggatcaaggagatgttcttccccatctcttcttgcagaatttcttggggaaaccctaggtggctacactccagatcatgtctagtacatttcttcttcttcgatgaaggtgcttgttgctcatcaagggaagtgggaagtagcagcaaatccaccttcactcttataataacgctgcttaagcgcagtcatgatttaattagaagcttcttgtcaaaggatgtttgtttctaactagttgtgcgcactggttaatttagctcatgccgttatggttgtcttcccattgctagcagactattaatgtctattatgtttgcttatcatgatatctatttatactttgttgcttccccgtttatgcaattttcaaaggagatgctctg

SEQ ID NO: 88967 - DNA, 155 bp, Zea mays
  Clone ID: MRT4577_181135C.1
gcggaactggatcctttaagcaggtccgggcggagaggactgctgccattttgctatactacctgcaccgtatgagcctcgagatttggacagctacaggtgatgtagagagatagaacgaagatattggtgctcgcattagctttttatgacct

SEQ ID NO: 88968 - DNA, 285 bp, Zea mays
  Clone ID: MRT4577_181136C.1
ctttttaacaagagaactcaagcaattgctgccatgccggggaagccagtccttcacaacttcgatggcagggggagaatggagcccatccggtggctcctggctgcagctggagtagactttgaagaacaatttctgaaaactcgggatgacatggccaggctaaggaatgctaggagtttgatgtgaccagcaagtgcccatggtggagattgatgggatgaagctggtgcagaccagagccattctcaactacattgccaacagatacaacctctatgggaa

SEQ ID NO: 88969 - DNA, 620 bp, Zea mays
  Clone ID: MRT4577_181137C.1
aaaaaaaaaaacaaaaaaaaaaaaaaaaaaaaaaaattttaaaaaaaaaaaaaaaaaaaaaaaaaaaaaaaagagggggccctccgctcttgtgtaaaaagggaacacctcgtttgagaagcgttaaaaaccctttggggggataaaaaccccgcaaccccctaccctctgaaaaactttggtggggaccccctccaaaagtttacccctttttttggggctcattggcacacacaacaaaaaaagcaatctgtggcgccccttactctaaaaggggaacgcgcgccaaattgtggtgcttattcggcccagagggcgccacgggttaaacactttgaaaatattggggttgtgctctaaaccctgtgaaaaagagaaaaagggggttctcaaagtgttttcacaaagtttaaaaaaaaattttctataataacccaaaaaaaactaccccctttttgggaggcccccacgtatcccccagcaaaaaacacaagatccacgggtgctagtgctaaaaaatataaaagtggagcaccccctgaaaaaatagaaaaaattgtgctccccaagatctcctctttcgaggtggagaaaaaacacagctatgcgcgtgagaaaag

SEQ ID NO: 88970 - DNA, 281 bp, Zea mays
  Clone ID: MRT4577_181138C.1
ctgaattccgctccatcatatacaggtgccatgcttgaacgaaaaacaaaaataaaatataaactagcggacctgggttgagacatgctgttgggtgccgaggttgtgtttgtgcctatctcgaaatcttatgcatgtgttgctcccggcgtcagctgatgtggtttattttatggagaggaatttgtgagcctgttctgagaaagaagaacttctgttggcattatcaacgtgtgtggatatatacatgaaagatggggtggattatggtaagtatgcgg

SEQ ID NO: 88971 - DNA, 239 bp, Zea mays
  Clone ID: MRT4577_181139C.1
ggaagaagaaagcatggaaactcaggagtgacattcccttcactccttttcctacccaagggggaagactggagcctaagctgcctgctactgggctttacatggtgacagacatttccgtgggatagggaagatagcaggaagaaaagtaaactccatagaagtgtcattccactgggttttgatattggcttagctgccagtctcccatttgtgacctatgccatccatcgataatg

SEQ ID NO: 88972 - DNA, 899 bp, Zea mays
  Clone ID: MRT4577_18113C.1
atccggaagttctgtgggtagaggactagagactgcagatcgagggtctggcagcgggccgtggcagttgggtgattacgacgaagagagatgggcctcctcgacaagctgtgggacgacaccgtcgcaggcccgcgcccggacaccgggctcggccgcctccgcaagcagcctgtgcgtcccgccgccgtcaagatcagtgatccggccggggacgctgcggcgttcgtgccgccctcgccggcttcgggtagcgaggagacgccggtgaaggtgacgcgcagcatcatgatcaagcaccctcgcacttgtttttgctccttcacaagcatcatctacggtagacagggaggaccggagaagaaagacatcaagaggggaacggggatgatctagtcgcgggttgtcttacctctactgtgatatattatattgtagatatatctgtatggtttccttcctagtatgtggcatatgatgtataataataatacgtcgaacgctcatggtactgtgctgtgtgtgccatgtgcataggggtgggtgcctcagggtcagggattcgtgtgcgctatgccgcagcttggatctcgccgtgggccgtgtcgtgtgtttcctcctgctctgctatgtatgtcatcactgacggtgtgtggaggttgggttcatatatatgcttgtaatgttagctggtttgaggtgtggactacgagagtagttttgttcagtgtctggtatctagtagctgaaggtgtttgcttgaactctgtgaactgtgatgtgggataatgctaagaagatgaatagatgatcgttgggttgtctaaacaaaaaaaagcaaacctaatggttaatggagggccccccttacattatgatcaagccacgcgggagggggg

SEQ ID NO: 88973 - DNA, 351 bp, Zea mays
  Clone ID: MRT4577_181140C.1
agccgcccgggcaagtacgtatcacattgtttcgataaatcttttttaacactgaaatgacagaggaacgaagtgatataaaactgaccttaacatagaatacaagcgatactatgaccagtactatatgtcatttcgttagtcagctgatgggaccttaaacctctactgccagaacaaggaggcgcgctacgtgctccttcttcggagtatggatggccatctgctacggcaaatgggtgcaaggaccaacctagcccttcgggtccctatcaagcatgatcttcaccttggcacccataacaccctgtctgaagaagaacgtgtctcacaactgagtcaaatgttcct

SEQ ID NO: 88974 - DNA, 1091 bp, Zea mays
  Clone ID: MRT4577_181141C.1
aagacgaggatccttgtattcgtttactctcgtactgcaaaaagcatagacagccttctgctgctgaacgtccatctttagaaagtgatcctcctgaacccattcaggtagttcagacagatatggcttcatcatctggttgtgcaaggaccgaaccctataatttacacaggagaaggggccaaaagcagccacaagttgtcgctactgcttctctgaaacgtttatatgtggagaatagacctcatattgtcagtggctactgccaaaacagagtaggcaatacatgcggagaatcaattcaaccgtttggtttgtcagatgctgtgcagcaagaagctattggcaatgtgtcttctatggttgaaaaatatacaatcgtgaaggctacatttaggaagagactaacttttggaaaatcaaaaattcatggatatggtgtctttgccaaggttgcacacaaggccggagatatgatggttgaatacataggggagattgttagaccaccgatatcagacactagagagcggcgaatttacaactcactagtgggtgctgggacatatatgttcaggatagatgatgaacgtgttatagatgccactcgggttggaagtatagcccgtctgatcaatcactcatgcgagcctaattgctattcacgtgccataactattcttggagatgaacacatcatcatttttgcgaaacgggacatagatccatgggaagagctgacatatgattataggttacatcatattggttgggatatgacatgcttgtgtgatatgcttgccagtgcctaaaggcaaattctaaaaaatggttgagtttcattcttgaatcctgataattcttctcattatttgagtggaagacgaatctaattgtataggtacccaatataggatcggcaatccaatttggggacataagttgaatcaattgtcgtgtaccattgaaatgttagttgttacacatatttcggccatttgagatggcctgccatgtgtaatgtaatcgaagtacatggttgcacttttcggtgttgcccatatattatccataacaatatgtagtttcca

SEQ ID NO: 88975 - DNA, 764 bp, Zea mays
  Clone ID: MRT4577_181142C.1
ctaacttttggaaaatcaaaaattcatggatatggtgtctttgccaaggttgcacacaaggccggagatatgatggttgaatacataggggagattgttagaccaccgatatcagacactagagagcggcgaatttacaactcactagtgggtgctgggacatatatgttcaggatagatgatgaacgtgttatagatgccactcgggttggaagtatagcccgtctgatcaatcactcatgcgagcctaattgctattcacgtgccataactattcttggagatgaacacatcatcatttttgcgaaacgggacatagatccatgggaagagctgacatatgattataggtttttttcaagtgatcaacgacttccatgtttttgtggattccccaaatgccgtggagtagttaatgatgttgaggcagaggaacagtcggctaaaatcagagttaagagaagtgaattatttgaaaaaagtgaaaagtaaaggtacatcatattggttgggatatgacatgcttgtgtgatatgcttgccagtgcctaaaggcaaattctaaaaaatggttgagtttcattcttgaatcctgataattcttctcattatttgagtggaagacgaatctaattgtataggtacccaatataggatcggcaatccaatttggggacataagttgaatcaattgtcgtgtaccattgaaatgttagttgttacacatatttcggccatttatcttgttgaacctaccctattttc

SEQ ID NO: 88976 - DNA, 1659 bp, Zea mays
  Clone ID: MRT4577_181143C.1
cgtgcttaaaggatgtaaagagaatggaacctattgatggactgagcagaatcaacaaggaccgttggaaacttgtatgcagcatttgcggagtttcatatggagtttgtatacagtgttctcatcctacctgtcgtgttgcgtatcaccctctttgtgcacgtgctgctgacctttgcattgagcttgaaaatgatgacaaaatccatcacatgtatcttgatgaagacgaggatccttgtattcgtttactctcgtactgcaaaaagcatagacagccttctgctgctgaacgtccatctttagaaagtgatcctcctgaacccattcaagtagttcagacagatatggcttcatcatctggttgtgcaaggaccgaaccctataatttacacaggagaaggggccaaaagcagccacaagttgtcgctactgcttctctgaaacgtttatatgtggagaatagacctcatattgtcagtggctactgccaaaacagagtaggcaatacatgcggagaatcaattcaaccgtttggtttgtcagatgctgtgcagcaagaagctattggcaatgtgtcttctatggttgaaaaatatacaatcgtgaaggctacatttaggaagagactaacttttggaaaatcaaaaattcatggatatggtgtctttgccaaggttgcacacaaggccggagatatgatggttgaatacataggggagattgttagaccaccgatatcagacactagagagcggcgaatttacaactcactagtgggtgctgggacatatatgttcaggatagatgatgaacgtgttatagatgccactcgggttggaagtatagcccgtctgatcaatcactcatgcgagcctaattgctattcacgtgccataactattcttggagatgaacacatcatcatttttgcgaaacgggacatagatccatgggaagagctgacatatgattataggtcagaaggttaagattttgctttttgaccttttgaacatcatagttttgtacaaaatgttgtccatgctttcttcaggtttttttcaagtgatcaacgacttccatgtttttgtggattccccaaatgccgtggagtagttaatgatgttgaggcagaggaacagtcggctaaaatcagagttaagagaagtgaattatttgaaaaaagtgaaaagtaaaggtacatcatattggttgggatatgacatgcttgtgtgatatgcttgccagtgcctaaaggcaaattctaaaaaatggttgagtttcattcttgaatcctgataattcttctcattatttgagtggaagacgaatctaattgtataggtacccaatataggatcggcaatccaatttggggacataagttgaatcaattgtcgtgtaccattgaaatgttagttgttacacatatttcggccatttatcttgttgaacctaccctattttcaaccgttggagctgggaatcggaggggtggtttggttaaatgatttgagatggcctgccatgtgtaatgtaatcgaagtacatggttgcacttttcggtgttgcccatatattatccataacaatatgtagtttcagctgttctgcatttacgaaaatgcattggaagagaaacgtccacttcaactg

SEQ ID NO: 88977 - DNA, 122 bp, Zea mays
  Clone ID: MRT4577_181144C.1
acgcgattgaaccgtgaccgtcatttggctggagaagtggatgataacatgttgagcgggctggtgtgtggtacccctaggcaagagtctaacaatcaactctgacatatgatggagtgact

SEQ ID NO: 88978 - DNA, 293 bp, Zea mays
  Clone ID: MRT4577_181145C.1
ccggccgggaccgcaccaaaacaagtatagagacattaagcgtttaactcgataagctgctggcacccaacccaagagtgacaccatacacatggctgtgcgctagcgtagtctcggtggtggtggctttacttttcgctaatatggttgaggcacagatggccaaggcaaagttcgctgaggagctctgggctcaagcagaagtgcttgttgctgtcgaacgctcccgagggacttagactgccgtctgctgcacctggttcttaaggcggctaggaagtatgggtcaatga

SEQ ID NO: 88979 - DNA, 473 bp, Zea mays
  Clone ID: MRT4577_181146C.1
cggacgcgtgggcggacgcgtacggatgctcagacagtgttcgataagatgccaagaagaaacactattacatggacttcaatgatctctggatatgctcaaagtggctgtggtgaagaagctgtcttgttgttccgcaagatgaagatgcgcagagtatttgttaaccaccttactattgttagtctccttagtgcttgtggctctatgcagtcaatttatcatggaaaagaacttcatgcccagataataaagaattgtatggaagagaatctccagattgggagtacgcttgtttggttttacaacagacgtggggagcatacttatgccacaagaattctagaagcgatgcctgaccgtgatgctgtcgcatggacagctattatttcgggccttaacaatcttggccataatgttgaagcgcttaaatcattggatgaaatgttataggatggagtggtaccaaacac

SEQ ID NO: 88980 - DNA, 122 bp, Zea mays
  unsure (1)..(122): unsure at all n locations
  Clone ID: MRT4577_181147C.1
aggcatgaacccctaaaccagggggcccctctccaggcnnctccctanatggaccctcccgggccctangcccatggtggatttncacttncccngcaacaancngcnngcaggcnnggncg

SEQ ID NO: 88981 - DNA, 2448 bp, Zea mays
  Clone ID: MRT4577_181148C.1
atggagggattcaaggaggcggttcagactgcctggctgaaaccacttcgttcctcctttacacccatgaagcgccttcatatcaaactagtgcgtgcaacaaaggccatcaaactatggcgtaagaccaaagtgggagacatgagattacatcttgaaatttccaaagaattaatcctccgattcgaaactgctcaagaggagcatatgctcacccaagaggaactggatctcctaaaggcactcaaagccagggcactgggacttgctgtaattgaaaaatcgaggatccgtcaacgggctcgcctcactcgcattaggttgggcgacgcgaacactaagttcttccacctatctgctagctccagagcacgaacacttcaaatctcacctagggacaaccccggagagagggatcaccctcaactgccggctctagctttagcgcagcatgacctctcatcgctagaagcgccgttctccctcgaagaaataaaggaaacaatcttctcaatgccgagcgacaaagcaccaggcccggacgactttacaggtttattcttcaaagtatgctgggatatcatcaaggaggatgttcttgaggcttttcaccaacttcatagcatgaatggggcggattttcgtttactcaactctgccaacatcgtgcttatacctaaaaagccggatgctttgacagtgggggactaccgccccatcagtttgatacacaacatcgcaaaaatcttctccaaactgcttgctaaccggctggcccccctcctcaacactctaatctccaagtcccaaagtgccttcatccataaaagatgtatacaagacaacttcctttatgtgcataacgtagttagaagactacacaagcaaaaaaaaccggcgctcttcctgaagcttgacatccaaaaggctttcgacacagttaattggggctatctcctggaagtcctccagaccatgggttttggccctcgatggcgtgagtggatttccatcctttttgggtccgcctcgtctcgagccctcctcaatggccgacaaggagcaaacatccagcacaggaggggggttaggcagggagaccccctttcccctatgttgttcatccttgccattgatccgctgcagcgtatcctggaccttgcagccagaaataggatcctttcccccattccgctaactacaacaaaattgaggacttctctctatgccgatgatgccgctatctttatcaacccctctagagaagacctcctggcggtcaaagacatcctgcacgcttttgactgtgcctcgggcttggtcaccaaccttgagaagagctctatccacccgataagatgtgataacatagacctagaccacgtgctccagccgttccaagggaccagggggaccttcccgtgtcgttacctaggcctccaacttcacacccgggcgctccagaaaattcatgtccaacctctgatcgataaaatccagaaccgtctggccggatggaaaggaagcatgctcaatcgggatggtcgtctcacgcttatgtcttccgtcctgtccgctatgcccacataccacttgtcggtctttcccctcgcgacatgggctcgtaaacgcatcgataggatccgccgctccttactctggagagaaaaggctgaatcaaatggaggccattgtcttgtggcttggccactagtcagcaagcccaaaaccctaggcggtctgggcatcctcaacctcgacaaattcagctgcgccctccggctaagatggctttggaagagctggacgacagatgatcacccttggaaagggtttgatgtgccttgtaaccttgcagacaggctcctctttagcgcctccaccatcgtcaccgttggagatggcaagacagccaaattctggcacgacagttggcttgatggcatggcgccaagaaacctagcaccacacctcttcgagctagtcacaagaaagaacaagtcagttgccattgagatcaatgacgggaattggatcaggtcgttgagagtcaagattacctccacggtgcagatcgaggaattcgtctccctctggtttagactccatgatttgcacctccaaccacaggtgccggactccattgcctggaaatggaaccccgacggtgtcttcacgattctagtttgggagggcttgagcctcctggcccaggctgaccctactcacttctccagcataaaagactggtgggaagctacatcctccccgctcccaaagaaccaaaagcgtgacttcaacggcctcatgatatacaccctgtggaacatctggaaggagagaaaccggaggatatttgaaaacagcgccctcacccctatccaattagccttgaagattaaagaggacgtgtgcactttcaagagagccatgttccttcagtattag

SEQ ID NO: 88982 - DNA, 504 bp, Zea mays
  Clone ID: MRT4577_181149C.1
ggagaaatgagcggttacagattcatgactatatcactagcacctggaccgacaatctcaggtaggccaccgccagcagcctatatggcagtggggcacgtcttcatacctgcggaaggggctggtccatttactattggcacaatagtccgttccagctttgctcccaaagaaatattcctgatggaggatcacccataggctgtaaactcgtcattcatatgcacgccttggcctatctaccagctactgatataactgaaaactgcccgatgtggaataaaaaatgctgcgatcaagatggatctgagagaaataacctatggaagttgcggcgcataccgactgatgccttggcatgggactatagctctggcctgcacatcattacagatatatactcacagactgtaatgtatgatacatcacctgccttgcgggatgcacctgatgtgactgacgaaagtacagtactgattctggctgatccacactgctgatacg

SEQ ID NO: 88983 - DNA, 469 bp, Zea mays
  Clone ID: MRT4577_181150C.1
cggacgcttaggctgacagtcttgtggggagcgcacgatcggagcctgcagacaccaggttacagaggactacatagaagcgtgggtagacttatcgtgcgcattaacggctagcatctaaggcaggcgccggacatgataggggacactgatacacggttaccggaaaacacttccatgctgcgtcttatgaagcactcacggagactagggatcatgccttacgaaattacgacggtgctgatgaatgccatgggaaactgagacaccatccacctatggggcctgcgcttcatggaccaatggaacacagtgcatgtgggggctgaatatagaagactgatcttgaggcatcctatgggattatccatgggggcatacttggtgcgtttcatgaacatgaaaagaaagccagacaagatgatctaacgagagtatacgctggaatatggcactaagataagctaaa

SEQ ID NO: 88984 - DNA, 446 bp, Zea mays
  Clone ID: MRT4577_181151C.1
tggcggtacagcacgtcttctcctgccacgcctcattctacctcgccgtgcgccgccgcggtcgccacgtcctgcgcctccacttctaccccttctcccgcgcccttgcctccgcgcgcttccacgtcggcggcgggggcttcctcctcctccacaacttcaccgcctcgtcccccgtcgtcaaggacttcctgctccccgtcgacgccgacgtcctcgtcctcaccttcgtccccgaggccggatccgccgccttcgtcaacgccatcgagctcttctcggcgcccgacgagctcgtcggcgacatcgccaccctcgcctccgctggcggcgtcaaccgcgccgacgggctatcctcgcaggtcttcgagacgctctaccgggtcaacgtcgccggccgaaaggtcaccccgttcaacgacaaggtgtggtggacatgggtctaa

SEQ ID NO: 88985 - DNA, 1158 bp, Zea mays
  unsure (1)..(1158): unsure at all n locations
  Clone ID: MRT4577_181152C.1
cctcggacgcggatcctcatgtcgatgtccttgaacctggagcgcnccgccagcaggatgggctcgaaggccttgaggcggagcatctccggcctgatgagctcaatcgggacgccgttcaccttgatcagcccgcgccccggcttggtgtaggcgacggccacagccgtcttcttgcggccgaagcactggaccgtgccgggggtcgggcgctggagcacggtagacatgtttgcgaccttgcggggatcgcagaggcggcggcggcgaaggcgggcttcggttgcggtggcttgcgaagatggcggcgtatatcccggccggccggggatccgcacaatgcagtgaaatcactctgcttccttctataaatctaatagaataactccgtcaagaagcaacgagcatagaacaattcaacagaggaagaatcacgcagggagctctcccaattgcatcccaggccaacctcaaccccaaaccaatccgtcgcagacactcaaggtcgcaggatgccgccgccgcgtgagcaccaccagccccaggacgaagaggacgacgataccgcaggcgttgtcaagctcatcagcgccgagggcttcgaattcgttgttgacaggaaggccgccatggtctccaacaccctccgcaacatgctcacatccccaggcggcttctctgagacgcgccagggcgaggtccgcttcccagagatccccaccaacatcctcgagaagatctgccagtatttctattggtcgctccattactccagtgggaaggagacagcggagtttccaatcgaaccggagataaccctggagcttatgatggccgcaaactatctggacacttgatgaggagcctgagggatttgatctgatctgatccgatccagtgtggtctggcacaatgtaatgtaaaggtgggagggaagcagaaaccaaggaatacattttgcaatctacagtgtgtgctactatcaactcttggtagtgttttgttgtctcctgggaggccgtgactgctgctgctgtttgatgtatgtattactttttgctttggacggttccgatggaaaaccgaacggagacgctttgatatattgttgctgaattctgatcgtgtcgctaacnnnnnnnngaannnnnnnnnnna

SEQ ID NO: 88986 - DNA, 538 bp, Zea mays
  Clone ID: MRT4577_181153C.1
cattggtacctcgagccggccggaacttagaatgaagtcatgggcgtcctcatactagtcgtatcatgcgtctactcgtagctccgtcgcaatatcccccccttcttcgatttgtcaccaccgcatggcgtgtcaccgagcttcgacaacactatgcatggaccgcatcgccatccacatcgactacgtttgcttccaatcctataaacgaccgctcgcgagtgcacagcctcgagcatcggtcatttcgcctgatgaccagatgcccgaggagaacatcaatgggcgaggccatgatggtatcaactccttcgtccgtgagagtgaccgtgggaaggacgccccccatgatgtttttggtgaccttgaggcgactgtcatctacgaggagacgactggggactagaaccatctgtgctatccttagtagatgatcattgccaaggaggatgcgacaaaggacttgcctcgcgtggactacaccatagagtgggagatcgtggatatacgggtagactgcatcgggaagattgctgat

SEQ ID NO: 88987 - DNA, 942 bp, Zea mays
  Clone ID: MRT4577_181154C.1
ctattaggtgtacatttttgggcttggaaaaaaaaaaaaaaaaaaaaaaaaaaaaaaaaaaaaaaaaaaaaaaaaaaaaaaaaaaaaaaaaaaaaaaaaaaaaaaagtgccgattgcgaccctcgacgccgcccgggagtcaccagcctcattgcctcaaccccaaaccaatccgtcgcagacactcaaggtcgcaggatgccgccgccgcgtgagcaccaccagccccaggacgaagaggacgacgataccgcaggcgttgtcaagctcatcagcgccgagggcttcgaattcgttgttgacaggaaggccgccatggtctccaacaccctccgcaacatgctcacatccccaggcggcttctctgagacgcgccagggcgaggtccgcttcccagagatccccaccaacatcctcgagaagatctgccagtatttctattggtcgctccattactccagtgggaaggagacagcggagtttccaatcgaaccggagataaccctggagcttatgatggccgcaaactatctggacacttgatgaggagcctgaggggtataatcctagtttgttattaaatatgaaagaacgaagcaatgaatactagtgaatctttccttccattcgtttctttttctttttctttttttttttgcattacatgatgtaaccagcatacgctggatgaaatgcttgttttttcacagatttgatctgatctgatccgatccagtgtggtctggcacaatgtagggcttgttcggttattcccaatacacatggattggacgggattggaaaaaattgtgaagaagtttgacttgtttgggattcaaacccatcgaatcccgctcatccacatggattgagagctaaccgaacaagcccgtaatgtaaaggtgggagggaagcagaaacaaggaatacattttgcaaaaa

SEQ ID NO: 88988 - DNA, 334 bp, Zea mays
  Clone ID: MRT4577_181155C.1
ccatagacactaaggaactggtacctgcagtacggtcggaattcggtcgacacaccacgggacctggcggacgcgtggcggaccgtggcggaccgtgggtgctgctgtcccaactgagcggtaaggacatcaccgagatcattgccgcagctagagagaagtttgcttcagtcccatgtggcggcggcggtgtggctgttgcggcaggtgcacctgctgctggcggactgctcctgcagctgaggcaaagaaagaagagaaggtggaagaggaggggagaagcgatgatgatatgggcttcaagctcttcgactaggttgcacagtcatcacag

SEQ ID NO: 88989 - DNA, 1547 bp, Zea mays
  unsure (1)..(1547): unsure at all n locations
  Clone ID: MRT4577_181156C.1
cattgggggtcgcgagacccgtcggcccacgcgtccgagcttctccttctctctctctccttcctggaccattctctctatctcctttctctctctacacatactcagacgagcagaagcagctagggacaccataggcaaactacttcagcaagaaattaaactatctcctacgcaagatcagaagaaactgtgtatggagcaagaagaggttggcctcgccctgggcctctccctcggctccggccaccaccaccaggagctcaagccccaacatccgtcgcatccgtgtgcggcgttgttggagccttctctgtcgctcagcggcccggcgaccaaggatgatggcccgaccgcaccggtgaggaggttcgctgccgtgaagagggagctgcagacgatggaggggaacgacgacgaggccaccggcagggtacttgtctactcagtggcgtcgtcggcggtggttactgccgacgacgacgaagggtgcaacagcagccggaagaagctgaggctgtccaaggagcagtcggcgctgctggaggaccacttcaaggagcacagcaccctcaaccctaagcagaaggctgctttggccagacaactgaacctgagcccaaggcaagtggaggtttggttccaaaacagaagagccagaaccaagctgaagcagacagaagtggactgcgagattctcaagcgctgctgcgagacgttaacagaggagaaccggcgtctccaccgcgagctccagcagctccgcgccctcagccacccgcacccccacccggctgcctttttcatgcccaccgccgctgccgctgcgctctccatctgcccctcctgccagcgccttgttgccaccggagcatctgccgccgccgcaaccaccgccggtgcagataataagcctaaggcgggcggccccggcggccgagcgccacacgtgttcagccctttcaccaattctgccgcctgctgaacacgcatacatatgtatatacatgcatgcgcacacatacatatatacgtatttttctttagcgctagccacgctctatcattcatcgatggtcatctactagctagatagtaattggttcactagatggcatatattcctgtcccctccccccttaattcattagctttgttttttcacaagctaattaatgaattgatagcggcgtcgcgtgaggacgatggagcaccacgcatgcatatgattctagtagcaaaaacaagagatatatgtcttgtttaatttggtgttgcttctgcttagtatagtgcccactgctggtgctgtagctgtagctttaattagtaggtgttcctgatggatttcctcttgtattagttaactgtcagtcagggaatagtaatgatgacagcatgacaccacatacacatcccagtttatttggatgtggatccatgtatatatgcacatgccacatgacggatctgtttcaacaattaaatactatattgatttgtcttcagaagttttgcatatccccaaccccacaccccggnggtnn

SEQ ID NO: 88990 - DNA, 575 bp, Zea mays
  Clone ID: MRT4577_181157C.1
ccgggttcgacccaccgcgtccgcctgcacacatgccgggccaggtgactccctgcgtggcagtgccaatgccagctgcgcgtttccctgctccacccgtgaggggtgctttgccatgtccacctccaatgtacagacctctcgttcctccaacactcgatacgcagtttcagctacagacacagccatcaagtgagagcatagatgcagcaataggtgatgttttaacgaaaccgtggctgccactgcccctgggactgaagcccccttcagtagacagtgtcatgggcgagctgcagaggcaaggtgtggcaaatgtgccaccagcttgtggatgatccccggggctccatagctagctgcttgtccctgcagtccaacaaaaagaatttgtcgacatgccttttctgtttcaaattttcatgaaccatttatggaccactctctcttagttaacttgttcagggtcagagagcaaaacagtacatcctttcaggtttgagggaaatcaacctgagtacatccaagtacaatgtgccatgacggaataatgaagtcttggccttggcccgaat

SEQ ID NO: 88991 - DNA, 1271 bp, Zea mays
  unsure (1)..(1271): unsure at all n locations
  Clone ID: MRT4577_181158C.1
cctcgaggccggccgggcccctcttctcctctagcttctccttctctctccttcctggacattctctctctctcctctctctctaccatactcagacgagcagaagcagctagggacaccataggcaaactacttcagcaagaaattaaactatctcctacgcaagatcagaagaaactgtgtatggagcaagaagaggttggcctcgccctgggcctctccctcggctctggccaccaccaccaggagctcaagccccaacatccgtcgcatccgtgtgcggcgttgttggagccttctctgtcgctcggcagcccggcgaccaaggatgatggcccgaccgcaccggtgaggaggttcgctgccgtgaaaagggagctgcagacgatggaggggaacgacgacgaggccaccggcagggtacttgtctactcagtggcgtcgtcggcggtggttactgccgacgacgacgaagggtgcaacagcagccggaagaagctgaggctgtccaaggagcagtcggcgctgctggaggaccacttcaaggagcacagcaccctcaaccctaagcagaaggctgctttggccagacaactgaacctgagcccaaggcaagtgggaggtttggttccaaaacagaagagccagaaccaaactgaagcagacagaagtggactgcgagattctcaagcgctgctgcgagacgctaacagaggagaaccggcgtctccaccgcgagctccagcagctccgcgcctttttcatgcccaccgccgccgccgccgcgctctccatctggtcctctgncagcgccttgttgccaccggagcatctgccgccgccggagccaccgccggtgcagaaaataagcctaaggcgggcggccccggcggccgagcgccacacgtgttcagccctttcaccaattctgccgcctgctgaacacgcatacatatgtatatacatgcatgcgcacacatatatacgtatgtggtgcttagcgctagcggctagccacgctctatcattcatcgatggtcatctactagctagatagtaattggttcactagctagatggcatatattcctgtcccctccccccttaattcattagctttgttttttcacaagctaattaatgaattgatagcggcgtcgcgtgaggacgaaaaaaaaaaaaaaaaaaaaaaaaaaaaaaaaaaaaaaaaaaaaaaaaaaaaaaaaaaaaaaaaaaaaaaaaaaaaaagggggggcccgttttaaaagaac

SEQ ID NO: 88992 - DNA, 578 bp, Zea mays
  unsure (1)..(578): unsure at all n locations
  Clone ID: MRT4577_181159C.1
ccggccgggatgatgattgtgactccaacacaccacaacaccatctgctaccgaccaccaatccctgagagagcggaggacggagggcgagcaactggcatgacgccaccctcggcaactcgctgcctgntgttacaagaaggtggaagatgatctcgcacttcactatgcataacctgacctggggtggatttcaccagcggaggacggaccctcatggtccggtcgaccgatcgcacctagctgactaagtgctactactacggactcgaggacgacgcaggtctctggggaggacagggactctatgctgtaccgggatgccatcatgaaagacccatcaaggaggggcagcagcatccttgggatgggcgagaggtacaccccacgcggcgagccaatctctaccaacaagaggcacaacgcgcgtcgagatcttcagcatgacgtgaagacgccgtataggagccggggaatgggatagagcaggaccacacactgctgcagaaggacaccaactggcccgttgtgtggaccatgggaggatctgccggccctcatggcgcttactactgagg

SEQ ID NO: 88993 - DNA, 363 bp, Zea mays
  Clone ID: MRT4577_18115C.1
tttaaccctacccgcgcattatccatggcgatcggggtgcgcgtcctgcgccgcctaccgctccacctttacccctcggtcgctagctctttctgcgcaggttccccggccgccgcctcggccgccccggtgtccgccaaggtcgccgatcgcatagtgcgcgtcctcgccatcgatctcgagggggcgcgccgcgaggtcgggaggctctccaggcagacactccttcgcgcgcttgccaacgcggagattattgagccggtctcccaccgcctcgaggatatcaatgcgcgctacgtcaagaggtaggttcacatacctcaagagtggctctacaagctgccggcacccgttctaccagaa

SEQ ID NO: 88994 - DNA, 244 bp, Zea mays
  Clone ID: MRT4577_181160C.1
accactcgtacgttgacgcgtcccataatgaattaaggcgtggtatcgacgagtacgctgttatacacttccagtattacagtcaggggttcatctgtaagcgcatcagatgaaccttgccaaaagcctgctgtctactggttgggatgtctttagaatccgctcctttagttattgaaacagttatgacggcatgttcttatggtcagctatacagctttgacttgattacaagcttaatgga

SEQ ID NO: 88995 - DNA, 566 bp, Zea mays
  Clone ID: MRT4577_181161C.1
cctgatccccttgtgaccaccctcgtggatcaacatcccagcacgggggactacaagaaggcttacgagcgagggagtactcctgacaggtgtcctttagcaaagacccgtaagacggagctcgaagaaccttcggccagcagagttctctagctaggacttgagtaggaggaggttcgggtaggagagtacacccatcctgtaaagaactaacagacgatcgtggttacgactggtggaactggaatctagaacaaggtttttaaggaggatggggaggatctctagtagtccaagttaacgcgtaaacgccgaaccctctcaacctcctctatcggaacctttgtcgtcttccacactcagaccacagtctgcctaagaactaagaccatcaagaccgctgtaacggtgctccgcacggagttgcctttgtagttgatcgagacgcacagcgtgccaaccaactcgacgcctagaacttagtacctccaggtagacaccatccgggcgcctttccttggtaggtacactcccacttccagtcgtatggtcctcccggagtccac

SEQ ID NO: 88996 - DNA, 128 bp, Zea mays
  Clone ID: MRT4577_181162C.1
gctttggaacaaaatgaggatctaattatttctgattatgaagccgatgtatctgcagcaggagatgcttgatatcatatatgcttggttgatagattgactttgattccagaatatgatagcttgcc

SEQ ID NO: 88997 - DNA, 224 bp, Zea mays
  Clone ID: MRT4577_181163C.1
cacccttatctgtaccaagatctggcagtcgatcagacactcaatggtgcctcattgctgcatactagctgcgatagctggctccaccctataggggcgagtgagctcgatcctccatactgtagctaaccttgctgggagagatggacgaagaattgaaactctaagagcgtgcacacccttaagggcaccattgtcgggttaacccacatgctgtgagagcg

SEQ ID NO: 88998 - DNA, 653 bp, Zea mays
  unsure (1)..(653): unsure at all n locations
  Clone ID: MRT4577_181164C.1
aaaaatatcatggcataagcataatcactccaagcaatattttgttttcagacaaagtattttaaactatgttatttagtatacacgtgcaaaacgctaattataaaccaaaaaaattatgttagatcgcgcttttaatactccaaaaatatcatgataactattatcgaaaacagtttttttacaaagcaatcaaacacctactgttggtagagagagagaaaaaaaactataataacctccaatatgatggttttatcttaaaactcaaaaggtactttgcttagaaacaccgccttaaccttctcgtcgttctcgatgatgaacgcagtgagttctcctgccgcagtccgaaaatgagcgacgagagcagtagtaaaagagagaacgcctcgcaagctgatcctggggatctgagaagaggaagcgtgcattttgctctccaaggtcagcccccgggtgcagctgtccagctggctcccttgtgccccggaaagtgattcgtctgcgacagcgagaacgaagccctcgaatcacaagtgccgagaaggggccatgntggcgcggttagggtcaccaaaagggcggcctattgccgnttggttggctatttntccaaatnaaagcccgagaaaatggagccaattttgctg

SEQ ID NO: 88999 - DNA, 603 bp, Zea mays
  Clone ID: MRT4577_181165C.1
ggagcggggcgcgcaccaggaggcggcggagatactcgggaaccggcggcgagccatggcacgggcggcgggacgaggcggcggcggcccctccaacgcggttctgcgggccgaggtgcggcgtatgagcaggcgcgtggcgaaccgggagagctacgagcggtcggggcgcgcgtacgtgctcgccagcctgagctcgcacgcgcagcagcgcgcgaccacgaggcagctgtccccccagcgtggcgtgctgcaggtgcagccctcggcgggcagcgctgggggtggggacgcgaccaactcggcggcagctgcattcgcacccgcgcaggtggcttgtgtggctgacgacgccggcgatgcggcggcgatgggcttggacgacgcggacttgatggagtttttcggtgtcggcggtggaccggccggaggggcagcgacgtccaacgctgcatcggctgatatggcgtctgacgaggcggcggatgcggatgcggatgcgtcgtcgtacctgaccccggccatgcgcgccatgctgttgcggtcgcggcaggcgcgtgaggcatcgggcgctgagcagcagcgacccaagtgtagtgctga

SEQ ID NO: 89000 - DNA, 316 bp, Zea mays
  Clone ID: MRT4577_181166C.1
agtatcgtgtggttttgtaagagcgttagacaaccggtttagttccgcttttgttacggcggtacttgaacatctagacactagtggtaggcacgcataccttatcgctcagtttacacgtgcgctccgatgctgctgcttcaactgcgtagacctatgtccaagaaccatactacacgaccaagcgatatcacgaccatcggcggtttgtgagatgtcaagatggtgaaggactgagaatctgccaagctgaaggcggagaagaagtgctaggaagacatccatctgcctgggattagcaaagactagcggtcct

SEQ ID NO: 89001 - DNA, 336 bp, Zea mays
  Clone ID: MRT4577_181167C.1
ggctatccagctgcatcacctgaaggggtggaaactatgtatcaccggcttttgcaccttactggtattataacatgacatactgcactaccacattaaagaaaactgggcttatgctgagactctgaacgaacatagttgtcagaaggcatgaccgatacacgtctatctgctaaccatctcgaatttttgtggtagaaatcaagtcgtctcgtataatgcaaagagtccggtcttgctgggatgttcttaacaaaaggctgtcaagaagcctactatctggatggtacatgtgttactgtaaatgaacaaggtccatatcacgtgtactctctg

SEQ ID NO: 89002 - DNA, 364 bp, Zea mays
  Clone ID: MRT4577_181168C.1
tgaccgctcctcttcttctactccttcgcattcacgctccacatgccgacgctggcggcggcggcggcggtggcggcggtggcggcggtggagtcgtagccgcctgaatcagcggtcttgtagtgacgccggaaccaggggcctgagggggaagaagatggcggcgccggcttccgcggcggccgggcgcggcggggccatgtcgtcggacaacgccaagggcctggtcctcgcggtgtcgtcgagcgccttcattggcgccagcttcatcgtcaagaagatggggctcaggagggccgccgactccggcgtccgcgcgggatatggcgggttttcttatttagtggagcctctttggtggata

SEQ ID NO: 89003 - DNA, 1161 bp, Zea mays
  Clone ID: MRT4577_18116C.1
ccggccgggtcttctcgacacgatccggaagttctgtgggtagaggactagagactgcagatcgagggtctggcagcgggccgtggcagttgggtgattacgacgaagagagatgggcctcctcgacaagctgtgggacgacaccgtcgcaggcccgcgcccggacaccgggctcggccgcctccgcaagcagcctgtgcgtcccgccgccgtcaagatcagtgatccggccggggacgctgcggcgttcgtgccgccctcgccggcttcgggtagcgaggagacgccggtgaaggtgacgcgcagcatcatgatcaagcgcccatctcgccgtttgccggcgccggtggtcggttcagaaggaaatcatcgtccgacgcatacgagagggcgaccccaccagggacgaccagccaccctcctccctcggacgtgtgggctgaccgcaccctcgcacttgtttttgctccttcacaagcatcatctacggtagacagggaggaccggagaagacatcaagaggggaacggggatgatctagtcgcgggttgtcttacctctactgtgatatattatattgccgctatatctgtatggtaccgtgctttgccacagcttggatcacgccgtgggccgtgtcgtgtgtttcctctgctctgtttctatgtatgtcatcactgatggtgtgtggaggttgggttcatatgcttgtaatgttagctggtttgtggtggactacgagagtagttttgttcagtgtctggtatctagtagctgaaggtgtttgcttgaactctgtgaactgtgatgtgggataatgctaagaagatgaatagatgatcgttgggttgtcttgtctgtcgtgtgtttcctcctgctctgctatgtatgtcatcactgacggtgtgtggaggttgggttcatatatatgcttgtaatgttagctggtttgaggtgtggactacgagagtagttttgttcagtgtctggtatctagtagctgaaggtgtttgcttgaactctgtgaactgtgatgtgggataatgctaagaagatgaatagatgatcgttgggttgtcttgtcgattgtgcattgtacttaattttttttcacttcctgatataatttcaactcctcaaatatatagcccagtttttttt

SEQ ID NO: 89004 - DNA, 451 bp, Zea mays
  Clone ID: MRT4577_181170C.1
aaaaagtgtttctattattgtttggtatgttacatttcattcaccattttgttttgacaaagaatattacaaacgaaaagaatcatcaaaaaaagaagaggaagaaacatgtagggtttgctgaaactcccaagggccacctgccgaaaaaacgaggaaaacatattgcaagcagagcagttgccaacgagaggaataacaaaaggaggacacggctaaagctgagggcaaactatatatcctgtcagtgagaagcactgctgctgctacggctccgacgacaagcggcaacatactcgtcgtgcgtgtcccgctggggcctgcctgctcttggggagcaaaaaaaccgccccacgtccttttttttcatccagtaagagtctgcacattctctcttgggggctgaggggggaggggtaccttctattatgtcaaactctaccccagctca

SEQ ID NO: 89005 - DNA, 520 bp, Zea mays
  Clone ID: MRT4577_181172C.1
agccgcatcccttctttcttcaccgccgtcgcctgctctctgctgacgtcgacatgaggagaatgcctgacatatggtatcttcagatcaagaacaagacataccccaagttcaactactgccgcggcgtccctgaccccaagatcaggatctacgatgttggcatgaacataaagggtgttgatgtatttcccctactgcgtgctccttgtctcttgttagaaagagaatgcctccactgaggctcttgaaggtgcccgtattgcctgcaacaagtacatgaccaagtctgcaggacatgatgccttccaccttcgaatccggtgtcaccccttccatgtacttcatatcaacaagatgctttcgtgtgctgccgatgatatgctccagactgaaatgaagagcgcctttggctagcctctaggcacctgtgctatgacggacattgcccaggacctcctgtctgatcgatgcaacgcactacaatgctgcacatgccagtgaatctctgcaccacgcc

SEQ ID NO: 89006 - DNA, 368 bp, Zea mays
  Clone ID: MRT4577_181173C.1
aaaaaaaaaaaaaaaaaaaaaaaaaataaattgggccgccccttttaaagatccaaggctagggtccccttccttccaactcattactcctcttttatttcaaccaaattcaattcaattgcccgcgttttacaaccttcttacctggaaaacccctgcctttcccaaattaattcgctttcaacaaaatccccttttcgccacttgccttattaccaaaaaggccccacccatccgcctttccaaccatttccccaccctaattgccaattggaaccccccttttaccgcccatttaaccccgcgggttttgttgtttacccccaggttaaccgttcaatttgcaagccccttacggcccgttcttt

SEQ ID NO: 89007 - DNA, 823 bp, Zea mays
  Clone ID: MRT4577_181174C.1
ggggtacccccgggttcggccgggtgggaccctcgtggccggccgggaaaattccactccgaccctgtgaccacacgctcgcgcgcgcccatggcggcgacctcgccgacgccgacgctggcgaagcctgcagccgccgcgcacgcccgagccccgtccgcgggtcccagacgtgtctccttgacctcctgccgctgccaccgccgccgctctactccgtctcggtggaggagtctcccacgatgcagtcgccgtggtgggaagccggtcgtcacagaggtcatcgacgaggcggcaccggataagggtccggagactgggagcaagggagaggaagagaaggaggccgtagcggggcgcggggcgccggggtggctcaggcttgacggggttgcagcggacatcctcgccatcgccgcgcctgccgtgctcgcgctcgccgcggaccccatcacggcgctcgtcgacactgccttcgtcgggcatatcggttcagctcaacttgcggctgttggtgcatctacttccatattcaatttggtatccaagctgtttaatgtgccgctacttaatgttacaacatcctttgttgctgagcagcaggcaaaggatggcaattcgaacactggaggggaaagagatgaatttttgacgccactagagaaggcaaggcaaccaaagaaggttcttccggcagtgtcaacatccttggctctagctgctggcattggattactggaaatggtagctctgattgttgcatctgggaccctgatgaacatcattggtattcctgttgattcaccaatgcgagcaccagcag

SEQ ID NO: 89008 - DNA, 662 bp, Zea mays
  Clone ID: MRT4577_181175C.1
cattacaggaaataagagatctactggaccaggtaaatgcatgcgacccatatagagttgctgtgacagtggagtcggccttgtttgagaggatcgggcgttccactgggacccacaaggtgaaatacaggtcgatactgttcaacctaaaggcggacaacaaccctgacttccggcggagggtgctgctgggcgaggtgaggcccgggagcctggtggatatgccagcggacgagatggcgagcgacgctcggaagctggagaaccagcagatcaaggagaaggccctgtttgactgcgagcgcgcgtcggcgcccaaggcgtcgacggaccagttcaagtgcgggcggtgtgggcagcgcaagacgacctactaccagctgcagacgcggagtgccgacgagcccatgacgacgtttgtgacgtgcgtcaactgcaacaaccactggaagttctgctgagcgctgctgcggacttgtcggaccgctagcgcgtttttcctgttagtgatgccgtctcagtcttgacaggtaggttgggttggtcctgtttttcgtatgcttaggaggatactgttttcgtctgttgttttttctgtgtttgggaaccctgatttattcagattgtgtactagttgaccgcataaatgttgttggatgaag

SEQ ID NO: 89009 - DNA, 523 bp, Zea mays
  Clone ID: MRT4577_181176C.1
gttgcgataggggcctaccatggtggtgactcccaccgtattccacagtaacgggccccccttccctgcccccaccaccacactacccccttcttcctcatttgtctctagcaaaatagagcattgaccacgagctgttctttctcagcgtcaatggcgcctaggaatggctacacaggagaaggagggagctcagtcatatccacggatctaagccatggcagtgttgaatcaggcgaatctcttcagcccgtccaacctacggccgatgtacctccagaagagattccggatccagagttctttagcatagatacttcctctccacataggtgccatcacgaaatgcgtctagcaagaaaagtggctttcgtctacgcggccacaggcaggaggttccttggatgccctctctcgggacctgataggtgctcctggttcatgtggatagatgaagcatggggtcctgtacttagccgttcattaatacaactctgggatcaggctctcctggactctggaa

SEQ ID NO: 89010 - DNA, 362 bp, Zea mays
  Clone ID: MRT4577_181177C.1
gtaagctcggaattcggctcgttggggtgcccgctagacttcgtggcgacgtctggggcgttactaccctggcggctgttttgaccgcgacggcggcgacgatatcatccggccaagagcccgatccagaccccgggagcaatcctggatatacctgacggctatgactgctgagcctctgaacccaatggctggactgatggaggagcttaagaaagaggacatccagcggcgtctaaactccattagaagactcacgacaattgcacggtctctgggagaagaaagaaccaggaaggagctgcttccctttcttagtgaaaacaatgacgatgaagctgaggcgctatttgcattggctg

SEQ ID NO: 89011 - DNA, 441 bp, Zea mays
  Clone ID: MRT4577_181178C.1
gtataaaagttttctaggccaggaaagggtgacgaaaataaagaagcggatcctggccacccctaaatgtaatcaccatcacaaaggctatgacttgggcctaacgcaagctgaaacacagcacacggggtaaaaagggaatcgccgctaactatgaagcaaaggtacaacagaccggagcaacaaggaaactatgggaagcccaagggaaactgtaaacaaattctgtcatttacagagtcccaaacaagtcgtaattccgttaacacccgctctcaaatgctataaataattgccactacttcccttgtaaaaggcggcaccggaggtacagaagctccagggtgttgtggattgactagggaaagggcgccaatcgggactgcctcccgcgagagggaggtagaaaattgcctcaactggcgatacggacgcttggcc

SEQ ID NO: 89012 - DNA, 1726 bp, Zea mays
  Clone ID: MRT4577_181179C.1
tggtggcctccattgggtacctcgaggccggccgggccgggaccaaacaaacactcgagctaagctcagcctcacacagcctctcctctcgagctagctacagtgctactagcttagaagaagcagcagcttacagctgaagctgcagcaatggcgaaatcttacaccttactgttcgtcgcactggtcgttctggcccttctagtgagccccattgcttgctcccgcaagctcgccaagccgaacaagcccaagccgacccacaagccggcggccagggtcacgcccggcagcaaccacaccggtatccccgcagtgtccgccgcctacggctccggcggctggttgtctgccggcgcgacgtactacggcgccccaaacggcgacggcagtgacggcggtgcgtgcgggtaccagaccgccgtcgggcagcgccccttctcgtcgatgatcgccgccgggagcccgtctctgttcaagggaggcaagggctgcggcgcctgctacgaggttaaatgcgacagcaacccggcatgctccggccagccggccaccgtggtcatcaccgacgagtgccccggcggtgtctgcctcgcagaggcggctcacttcgacatgagcggcacctccatgggcgccatggcgaagcccggcatggccgacaggcttcgcgccgccggcatcctcaagatccagtacaagagggtgccgtgcaagtacagcggcgtgaacatcgccttccgggtggaccagggatccaacccgttctacttggaggtgctcatcgagttcgaggacggcgacggcgacctcagcgccgtccagctcatggaggccgggtgcgggctctggccctacaactccaacaacggcaaggcgctgaaggcgtccttctcgctcacgcgcaactccgtcaaggcccccgtccccgtcgcgctgacctccgactccggcagggtgctcgtcgccaacaacgtcatccccgccggctggaaccccggagccacgtaccgctccttggtgaactactcctgattgatgaactgcggcggcggcgtttcggttctccgccccccattgcatgcgcttggctggattattatgcgtggccaagaagtgctttccagggtgcgtggtgttcaaagaacgagtctcgagtttgttttctgagaagaagaagaaaatgtatgttcgggtgtccgcgagaggcggtgtaagaagaggaggaggacgagaaggttaaggagccgtgcgttcttcactccctccacggtctctgcagtcacctagtgatgtgtgtagtggtcggtgtcggttttttttttcgttgtgatggctcaggacaggagttgggcgttgtatcagtctgtgtgtgtgcgcgcgcgcgcgtagttttctgtaccacgcaatcctttcagagaattgaaatcctgctttcttgtttcagaaaaaaaaaaaaaaaaaaagcggccggtccgcttatagcataaaactgttgctaaggattgaaaatgggggtgctttttatgatatctaaatttacttatgcgtgcattcaacgtgttagtttttttttggtgtcacctaaatatgaattacttggatttggttttacatattgttgtatgtggaatcttttgctttgtctattttatttttttttaaatatatactcattttttcccctttgtttttttggtattagttttcatttttttttattttt

SEQ ID NO: 89013 - DNA, 943 bp, Zea mays
  Clone ID: MRT4577_18117C.1
tactcgcctcggcctggccgggcctttcttctcgacagatccggaagttttgagggtagagcagttgggtgattacgacgaagagagatgggcctcctcgacaagctgtgggacgacaccgtcgcaggcccgcgcccggacaccgggctcggccgcctccgcaagcagcctgtgcgtcccgccgccgtcaagatcagtgatccggccggggacgctgcggcgttcgtgccgccctcgccggcttcgggtagcgaggagacgccggtgaaggtgacgcgcagcatcatgatcaagcgccccgcggggtacccgtcgtcgccgaggagcgcggcaagcacgccgccggcctcgccactggggactacgccgcccatctcgccgtttgccggcgccggtggtcggttcagaaggaaatcatcgtccgacgcatacgagagggcgaccccaccagggacgaccagccaccctcctcccttcgacgtgtgaactgaccgcaccctcgcacttgtttttgctcatctacggtagacagggaggaccggagaagacatcaagaggggaacggggatgatctagtcgcgggttgtcttacctacaatatattatattgccgctatatctgtatggtaccgtgctgtgtgtgccatgtgcatagggtggggtgggtgcctcagggtcagggcttcgtgtgcgctatgccacagcttggatctggccgtgggctgtgtcgtgtgtttcctcctgctctgcttctatgtatgtcatcactgatggtgtgtggaggttgggttcatatgcttgtaatgttagctggtttgaggtgtggactacgagagtagttttgttcagtgtctggtatctagtagctgaaggtgtttgcttgaaactctgtgaactgtgatgtgggataatgctcagatggatagaccatcgttgggttggc

SEQ ID NO: 89014 - DNA, 411 bp, Zea mays
  Clone ID: MRT4577_181180C.1
cacccccccatgaggctagggacgtggcttctggccccccgctccacacggggaggtgcgccaatgcaggggctggcggccaaccgcgcctgtctcatctcgtggtgagcgacatcaagttgttgttcttggtgcagcatcccggcgcacggacgaccattcggccctaaagacccatccagctaccgatcttgccctcagaccgcgaccccaggtcagatcctactacccgctgagtttaagcatatatataaacggatgagaataatcttacgaggattccactagtaacggggagctaaccttgagcagaccatcttgagaatcgggcggcctccccgcccgaattatagtctggagaggcgtcctcatcgaccgaccgatcccatattctatagaaagggactccta

SEQ ID NO: 89015 - DNA, 1322 bp, Zea mays
  Clone ID: MRT4577_181181C.1
gggtacctcgaggccggccgggccgggaccaaacacccctcggtctaagctcgcctctgcctcacagccgccttccgatcgagctaccagtgcgtagctcaaaactcaaaacgagaagcaagaactcagtagcaatatatggcgaagtcttgcaccttactgttcggcacagtactggtcgtgctcttgcttctagtgagccccattgcttgctcccgcaagctcgccaagccaacaaacaagcacaggccgagacacaagccggcggcagtcagagcccgcagcaaccacactgccaccccctcggtgtccgacgcctacggctccggcggctggttgtccgccggcgcgacgtactacggcgcacccgacggcgacggcagtgacggcggcgcgtgcggctaccagaccgccgtcgggcagcgtcccttctcgtcgatgatcgccgccggtagcccgtcgctgttcaaggagggcaagggctgcggcgcttgctacgaggttaaatgcgacagcaacgctgcatgctccggcaagccggcgaccgtggtcatcaccgacgagtgccccggtggcgtctgcctcgccgaggcggcccacttcgacatgagcggcacctccatgggcgccatggcgaagcccggcatggccgacaggcttcgcgcctccggcatcctaaagatccagtacaagagggtcccgtgcaagtacagcggcgtgaacatcgccttccgggtggaccagggatccaacccgttctacttggaggtgctcatcgagttcgaggacggcgacggcgacctcagcgccgtccacctcatggaggccgggtgcggcacgtggaccccgatggtgcagaactggggcgcgctctggcgctacaactccaacaccggcaaggcgctgaaggcgcccttctcgctccggctgacctccgactccggcagggtgctcgttgccaacaacgtcatccccgccggctggaaccccggagccacgtaccgctccttggtgaactactcctgattgatgaactgcggcagcggttcggttctccgccccccattgcatgcgcttggctggattattatgcgtggccaagaagtgctttccagggtgcgtggtgtttaaagaacgagtctcgagtttgttttctgagaagaagaagaaaatgtctgttcgggtgtccgcgagaggcggtgtaagaagaggaggaggaggacaagaaggttaaggagccgtgcgttcttcattccctccacggtctctgcagtcacctagtgattgtgtgtagtgggttcgtgtcggttttcttttttcgt

SEQ ID NO: 89016 - DNA, 360 bp, Zea mays
  unsure (1)..(360): unsure at all n locations
  Clone ID: MRT4577_181182C.1
ccggacagccccgccccnccccccnncttttttnttttntcnnaaaccaaaacggaaggagggcccgggtggcaacagcaaaccnggaaaaaccccaacccaaccanngaaaaaaaccagagacaaccaaaccacgcggaaaaaaaaccagcgacagacaacagaggcnccagaaaaagcacncacaaagacgaccagcacgcaaaagggcaaagaaaaccggggaacccaccggcacaccaccagnagaacaggagcacaaccacaaaacgaggaaacgggccaacaaagnngaaaaaacgaaaagcaagagaccccgaaacagaggaacgnccagacaagcaagaggccggaccaaag

SEQ ID NO: 89017 - DNA, 357 bp, Zea mays
  Clone ID: MRT4577_181183C.1
attcggctcgaggagatgccaaggcagccttttttttgatatctaattgccctactttgggtcatcattatgcaaggacagagggattctatggagcatttcgctgatgtcttcggattcgacgatgcatcaaggtcaagcatccttgtgatggatcaccagacatattggaataatgctcttggatcactataatcacataatcttcaaggttatgagatgcctcacattgatgccaccatgccatatgctaatgaaccacagctagatggtacatctcttggttatctgggaattaagcgaagcaagctcaagtgccagtgcactaaactatggcagatctaataatgtcaaaac

SEQ ID NO: 89018 - DNA, 2565 bp, Zea mays
  unsure (1)..(2565): unsure at all n locations
  Clone ID: MRT4577_181184C.1
gtcacttngagggagcagaggtctcacgatattggaggttgcangaaaagatccagaaatctggactgagagaccttacaacaagtaagacaccagaggcatctgtatctgcggcattgtcgagagacactaagctttttgaaagaacagcaccttcgacatattgtgttaaaactccttacagaaaggacccagatgactctgaggctgtgttgtcagcagcacgtgaaaaaatcagggtttttcagaatacactttcagagtgtgaagaagtggagaaggatgtggatgaggctatgagggatgaggattctgaatgtgatgatgctactgatgacgctgatggtgacgacgtgaatattgagggcaaggatgccaagtctcctctagttggagctcaatatgacacacaaattacagtagttggtgatgtaaagaaagaatcaaacagtgtgatgaacatatcagtgccaccaagcattcaaattaaatctagtgcaagtgtaccgttgcatactttagacagtaaagcaagtagttcaactgacccacaagttggagatgatgataaagacactgagatagatgaaagtaaccaaggggagtcctgggtacaggggttagctgagggtgactattgtgatcttagtgtggacgaacggctcaatgctttcgttgcgcttattggtgttgccacagaaggaaattctatccgtgcaattctggaggaacgcctagaagcagcaagtgctttgaaaaaacaaatgtgggctgaggcacaacttgataagaggcgttcaagggatgactttactagtaaggtgcagtatgattcttatgtgggtatgaaggttgatacagatcaaaaaaataatgctgctgaaagtacccttacaccagtgcatgaccctattaaaaacaataacggaaatgccaatttgatgaacaatggtttgcttgttgataagcagaaccagcttattactggtgatgtatttcatcaatggaatggtgtaagccgagaatcgagtactaacgccgaaagcttgtctgttcagcaatatgcttcatctgagaaaactcgatctcagttgaaatccttcataggtcacaaggcagaacagctatacgtgtacagatcgctaccccttggacaagatcggagacggaaccggtattggcagttttctgcatcttcatcatcctatgaccctggttcgggaagagtcttttttgaatctagagatggatattggagggtcattgattcatctgaggcgtttgaagctttggtatcttcccttgatactcgtggcatccgtgagtcacatctacactcaatgttgcaaagtatcgagccaacttttagggaagctgttgagaggaagaagtgtgttagtttagaacacacaactgggtggactgacaatggaagtaatgaaagtccaaactgcaacaatgagtttggaagtccatgcagtaccctttctggtgttgcttctgataatcttatggcatattcagatactttcaagatagaaattgggcacaacgaagctgagaaaagttctatctcgaaaagggcttctgtgtttctgaaatggatgtggagagagtgctactgtcaccaatccacgtacaccatgaaatatggaaagaagcggtgccctgagttgattcaatcttgtgaccattgctaccagatatacttagctgaagaacaacactgttcttcttgtcacaagtcattcaaacccattcacaatttcttggagcacttatcacaatgcgaagataatcagagaacaaatcctagttggaagacacaaattgtgggcctttctgtacccgtaggattgagattgctgaggttgctcttagctaccattgaggcttcagtaccggcagaagctctcctacctttttggacggatttgtatcgaaaatcttggggtgtgaagttgtattctgcatcatctgctgaagaagtcttgcagatgcttagtgtgctggaaagtgcaataaagcgagattacttatcatctaattttgaaacgacaactgagttgcttaattcaaacacacaagatgctacccagaattcagttggaggttctggatctgccactatacttccatgggttcctgacaccaccgctgctgtcgccttaagattgttagacttggatacttccatctcatacaaacttcattcaaagttggtttcaaataaggagcaagaagctggagatttcatgaagcttccactgagatacccttctattaataagaacaaacaagaaatagaacagttcatacctattggttttgatcaacaggatggaacattgctaactaacagcaatggccgtagaggtcgtggacggggaggtagaggtggacggggaagtagaggaggtagcaggggaggtagttctcgtggtggtggtggtagggttcccaggggtattggtagctcatccaggattcagttcagggatgacaatagtgtgccctatgggagagccgctcgaaagaatgtacgtggtgggcgtacccgtggcc

SEQ ID NO: 89019 - DNA, 2020 bp, Zea mays
  unsure (1)..(2020): unsure at all n locations
  Clone ID: MRT4577_181185C.1
gccggccggtttccgagtggggtatnaggagataatataagcataaccctatctccgcccagtgaggaggcggcacgcgcgcgccgtcgaccacgcccatgccgaaatctgcctctgtgggctgtggctgccggacgagcaagcgccacgcgcgcgccgtgcctgccatgagccgtcagtccgcagtccgcagtccgcagccacacttttgctaaaccctagtaaagatacgatacgaagcgcaaacgcttgcctcatcctcgaattcgccatggcgatgcccaccacctcgtccgcttccccatgccaggcaccgtcgcccgccgggctgcccatttcccctggcgcccgcgctaccatcctctccttcagccgccgcctccgccgcccccatggcgccatcatttctgcgcccactggttgcctgtttcttggtcttcccaagtcgtgctgttctatcacagcctttggtgatgtggcagcggtttctgatgattatgtagaaagctcgccctcaagcagtggatatctgaatagtactatggatgcttcatctcatgaagataatcaatcagaaagggttgctaaaatgaaccaaaactccagagccaataacaaaatgatcaaaatatgtgataagttaattggcgtattccttgtggataaacctacaccaacggattggagaaaattactagcttttagcagggaatgggacaacataaggcctcatttctttaaacgctgccaggaaaaagcagatacagagctgaaccctgagatgaagcacaatcttctcaggcttggtagaaaacttaaagagattgatgaagatgtacagaggcataatgaacttcttgaagtagtaaaatccacaccatctgataaacttggttctattgttgctaagcggcgtaaagatttcacagtggaattcttcaaccacctttactatgttgcagagtcttgtcatgatgaaccagaaaagcaaactgagttggcaaagcttggaaatgattgtgtagatgccctacaagctcatgatgatacaacagggagtcttgaagctttgaatgctgcagaattgaagttaaaagatatacttaattcaccttcggtggatgctgcttgcagaaagatagatgacttggctgagaaaaaagaactggactctgcactagtgttgatgctttcaaaagcttggtcagctgcaaagggcactgacatcacaaaatctgaggcaaaggatataatgtttcacctatatatgactgcggtggcgaatctccagagacaaatgccgaaggatataagaatactgaagcatcttataatgatagaggatccagaagaacggtcaagtgcacttaatgacgcttttactcctggccctgaacttcaaggggacaatgttgatacattatacacgagtccagaggcgctgcacacttgggcaagagctatagttgatgcatattataacagcagagaaggcactctcattgggcaagcaagagacatgatgaatcctaaaatcattaagagagtcgaagagatagtgaagataatcaaggacaagtacctttaagttttggtcatcataaaatgggggtttaacatttctactgattgtacaagtcttgtgcgatgatggtcttttacaggctgctcccgtcaaaactactgccatcgttccagttggaactcctcagcactgacgaaacaatcagtgtttaaaggaaatgcaagttgttgtaactcattacaatgagaaggtgtttgtagcatgtggtatcagtttagctgctacatagatattagcggagtacttgtagctgtcctgactctaacagtgttgtaactgtactagtatcgaaccaggagacatgtatgtgtccaagcattcttgtaatgagctagtgatctcaaacaattttacggcttatgctgaatcaaaacatttaagggcttgttcggttagctcctaatctatatggattgagtggaattgggtgggttt

SEQ ID NO: 89020 - DNA, 482 bp, Zea mays
  Clone ID: MRT4577_181186C.1
caagacaaccacaaaactctcactccaaaactctcaattttgccttcctttgatcgaatactacaatggcgtctgtatctgcaattggagttctcaaggtacctcctgcttcgacttccaattccaccggaaaagccacggaggcggttcccacgaggactctttctttctcctcctctgttacttcatccgacgacaagatttcactcaaatccaccgtctcccgtctttgtaaatctgttgttcgcaggaatccgatcatcgtctctcccaaagccgtctcagattctcaaaactctcaaacttgtctcgatcctgatgctagcagcagtgttttggggataatcttaggaggtggagctggaactcgtctttatccacttacgaagaagagagcgaaaccagctgtgcctcttggtgctaactataggcttattgatattcctgtgagcaactgtttgaatagcaacatatcccagatc

SEQ ID NO: 89021 - DNA, 228 bp, Zea mays
  Clone ID: MRT4577_181188C.1
tcgtacggctgctcttctagcttatctcttcgcttcctcacccaatgtggccatgaccggaccggtacatatagtcctgcatgtctacatagcacctcatatgtccaacttaagccaggcattgatcagaacatctttacacctgcgatagactctgagtcgcccaccgttgcataaactcgtctccttctcctcaatacaaatgcgttccacgagctctacaagccc

SEQ ID NO: 89022 - DNA, 259 bp, Zea mays
  Clone ID: MRT4577_181189C.1
cacccttatttttaatattttttttttttttttgcacccatggggatccattacattgcagttattacaatacatcccgggggattttcaactcaacacacacaatgcaagcacaaaagaaaataaaaaaaatgaaccaccagaaccattcattattagttgactactgcaacaggcaggcattttaaaaattacaaacaccacaagccaatgatatacaatcttggtcggcggatcatcatcacatcaaacaacccct

SEQ ID NO: 89023 - DNA, 1028 bp, Zea mays
  Clone ID: MRT4577_18118C.1
ttgggtacctcgaggccgttgggaacctcgaggccggccgggcttttctcgaccagatccggaagttctgtgggtagaggactagagactgcagatcgagggtctggcagcgggccgtggcagttgggtgattacgacgaagagagatgggcctcctcgacaagctgtgggacgacaccgtcgcaggcccgcgcccggacaccgggctcggccgcctccgcaagcagcctgtgcgtcccgccgccgtcaagatcagtgatccggccggggacgctgcggcgttcgtgccgccctcgccggcttcgggtagcgaggagacgccggtgaaggtgacgcgcagcatcatgatcaagcgccccgcggggtacccgtcgtcgccgaggagcgcggcaagcacgccgccggcctcgccactggggactaccccgcccatctcgccgtttgccggcgccggtggtcggttcagaaggaaatcatcgtccgacgcatacgagagggcgaccccaccagggacgaccagccaccctcctcccttcgacgtgtgaactgaccgcaccctcgcacttgtttttgctccttcacaagcatcatctacggtagacagggaggaccggagaagacatcaagaggggaacggggatgatctagtcgcgggttgtcttacctctactgtgatatattatattgccgctatatctgtatggtaccgtgctttgccacagcttggatcacgccgtgggcccgggtcgtgtgtttcctctgctctgtttctatgtatgtcatcactgatggtgtgtggaggttgggttcatatgcttgtaatgttagctggtttgtggtggactacgagagtagttttgttcagtgtctggtatctagtagctgaaggtgtttgcttgaactctgtgaactgtgatgtgggataatgctaagaagatgaatagatgatcgttgggttgtcttgtccaaaaaaaaaaaaaaaaaaaaaaaaaaaaaagaaaaaaaaaaaaaaaaaaagcggccccccc

SEQ ID NO: 89024 - DNA, 1496 bp, Zea mays
  Clone ID: MRT4577_181190C.1
ttgggtacctcgaggccggccgggtccagccaccaaacgcgtcgacgcgcagcgcacgcacgaaacacacgagcaggtttccgttctatcctgcggttactcgagacgtagcagcgcgtcgagcagaccagacccgcccggcctggttgtggtcgaggaggagactggactggaggaggacgggatagcagacgagaggagaggacgcgcacgccatgtcaggtccaccgccaaagccttgggagcgatctggaactgaaggaacttcaggtccagcacctttcaagcccccatctggtggaagcaccagtgatgttgttgaagcctctggtaccgctaaacccagcgaaaatgttactgcgatggaggggaatgccgctcccaatgtaaatagcactatttcaaggcctatgccacagcggccttggcagcagacaggttatggaaacacctatggagggtatggtggatccaacatgtatagttcatatggtggatttggcaacacttatggtaccggtggactcggaaatagcatgtactcgagttacggaggaggttatggtggtggcatgtacggtggtggcatgtatggaggcggcatgtatggtgggatgggaggttatggtggttatggcatgggcggaatgggtggtatgggcatgggtccatacggtaatcaggatccaaattcgatgggccctcctgcatccccgccaggcttctgggtgtccttcctccgagtgatgcatggtgttgtcaatttcttcggacgaatctcattccttgttgaacagaatactcaagcatcctatttcttcatgacagcaatgctgcagctcttcgaccggtccggtatgctctacggcgagcttgcacggtttgtgctgcgtttgctaggagtgagaagaaagccaaagaaggggggcagcattcaggggccagaagcgctggcgttcgagggacctagccggcagtctatcgaggcaccgaaaacgaacaactgggacaacgtctggggaaactgagatcatgcctatgggtgcaacgagttgaatcatatagaagaagtgcaagggctatgacctatgggagtttgcttgccttttgattcatcaaaaagaagattgcggccagataccgcctttggtggcaacttaggggaagctgtgaagaagaaactgctgggcctctcttgcttttcgcagctttgctttgatgtacctgcgagggccatggcccatgacagtggtaggtttttctttaatcgcaactgtaaggtttggtgaagaacggtttcacagtgcactgatatatatgtagctgcttgctgctgttgtgatatcagtgtgggtatcgaatgtttgtatatctctatctgggtaaatagtgtccgccttcgaaaataatacagcaaatgtttgtgtacccaaaaaaaaaaaaaaaaaaaaaaaaaaaaaaaagaacaaaaaaaaaaaaaaaaaaaaaaaacacac

SEQ ID NO: 89025 - DNA, 478 bp, Zea mays
  Clone ID: MRT4577_181191C.1
gtccttttttttttttacatagctgctacattcgctggactattgcatgaatggattagaaattgacccttagactcacgattattcaccttaacacaagcctaagcgtagccgacatatgatcctgcgaggaatccaaaacgtggagggtcctttcaaattgtcagtacctatttcaaaagctacctttcatatacacaagccgcttttagacggaatatagcccaagtcagtgttttctttcatcggagtcgcggcgaggctaccttgtgccggacagctgctctgcaccaaggctgtccgtggcatcgacgatccagtcattgcgtagcggagccgactcagcgtcctgtctgaccacctctactttgtggcatctcgcccagcgctcttgcagtccgataccttggagcatcctaccaccttcgacatttttgggacggtcaggggggagccctgcgtgcagaggagagccacc

SEQ ID NO: 89026 - DNA, 378 bp, Zea mays
  Clone ID: MRT4577_181192C.1
gtctacttctaccaatcaaatcaatctataccctaccaaataaaacaaaatgacactctcaggccactgcctctgcggcgccgttacctactccatcgccgtcgacaagcccctcatcacgggctacgaccactgcgacgactgccagcgccagaccggatctgcctactcattggtagcagtcgtccccaaagcggccctgacgctcaacggccccaccaaatcatgggctggcacaggctcaagcgggaaagccgtgcatcgaatcttttgctccgagtgcggcagccccattgcgcatgacccggatgctgcgccggagatcattgccatcaaggccgggacattggatagtgagatcaagaagactctcaaacc

SEQ ID NO: 89027 - DNA, 458 bp, Zea mays
  Clone ID: MRT4577_181193C.1
ccggccgggaggacacgtttggggcctatgcccggccccgttcgtcccagtgaatccgacggcgaccgcctcctctggccgctgcgacccgccgctggcgccacgggacgacggcgaccgagcgctggaggatccacgcagaaaaccgtgtgaatttgagggggttttctatcgggaacagagattttaacatggcaggcgttcagcgcgcatggtgcggggagctgtagcaccaagcatatcctatccctctttcccgtccactccggtccggaccagaattaagtttcgtccagcaccatttttttttgcgtgtgttgtcaccggcggcgggaatgctgtcgctgttggtgctgaatggatcggcggtgcgtgcgtgctgcacaatgtactactacaggaaaaaccaaataccaaaccggctttttcggcttaaaaaaaaaaaaaaaaaagcggcc

SEQ ID NO: 89028 - DNA, 181 bp, Zea mays
  unsure (1)..(181): unsure at all n locations
  Clone ID: MRT4577_181194C.1
cgtccggtccgcattcccggtcgccccgcgttcgcccgttggtcgacttggtaggccaatggagggagctggggctcattgtacacaatcttggatatgtgtcgggcatttgaccggttttaagagccttagtggcgggcggccggtggagatggttttggtgctttgcntcctttccttc

SEQ ID NO: 89029 - DNA, 410 bp, Zea mays
  Clone ID: MRT4577_181195C.1
cccacgcgtccgcttcaagggcgccgtgccggggctcacgcacatcgagcccaacaagcggaggctctgcctcgagctcgtgcagtccgcggtcatggtggccacgcgcgacgacggcggcgcgcacggcgacgccgggggaggtgggagcgacggcgggagcttcccgaggggcggcgacgccgccgacgacagcttggtgagcctcaccatgaactccacgctcatgtaccagggccaggagatggcggcggcgctggccggcgacgccaggaaagggagcggcggcggccgagggagtccgtccagcttgtacttccccaatggcttcgcatgagtatttaatctccttcatcaagcaagagcaatgcattttcgtttctctctacatatatccatccaaagatgat

SEQ ID NO: 89030 - DNA, 245 bp, Zea mays
  Clone ID: MRT4577_181196C.1
cgactgtctacaccaatggccatagtcctgcggagtcctcgctcgcccgcctggctggggtagccactctccctgcgagccgcaccagcacatacagccgtggggctgactgcgaccaatgtgaccatcatgggacgtacggccggcgtcaggcccaagctgggcaagcaaggcacctacaacgtgaagctgatcacgccagagggagagctacagctgcaactgcccgacgacatggacatact

SEQ ID NO: 89031 - DNA, 161 bp, Zea mays
  Clone ID: MRT4577_181197C.1
atccgtcttaaaattaaagggggccgcccgcttaagggtttttgaacggttcttggccttttcggcaaggacccacaaggaggccttcttggccaggttattggcacaagttggaacctaaccgaggaggagaagaaagggcacaaaaaggttaaatggga

SEQ ID NO: 89032 - DNA, 375 bp, Zea mays
  Clone ID: MRT4577_181198C.1
gtgctggcggacgccacgacatacggcgaccgtcactatggcggaggaggtggcagaggtggatacggaggcggcgactatggtggcaactacagcaacaggggtacaggaggggattatagagttactggagcatgaggaggccactttactgcttaaggtagcgacagctctgccaacacaaactgagcttctcacagaattacccaaacaaaccgcgctgatggatatgttgcaaccaaatgttccacacacaatgatatgctctctggcacacctgaatataacttctgcggccacaagaatgaaaaaaacatggatgatatcttcaaagacgatcgatccgacacatctacaccacacaagagagctagt

SEQ ID NO: 89033 - DNA, 400 bp, Zea mays
  unsure (1)..(400): unsure at all n locations
  Clone ID: MRT4577_181199C.1
cgcgcagcgggaaaaaagaagggaggcngctgctnagcttcgccacgaagcgggcaggaaggccggggggggnccacaccnccccggacacccgcgcagccgccgcccacgcngggnccgncgaccgccggccgancgangganggangcangcanccaccgnccacgnacgcggcgacgagacggggcgcgnnngcgngccaccggacaagcnagnagaacgcncgacggggangnagcgggcgccatcccancgcccncccacacgnccaagggcggccggccaacaaagcgaaagcgaagccagggaagaggcaaagcgaaaggagagaaggaaaccganccacccaagccaaggcaaggcagagaaaaagaagaggaggaaaaagaagcaacggca

SEQ ID NO: 89034 - DNA, 1117 bp, Zea mays
  Clone ID: MRT4577_18119C.1
cattgggtacctcgaggccggccgggcttctcgacccgatccggaagttctgtgggtagaggactagagactgcagatcgagggtctggcagcgggccgtggcagttgggtgattacgacgaagagagatgggcctcctcgacaagctgtgggacgacaccgtcgcaggcccgcgcccggacaccgggctcggccgcctccgcaagcagcctgtgcgtcccgccgccgtcaagatcagtgatccggccggggacgctgcagcgttcgtgccgccctcgccggcttcgggtagcgaggagacgccggtgaaggtgacgcgcagcatcatgatcaagcgccccgcggggtacccgtcgtcgccgaggagcgcggcaagcacgccgccggcctcgccactggggactaccccgcccatctcgccgtttgccggcgccggtggtcggttcagaaggaaatcatcgtccgacgcatacgagagggcgaccccgccagggacgaccagccaccctcctcccttcgacgtgtgaactgaccgcaccctcgcacttgtttttgctccttcacaagcatcatctacggtagacagggaggaccggagaagaaagacatcaagaggggaacggggatgatctagtcgcgggttgtcttacctctactgtgatatattatattgtagatatatctgtatggtttccttcctagtatgtggcatatgatgtataataataatacgtcgaacgctcatggtactgtgctgtgtgtgccatgtgcataggggtgggtgcctcagggtcagggattcgtgtgcgctatgccgcagcttggatctcgccgtgggccgtgtcgtgtgtttcctcctgctctgctatgtatgtcatcactgacggtgtgtggaggttgggttcatatatatgcttgtaatgttagctggtttgaggtgtggactacgagagtagttttgttcagtgtctggtatctagtagctgaaggtgtttgcttgaactctgtgaactgtgatgtgggataatgctaagaagatgaatagatgatcgttgggttgtcttgtcaaaaaaaaaaaaaaaaaaaaaaaaaaaagggcggccgccaccgcggtgga

SEQ ID NO: 89035 - DNA, 502 bp, Zea mays
  Clone ID: MRT4577_1811C.1
gtaggtgtttctttctgttttactgttactgttacggttttcttgtccgccgtctagctggcgcgatccatggcgcgcatcggccagccgctcaccaccgaggagctcacgcgcatgatgcgcgacgccgacgccgacggcgacggcgtcatcagcttcaacgagttcgccgccgtcatggccaagtccgcgctcgacttcctcggcgtcgcctgatgccctctgatggaccgaccgatcgatcggtctcgctcaccgcccgccgccgtaaccccgtgaccccgtggccctgtccctcgcccgccgttgattacctgttctctctctctctcttttttttgttaggaagatgctcatccggttaatgtaggataactgacacaagataatgtaactcaaaaactcatcgctggtttgtaacatggatgaactcggaaaatgtgtacatattttggatggataaaaaaaaaaaaaaatttttttaacactcgagggggggccc

SEQ ID NO: 89036 - DNA, 224 bp, Zea mays
  Clone ID: MRT4577_181200C.1
tatactcttgttttttttttaatagtgcctcttaatttgatggagaggagaaaatttgtagtatatatcctggggggcatcaaaggacaaccatagttccttaagccctgtaattacaataaggcccactactgcagctatcgaaaaatggagagagacctatcatatgtctctgatgcgccctaaaaaaaaaaaggggaccaatagtttctttaatataaaaa

SEQ ID NO: 89037 - DNA, 2345 bp, Zea mays
  Clone ID: MRT4577_181201C.1
gtcgacccagcgtttttttctctccctgctttcccagacgcggggcgcggttgttggggctctctctgatgcttgcaaccgccaatgcccctattgcctcgtcgttgccgatcccagcgcccagacgcccagatctcccctctcctcccctagccagccgggacgcccaacttggcagccttagctcgatgtccaatgcctaccgacgcggcggcgcggtggctcggcggggcaatcttcgcggctcgcccgtagcgacgcagatcgtcctccccgcagcccgcttccctccgtccctgcgcgccatccagcagcacccagcgcagtgcgcgaggcccagccccgtccccggttgggttttgcgcagccccagcgcaacagcagtctcgccattctcgtgcctcgcctcgagctcgtctggtcgtccgccgtcgttgcgagagtgcgatccatctccaagcttcaaggagtcgacggtcaagcttcgacgaccaagtgatcaagctctctgagttctatgaggttgaagaccctgagcatctgtttggtgaaggttgtccgcattgcaaccactgctcaggaggagatgaagtcgtggaagcagacttccaggagttccaagatcacgatgaattttctgtgtgggctggcgaggacccccagtcagctgcctgtgaaggccttatctttactgcgtttcgctagcactttgatttacttgttaagacaatgactatgtggatgtctatgactctatgatgtaataagtactcttttatgttattattcgagcattgtgtgatgatgttcatttatgtaaaaaaaaaaaaaaaaaaaaaaaaaaaaaaaaaaaaaaaaaaaaaaaaaaaaaaaatcagccaaagtataagcgcagatcgagtcatcaagctagctagcccggagcacgcctagacacgccagcagcaatggcggctcagctggccgtcgcgtttctcgccttgttgtcctcctctgccttcttggccgtgtctggccagaagttcaacgccatcttcagcttcggcgactccatgtccgacaccggcaacctgtgcgtgaacggtccccccgccggcctgacgctcacccagccgccctacggcgagaccttctttggccgcgccacctgccgctgctccgacggccgcctcgtcgtcgacttcctggccgagaagttcgggctgccgctgctgaagccgtcgaagcagggcggctcagacttcaagcagggcgccaacatggcgatcattggcgcgaccaccatggactcgggcttcttccagtctctgggcatcgccgacaagatctggaacaacgggcccctcaacacccagatccagtggttccagcagctgatgccgtccatctgcggctcgacgcaggcctgcaagtcgtacctgtccaagtccctgttcgtgctgggcgagttcggcggcaacgactacaacgcgcagatcttcggcggctacaccccggagcaggcgagcgggcagagcgccaccatcgtggacgccatcggcaagggcgtggagcagctcatcagcctgggcgccatgtacgtggtggtcccgggcgtgctgcccgtggggtgcttcccgatctacctgacgctgtaccagacctccagcgccggcgactacgaccagtacggctgcctgaagcgcttcaacgcgctgtcggcgcagcacaactcgctgctgcaggccaaggtgtcgagcctgcagagcaagtaccccggcgcgcgggtcatgtacgccgacttctacagccacgtgtacgacatggtgaagagccccggcagctacgggttcagcaccaacctcagggcctgctgcggcgccggcggcggcaagtacaactaccagaacggcgcgcggtgcggcatgcccggcgcgtacgcgtgctccgacccggcgtcgtcgctcagctgggacggcatccacctgacggaggcggcgtataggaagatcgccgacggctgggtcagcggggcctactgccacccggccatctcggcctagaggctgctccgggaccgggggtcgggggctggttggtggttcgctggcccctcaagttaggggaggggaatcggattaattgtaatttttttagctggaatcgaagcaggcaagaagacgatggaggtggtctgcaactgcaagaaataatcaattatataagcataattctctcgtgatcatcgtgcgacagcagtgctaagatcacttgtgtagcctagcgtgccattttaggccttgttcggttattcccaatacacatggattggatgggattggaaaaaaaaaaaaaaaaaagcggcc

SEQ ID NO: 89038 - DNA, 611 bp, Zea mays
  Clone ID: MRT4577_181202C.1
cattgggtacctcgaggccggccgagatatatctcatatctgagtctacgcctgctcctacagaatacgagtatagctcatccgccgactgctcctctgcctaggcggcattgcgaggttcgcaagcatcgtctctaccacatacgtcaagaagcccctacgatgactacagacttctgacagtgtatgacttcccaatgtagcggaagactactgattcaacaaaggaccaggggccttcagggtctggttagatgcctccgatccctcgaccaaagatctccgtgtgcatgctctccatatggccatcatactcagtacgctgacaaaacgagacttgagtacatgtctgccgcgacccctctcaacgatgtccaagaacacaccgttgggacatacttcgtctggaacaaccttgcttatttgaccccagagaccatcatcctccaaattccccgcctcctcggctccgcgctcttcaaggaatgaaagcttcctcactctggcccactctgcaggtgtccctgcaactgcaagagactgatactgatgctacagcccagtgtcaactgaacaaagttgtttgtgtgggtggccttctagaactcctg

SEQ ID NO: 89039 - DNA, 265 bp, Zea mays
  Clone ID: MRT4577_181203C.1
gtggcacctaagatgaactcagcagcagcatctgatgctccagaaggtactgaactaggtccaaattcttctcgatccgtacaaactcctttttctactgagccagcagaaggagaaacaaattcaaccaatgaagaatccaagtcgcaacagaaagttggccagtttggtactcaatcatttaaagataacaacaaagaagctgatggaacagtaaggtctaatatatcgagatcaactgaggaactccaagaaccaccttcga

SEQ ID NO: 89040 - DNA, 282 bp, Zea mays
  Clone ID: MRT4577_181205C.1
ttggtttttttttggcgacatgacttcattatccaacatcaagggcgagggagatacacccatgtcaactccagcaagcgtcggtacataaacagggaagggtagcaaaaggtacttacagccttgcattaaccatgtaggaaggttgcatatggtgaggaccaccggccatgtgctatgggagcggctagcttcaaaaaatgggaacatatcatacagactgaggacaaacctgacattctaaggaatatcggccaagtctaggaggctgatattgaaacc

SEQ ID NO: 89041 - DNA, 260 bp, Zea mays
  Clone ID: MRT4577_181206C.1
aagccccccatccaaatcccatgtttataggaaggggggtttgtgccccaccgggccgttttatactaacacgggtggcccacaatgcacttgggggggcccgcaaaacgcgggagcttacccacttaacggccgggcttgggcgggaagaaaacaaacctggggaacttgcgctcgttctggcccccggactttttgaaaaaggggccctttattatgacggtcccctgggacttccacacccactttttggagccctt

SEQ ID NO: 89042 - DNA, 308 bp, Zea mays
  Clone ID: MRT4577_181207C.1
acgccgacgtaagctcggaattcctctcgagctgagatcgtgcactgtgattagacttacactattaccgaggccaccgggctcgccatcactgattgcccttggactgtcaccaatcctgttatcaccaccttcggtgacgtatgacacgagtgccctgctcctcccggccaccacgggaacaactccaccctggtccccggttaccctaccgggaagcccggccacgggggtgagagcggacagcctgggtttcttggtggacccggcgctacccccaccgatggtgacgcttccgaggtccccac

SEQ ID NO: 89043 - DNA, 328 bp, Zea mays
  Clone ID: MRT4577_181208C.1
gagatcaagaaaacaataccgccaaacttaataacccagtagcaaagcggggggaataaagcttaccaccgtaagtggtaaaccacacaccgccggtttgttatgacccgccggaaccttaacacgttgggagccactcagggcagatcacaggatagcatgggcacaaaagcccgacaaccccgcgccagtaaagcgtttattactcgtcacccttgtcgccgtcctcaccctggtaaaactcagcaccgacctcctcgtagtccttttaaagcgccgccagatcctcacgagccttggagaactcgccctcctccatacccttacc

SEQ ID NO: 89044 - DNA, 275 bp, Zea mays
  Clone ID: MRT4577_181209C.1
gactttcttgccagcatattggaacgattaatcatctataagactggattgagatgctgacacacaaattactactatgatggatggcttgtatcatgtaccatcaccaattgctgctgggctggagatgcactaaagccaatttcaactagtgacgcgagaccaatcgtccaatctgtatggcttcagacgatgatacttttttgaattgtcacaaagtaaaactgatgaacttaccgtaccttgtcctctagcacgataacggggaatttgaa

SEQ ID NO: 89045 - DNA, 381 bp, Zea mays
  Clone ID: MRT4577_18120C.1
cagctctttttgccgcccgataatgcgcgttgccgcgtgccagcttcccctccccaccaccaccccagcccgccggcgacggcgagcctcggcgccgcccaccgccgcgccgcggccacccccgagggcgctcgccgccatactgcgctcgcgcgtcatcgcgtgcctccgcgcgcaagacagcgagacggcgttgcaggcggctcacgcggctgtccacggcggcattaccgtgttggaggttgtcatgacgactccgggagtgctcgaggttattgaagatctttgcaggagttatccttctttaacattcggggttggcacggtcttaaatgctgctgatgcaaggaaagctatttgcgctggtgcacaatttcttat

SEQ ID NO: 89046 - DNA, 323 bp, Zea mays
  Clone ID: MRT4577_181210C.1
cttcttccccaaaaaggggtaccccccgggtttgccttttactttgtaattttccccccctggggttgttccccccttcccgcccgggtttctaaatggaaaatcccccctgggtgggcgttcccctatttcccgtccaacccccgccccttttttccttattaaaaaaaaaaccccatgtgcccccccccctcccgggcccctcttgtgggatggtgtggctttatccccacaaaatctcaatccccccttttgggggtccggcccccccttggaaacattgccccctcctccccgggggcccccacccttttccccaaaaa

SEQ ID NO: 89047 - DNA, 603 bp, Zea mays
  unsure (1)..(603): unsure at all n locations
  Clone ID: MRT4577_181211C.1
ccctccgggccggccggggacgcacgccgccccacgcccccgctcggtgcacaccgctaggtgcgcaccgagcagaagagatggcggcgccgtagatgacgaagaagaccgcgaagaagcggggcaagcagttcaagaggccccacctngcactcgctacaagtgaccccaagccaagcaggcgcaggccaaaggccatcgattgccgagcgaggaggaaggccaagggatgcaccttgatgcccaacaatggccatggttctgacaagccaaccaggcactaccgtccccagcaagccaaagaaggggggggcccacaacgtccatgagctggacttgctcatgacgcacaacaggacctaccgcgctgaaattggtcacaacgcgaccaccaaaaaacgcaaggagaccgccgagcgtgctgcacagctcgacatagaggccaccaacaagctagctaggctccgcaaacaggaggacgagcagtccgggcccttggagcaacgacgaactggcagctgtcatacgcttgcggagggaaccaccaagcatagcgtctcggtagcactgaataccagaggcactcctgaccttgtcgcaatc

SEQ ID NO: 89048 - DNA, 564 bp, Zea mays
  unsure (1)..(564): unsure at all n locations
  Clone ID: MRT4577_181212C.1
cccgacgaattcaaagtgcgtgcttcggttgttggaccatttcaagcacgctggccccaacgggcagcacgtntgctggtcaccgagttcctcggtgatagcctgctccggctgatacggtacaatcggaacaagggcattgggctgagcagagtgaaggacatctgccgatcagtcatggtcggccttgattacctgcacagcgagctcggcatcatccacacggatttgaaaccagagaacgttcttctggaatcaacaattaacccggccaaggacccagtgcgctctgggttcacaccgatcctcgaccggcctgtggggaaccagtacggtggcacagtgatcagtttcagtgagaagatgctcaagatgagagcaaggcgtgcagtggctaagatttcgcagagacgggtttcccttggtggtggggttggggcagaaccggagaaagagaggtgcctggatgggatcagtttgaagtgtaagattgtcgattttgggaatgcctgctgggccgatcagcagcacgctggtgaaatacagacaaggcagtacagagct

SEQ ID NO: 89049 - DNA, 339 bp, Zea mays
  Clone ID: MRT4577_181213C.1
ccacgctcgatcacgccatccggcgagggaacgtccgcatgatgagggccaggggggtcaacgatgggctcaagcccatggacagcgctgagaagatcggcaagaggcaggtcatgatcggtacgtcctccaaggtcatcatgaagttcctgacggccatgcagagccacggctacattggagagatccagtacacggatgaccaccgatcggcacaagatggtggacgaaatcaacgggacgttgatataccgccgcctcatcagacctcgcgatgatatctttttttttagacatccgacgcacggaccgcaaggctgctcctgtccgggcacatcg

SEQ ID NO: 89050 - DNA, 449 bp, Zea mays
  unsure (1)..(449): unsure at all n locations
  Clone ID: MRT4577_181214C.1
cacactgggtcttagaccttagcttatctactccagacgcagaagaacccgacgacaccatgagggtgtgctcgttgccctcgctctcctgctctcgctgcgagcgccacctccacgcatacaagcggcggctgcggatgccagccaccgccgccgggtcatataccgacgccggtgcatgtgccacctgcggttcaccggccaccgtccgggcatctaccaccgccggtccacctggcgccggcggatcactaggccaccgccggtccatgtgccgacgccggttaatgtgacgtcgacaccatgccagtagagtacttaaacaacacgagcatagcctgaagcctagtcacgaggatggccaggaaaacagtcggtatcaagcatgagagagctgtatgaaacatgtggggtgtgtagtagcccgaggntggaacagagagagaagt

SEQ ID NO: 89051 - DNA, 1048 bp, Zea mays
  Clone ID: MRT4577_181215C.1
tttctaccaatttttgggctttacactcctgtacataagacctgaagaacgtgggtgtcaaaaataatgcaacaaattatgggtgtagatctttgttctaacttcagatattcacaccaccatgattacgctgtactattcgcacttctgttttacttgaagtcatatgaaaccttccaattcttttcgacaaatcaagatggcaccacagctaccaaattatgcaaagtagcactgccagcagatggaactgtatcttgcttttgggctagaaggttggccattggaggtcacactggaggactaatttctgatactctccaagcgcccatataggaaatatgttgcgataagccatgtaacacaaggggccatttttcaagaaacttccgatcatttcctcctgtgggaagtcgccattgctgagctgcatactcatgataagccgtgcagctttgtgaagtggagtgggatctctttccgcctggaactgtccagctttcatgagcgccaacattgcccacgcagtgttcactatgtgtgacttctccttatccagatttgtgtatgccttggttgtagatgaaagatgactctcaccccatccaccattctttagctgctttgctaagagaaacttgcaggccttctggatacaagtgctgttaccataactctgcccaacagctgatagaccctcaatagcaaacctcgtgccatatgtgaaacaaataccccaagatccaaaccatgagccatcatcattctgcaacttctcgatgaattcagtagctcccctaatgcattggtctatttcatcttttcgatgccaagggtacttctcccgaaacaatactaatgcttgcatgactgatgaggtacactcgacgtactgatgctccaccatgatgtctgcgtatatctctgtcatgttgaaaatctctatccatggatatgtgcgagctagctcccaagttccatagccaccgtttgggttctgtaaggataacaacacattcactgcatcatataggcggcatgttctcgt

SEQ ID NO: 89052 - DNA, 539 bp, Zea mays
  Clone ID: MRT4577_181216C.1
gcccaaaaaaccccttccaatgaatatcctaaaaacaaaaaactccgggatcaaaactaacaaatgggagggtgaaacatcttcggatcaagcaaaccaactggaacaccccgaaacacggaaaacaaaagggaacattgtctccccgccccctatatcatatagggaagcgcaacacaaaaaaacagctggcttatcggtcccttaaggggtttggaaaagggggggggggcaaaggtcatttctttccacttttcttgaaaacccagcccccaattgggcccctctggggcttgggcttcaactccttcaaggccttttccccatcttttttcttccgcaaaaaaaaaaaaacactctccgcggactccctcttggcgaccttgggggccttcaacgggttgggcttccccccttggttccacatgggcggggggggggaccgatccgcgggcgagggcccaaaccctaaaatgggcaacaccggggcacgggaccccgacggggaataagtggggaaaagcaaacgggaccccctg

SEQ ID NO: 89053 - DNA, 358 bp, Zea mays
  unsure (1)..(358): unsure at all n locations
  Clone ID: MRT4577_181217C.1
gggaaggaaaggccaggccggggaagcacaaacgacaaaaagaggggggcaacccaaagaaaccacaagaaggccaacaaaacaaaaggacaacggggggcgcatgggaccaacaggcccaaaattaccaaaaacaaaggagcggggggggcccacaattaatatttaaaggaaagagaaaangagacaaaanagggggagggatttatggaaggggggcgaggaagccgccgtgagggccttacaaacgggagggggggcagggaaggttaaagaaacaaccttacaggaggcancaaactgaaaggggaagacagngaaaaggaggaaatgaaaaggatggggggccaataggggc

SEQ ID NO: 89054 - DNA, 265 bp, Zea mays
  unsure (1)..(265): unsure at all n locations
  Clone ID: MRT4577_181218C.1
ctagncannnctagcgtagcgagcgatggcgcaccggaacgtccagtcgccagctggctcccttccgccacccgctgcncnngccgcagcgacgaccctaagcccgcgggccagccccgcatgggcggcgccctcgccgtnnctcggcgacgggtcctnngctcctcccctttctctgatnncggcagcnnaccaccaggnnaccactcagtcgagcgagcgagcgagcgagaacccacccccggcncnntcgatcctttcccca

SEQ ID NO: 89055 - DNA, 483 bp, Zea mays
  Clone ID: MRT4577_181219C.1
ctgccatgctgacccaggtgctgaatggcggtggtgcaaatgacaacctccatggagttagcaccgttaatcagcaagctgttaatgaccaagtgaataacgaattcttcatgggaacaaatgaggcacataatgcggagagtgatgatttggatgatttccttgcgtacttagttaatcaagatttcatcaacaatggtgattctttcattgacagggactgagaatctgccccttgactctggaagagagatgctgctgaccaattcatggttcttgcatgttgtatgaacaaatttgcactgtttgtagtaggctagctaggagcaggccatcttggatggaatccccatgtttctctagtgtagtcatgctggttctcttatgtatcagttgtagcttttaacctgtggtgttcagtttggtgggaggtgtgggtgccacccctgccaaactcagaactatgtgttcctctttggcttg

SEQ ID NO: 89056 - DNA, 308 bp, Zea mays
  Clone ID: MRT4577_18121C.1
acttcatgaagtatcccatttggaagaactgaccgatgggcgggcttgcaattggaagacctggaataaagcctaagctgatcctcatcttaaccataagggccgttattgtgcaaaaggattggcaagttatgggcggccggttgagcattttatctgactgctctaaatgaaacatagaaacaaagcgctccatccaagtttgtccaagtaatccacctgggattggcgaagaataaagagacctgtgttgctagctctactaaagggaaggagagaagcctgcttaaggcctagggctctacccc

SEQ ID NO: 89057 - DNA, 297 bp, Zea mays
  Clone ID: MRT4577_181220C.1
tttttgttttttttaacaaaatttgtgccctctaaagtgaactatcttacgagagtggagtctaaatagaatctgctccggcgcctaaacattcatgttcgtttgtttatgccatgtgcacacagccacacacacaaaagtggcatcaggctaccacaaacccaatctactacgcaccggctgtacgcaggcgagaagacccatctgctaacatacatgtacacttgcacagcgggcagcctgattagggcttctacgcagcaaacccaagcggacgcgcttgctgagctacccttg

SEQ ID NO: 89058 - DNA, 2017 bp, Zea mays
  Clone ID: MRT4577_181221C.1
tcaagcaactctttttttttctttcctttcagtctgactgacacctcgagactggacaggtccggccgggatctatcatccatcatcaccagctagcacctcctttcccacgaccattgggtacctcgaggccggccgggatccatctatccatcaccaccacctcctccttcccacgactcccgagcgctctgcgtgtggcgcgcggcagcatggcgactgcgaacgggagcagcaaggggtcgttcgaggtgcccaaggtggaggtcaggttcaccaagctcttcatcgacggcaagttcgtcgacgccgtctccggcaagacgttcgagacccgggaccctcgcaccggcgaggtgatcgccagcatcgcggagggaggcaaggccgacgtcgacctcgccgtcaaggccgcccgggaggccttcgacaacgggccctggcccaggatgacgggatacgagcgtggtcggatcctccacaggttcgcggacctgatcgacgagcacgtggaggagctggcggcgctggacacggtggacgccggcaagctgttcgccgtgggcaaggcgcgggacatcccgggcgccgcgcacctgctgcgctactacgccggcgccgccgacaaggtgcacggcgcgacgctcaagatggcgcagcggatgcacgggtacacgctcaaggagcccgtgggcgtggtgggccacatcgtgccctggaactaccccaccaccatgttcttcttcaaggtagggcccgcgctcgccgcaggctgcgccgtcgtcgtcaagcccgccgagcagacgccgctgtccgcgctcttctacgcgcacctcgccagggaggccggcgtccccgccggcgtgctcaacgtcgtgccgggattcgggcccacggccggggccgccgtcgccgcccacatggacgtcgacaaggtcagcttcacggggtccacggaggtcggccgcctcgtcatgagggccgcggccgagagcaacctcaagcccgtgtcgctcgagctgggcggcaagtctcccgtcatcgtcttcgacgacgccgacctcgacatggccgttaacctcgtcaacttcgccacctacaccaacaagggcgagatctgtgtggccggcacgcgcatctacgtgcaggaagggatctacgacgagttcgtgaagaaggccgccgagctcgccagcaagtccgtggtcggagacccgttcaacccgagtgtcagccaaggcccccaggttgacaaggaccagtacgagaaggtcctcaggtacattgacatcgggaagcgcgaaggcgccacgctggtcaccggagggaagccctgcggcgacaagggctactacatcgagcccaccatcttcacggacgtcaaggacgacatgacgatcgcacaggatgaaatctttgggccggtgatggctctcatgaaattcaagaccgtggaggaggtgatccagaaagcgaacaacacccggtacggcctggccgccggcatcgtgaccaagaacatcgacgtcgccaacaccgtgtcgcggtccatccgcgccggcgccatctggatcaactgctacttcgcgttcgacccggacgcgccgttcggcgggtacaagatgagcgggttcggcaaggacatgggcatggacgcgctcgacaagtacctgcagaccaagaccgtggtcactccgctgtacaacactccatggctctgaccgaccctcatcctgtccgatgaacagttcaacatcacaaacaagaagaaacatgtcttgtaagatactcctccaaaggatcggttgcctgtagctgtactcttacacctgcatggattgatgatgcagtgcaatgtagcattcagaacaataaagacatgtttcggactgctggtgtctgatcggttgaagagcatgtttcaggaaaaaaaaaaaaaaaaaagcgaaaaaaaaaaaaaaaaaaaaaaaaaaaaaaaaaaaaaaaaaaaaaaactcgaggaaagggcgcggtaccc

SEQ ID NO: 89059 - DNA, 306 bp, Zea mays
  Clone ID: MRT4577_181222C.1
gagctcactagtcggtggccgcccttttttttttttttttttgtttgttttttatgtttttttttgtttttttttttcttgtatcgaaaatagccaccaaattaaccatatgggggagaccatgtggggtgccctaagctagctgaaggccaaaagaatgcgaacaatgggcaaagagcggcagtggggaatggccgccttactgggccacgaaaggggcgctaaataaagaggaggacaaagttctgcacgatagctggggccacttttcgaaaccataaagacttagagtttgctcttcccacc

SEQ ID NO: 89060 - DNA, 764 bp, Zea mays
  Clone ID: MRT4577_181223C.1
agggaagccctgcggcgacaagggctactacatcgagcccaccatcttcacggacgtcaaggacgacatgacgatcgcacaggatgaaatctttgggccggtgatggctctcatgaaattcaagaccgtggaggaggtgatccagaaagcgaacaacacccggtacggcctggccgccggcatcgtgaccaagaacatcgacgtcgccaacaccgtgtcgcggtccatccgcgccggcgccatctggatcaactgctacttcgcgttcgacccggacgcgccgttcggcgggtacaagatgagcgggttcggcaaggacatgggcatggacgcgctcgacaagtacctgcagaccaagaccgtcgtcactccgctgtacaacactccatggctctgaccgacctcatccggccttgtccgatgaacagttcaacatcacaaacaagaagaaacatgtcttgtaagatactcctccaaaggatcggttgcctgtacctgtactcttacacctgcatggattgatgatgcagtgcaatgtagcattcagaacaataaagacatgtttcggactgctggtgtctgatcggttgaagagcatgtttcagtattactatttcttttcaccgaaaaaaaaaaaaaaaaaagcggaacattttttggtgcctattttcgcgataggaacttatggcaatataatgcttggcatatcatatccaaaaaaaaaaaaaaaaaaaaaaaaaaaaaaaagaaaaaaaaaaaaaaaa

SEQ ID NO: 89061 - DNA, 713 bp, Zea mays
  Clone ID: MRT4577_181224C.1
aaatacaataaaaaaaaaaaaaaaaaaaaaaaaaaatccattctatccatcaccaccaccttcctcctccttcccacgactcccgagcgctttctccgcctgcgtgtggcggcagcatggcgactgcgaacgggagcagcaaggggccgttcgaggtgcccaaggtggaggtcaggttcaccaagctcttcatcgacggcaagttcgtcgacgccgtctccggcaagacgttcgagacccgggaccctcgcaccggcgaggtgatcgccagcatcgcggagggaggcaaggccgacgtcgacctcgccgtcaaggccgcccgggaggccttcgacaacgggccctggcccaggatgacgggatacgagcgtggtcggatcctccacaggttcgcggacctgatcgacgagcacgtggaggagctggcggcgctggacacggtggacgccggcaagctgttcgccgtgggcaaggcgcgggacattcccgggcgccgcgcacctgctgcgctactacgccggcgccgccgacaaggtgcacggcgcgacgctcaagatggcgcagcggatgcacgggtacacgctcaaggagccccgtgggggcgtggtggggccaccatcgtggccctggaactaccccaccaccatgttcttcttcaaggtagggcccgcggctcgccgcaaggctgcggccgtcgtcgtcaagcccgccga

SEQ ID NO: 89062 - DNA, 1197 bp, Zea mays
  Clone ID: MRT4577_181225C.1
tccgacctcgtcaacttcgccacctacaccaacagggcgagatctgtgtggccggcacgcgcatctacgtgcaggaagggatctacgacgagttcgtgaagaaggccgccgagctcgccagcaagtccgtggtcggagacccgttcaacccgagtgtcagccaaggcccccaggtatatgactatgacatgagcaacgtcagggaccctgcaaggtgcggcgaccaactgaacactgctgtgaaatcgcaatgcaccaggttgacaaggaccagtacgagaaggtcctcaggtacattgacatcgggaagcgcgaaggcgccacgctggtcaccggagggaagccctgcggcgacaagggctactacatcgagcccaccatcttcacggacgtcaaggtcaaatgcttcgcagattcttcttttttttcaatggacatgcacggctgcaacaaatttttttccaaacaaaacactaacccaaacatttttaactatatgcaggacgacatgacgatcgcacaggatgaaatctttgggccggtgatggctctcatgaaattcaagaccgtggaggaggtgatccagaaagcgaacaacacccggtacggcctggccgccggcatcgtgaccaagaacatcgacgtcgccaacaccgtgtcgcggtccatccgcgccggcgccatctggatcaactgctacttcgcgttcgacccggacgcgccgttcggcgggtacaagatgagcgggttcggcaaggacatgggcatggacgcgctcgacaagtacctgcagaccaagaccgtggtcactccgctgtacaacactccatggctctgaccgaccgacctcatccctgtccgatgaacagttcaacatcacaaaacaagaagaaacatgtcttgtaagatactccaaaggatcggttgcctgcagtagctgtactcttacacctgcatggattgatgatgtcgtagtgcaatgtaacattcagaacaataaagacatgtttcggactgcattcagctagctagctgtgtgccgactgctggtgtctgatcggttgaagagcatgtttcagtattactgtttctttaatactgtttcttttcaccgacaaccgcgttggtttcttgtgaacattttttggtgcctattttcgcgataggcacttatggcaatataatgcctggcatatc

SEQ ID NO: 89063 - DNA, 320 bp, Zea mays
  Clone ID: MRT4577_181226C.1
cggagtgctcgtggttgccagacagaggagctcgccaccagactgtcacacacttctccggtctgctctatccccctatcgctcgcctagttccttgagccaggtccgagtcagttcacggaggcatccatctggcggcaaaccacgaaggcaaatacgtgctggtccattgaatggactctaggtcgcttctgaatctgatgaagatttcctcgccgactacaagaactttgaacgcgacgatgctttgtagaatttggtaatcggggatggggctagtaagaacgtcctccgtactgactcttttgacaataatacca

SEQ ID NO: 89064 - DNA, 287 bp, Zea mays
  Clone ID: MRT4577_181227C.1
ggacaaccctggccgctcttactatcacccttccggcggcgttgtgtgacaccacttgacaatcgttaaggtgctagcatccagggacctggccgggtcctgccccccagaccagcaccggcggggggggggggtgggcatcagcttgacgtcgggcgcacgcttgctggctgcaacctccttgccgacagcaccctccaccttgtgctcctcctccgggggggcgtgtccatctttgtggccttccctggcgcggcctgtactatcacgcctcgttcgtgcgagtc

SEQ ID NO: 89065 - DNA, 487 bp, Zea mays
  Clone ID: MRT4577_181228C.1
ccggccgggggctcggcccaaaaggtagtgcgcttccggccttcacgaacaggttcgtctcctcggctcctccttggcttcgcaagagtggtgccgccagtagcccctccgcgctccgccgggaccgacttgccgctggccgccaggggctccctcgcccaggaccggctccgccgtccaaccgtcctatcccctccggcctccgcccaggtccgtgcttctgccctgtcacagctgaaggagattagtaagtcagtagagatttccttaatagcattagcatttggtgcatgtgacacaactggtgatagctggcttaacagccttgtaaccaattggattggggttgacagctgttgatagttggcataaccgacttgtaacagattttgtggcttataaaaggcttgtaatcatctgctgatggattcagaaaagtaatgagaataaaactcgcccagcgaaaaaaaaaaaaaaaaaagcggcc

SEQ ID NO: 89066 - DNA, 532 bp, Zea mays
  Clone ID: MRT4577_181229C.1
cattgggaccctcgaggccggccgggctccccttccaatcgtgactttctactagtcctatcatcgatcctcccctgcttccttgttggtctcctcgcaccctcccccagctgtggattactgccttaagccgccgaatcgtgtgctgcctcaccgacttctgcaacctaaacctatcttgctcatgctctgatgtcgactttaatcttgtgtcgtctcaatatagcatagatctcagaacaatggcctcctctctgcctattctgccgaatcctttcaaagggatgttctcgaggactcataaccccccccatattcctatgttccccgagcgtgcctgatgactctatgctcttgcctattgacacccttccaggctgctatcttgcacccaaaagatgtcgttatcgtgtgaccatattccagctacactgctaagccacttgactctgcgactaaccctgataccacacatcgtctgcaccctttatttctctgtcatccaattcctgaagatctcctgtctctatct

SEQ ID NO: 89067 - DNA, 800 bp, Zea mays
  Clone ID: MRT4577_18122C.1
cggacgcgtgggcggacgcgtgggcggacgcgtgggaatcaacatttggcggatgaaagtcagaaggcgcaggcatttgatgatcttttgggtgttcttgcccatgttcaaatggacagggatgcagtggaagccttattacaacccactgatactattgacaggcatgtacatgaaattcaacagctagtcaaagaagtagaagatcttgaatatgcacttgattctagtggccgaggtgtcaagtctttggaggaaattcaactggagctgaactttctgcagagaacaagggacacattgattgtcgaagtggatgatcttagagatcaacatagaatgctaaatgaagatatgtcaagtgctcaggtgagatggcacaatgctcgggaagagaaagtgaaagcttctagcatattggaaagattccaaaaatctgaagaggaattggtgcttctagctgaggaaaaagaacaactgattgtagaaaagaagcttttagaagagtctcttgatccattgtccaaagagaaagagagcttgttgcaagagtataatgctttgaagcaaaagctggatgaagagtatcatcagcttgcagaaagaaaaagggagttccagcaagaacttgatgctcttggaagacttagtatgaagataaaagggtacttggattccaagaaaaacgaaaagcttaaggaattgcagggaaggcatgttctttgccattctcagttacagagttgcatggcaaaacagcaaagaatatcagctgagttaaacaagagcaaagaactact

SEQ ID NO: 89068 - DNA, 366 bp, Zea mays
  Clone ID: MRT4577_181230C.1
tacagcggtcgcgcccttttttttgtttttttttttttttttttttttttttatattgtgttttttttttttttggacaaaaaaaaaaggcccaatgttccccccctttttttaaattttttcggagggggaaaatttgtggcctttttttccacgggtgctgaaagaaaaaaaagaaaaaggggcccttcttttttataaaaataaccagggagatataccggttgttttgttagtattcagcccatacaaaaaaaacggttggtggggggcgggaaaaggtttagttgattaattaaaagggcgggcttttttttttttgccggacccgcagggggcgggccccccacggacaggcgcgggcct

SEQ ID NO: 89069 - DNA, 354 bp, Zea mays
  Clone ID: MRT4577_181231C.1
ccgggcaaaaaaaataccgctgggtgaattacaaaatactggggcgggtattacccctgctgtgcatcctcaaggggattgaacaaccactcaacggcactccaagggagggggtgctcccagcgcaacaaccaacaatgtgcctcgggcagccaggtgattcaacaatctacattttaagaatgcaaatccgactgtctatccttacctgaacgccactctctcctcgctggacttctttatgggggggaggcctacttgccaaaaacccatattttaggactgacttccacctgctgaccgcctgctcttgggttcatttagctctatcccaccctttttgtcacgcgcatc

SEQ ID NO: 89070 - DNA, 349 bp, Zea mays
  unsure (1)..(349): unsure at all n locations
  Clone ID: MRT4577_181232C.1
gggaaaaaaccgggccgaccgcacccatccgaaccaagcaacatcaaacgtacaatttattttcaccaataaaccaccaacgccggcggggatattttaactcctgatgctcctnactctttctgcatgaaaccctaacgcgacaatttttactcaatgctcacaagctcctatagcttccctacttaccccataccttccatcaatgatagctacagtatgtgaaaacccagctcttcaaccctatatgctccaacaagcaatcgcagcaagcaacatacctttatcacccttgttacaacaatcgccagccctatctttggtgcatacatttctactcaccatcaac

SEQ ID NO: 89071 - DNA, 279 bp, Zea mays
  unsure (1)..(279): unsure at all n locations
  Clone ID: MRT4577_181233C.1
accacgcgtgcgatgccctgcgattcctctcccctcncctcctcatctccccctaagggatcttctgatagtaatcgcaaatagactccatctgaggcgcggctaataatccatggatcagcaagaggccttttcaccaaacctccctagtacccatcctatgcataaataactgccgcttcttcagcagttcggctaccataaacatgtgctctaaatgccacaaggatatttttactagcatgatcaggccaagctgtctacctcctctatctacag

SEQ ID NO: 89072 - DNA, 199 bp, Zea mays
  unsure (1)..(199): unsure at all n locations
  Clone ID: MRT4577_181234C.1
cccacgcgtnnnntnnattatactttatttagcaccaacccgcancccagcgcgggtgagctacttttttgggtcggcacaacaccccanctaccccccactcaggccaccaaccatctatactctcacataaccggcaacaacctacaagatccaaacaacaagaacataatcatatacgattagaaactaaacaaga

SEQ ID NO: 89073 - DNA, 421 bp, Zea mays
  Clone ID: MRT4577_181235C.1
cggacgcgtgggtctccctccgccactccttccatctgctcgctcccactccccgggtagctactaagcgtggcgtccgttaccgcccgcgccccggtcgcggcccttcgcccgtctgccgcatcgctcaagtcgtcatctgccttccttggccactctagccgcctcggtcgcaccgagtcacccacgaggcgcaacctcaaggcagaggccaagggcgagtggctccccggccttccctgcccctcctacctcgacggcatcctggcgtgtgacaatggcttggacctgttgctcctggcggaggacccatagaacctgctgcgtttcgtgcaggcggagctggcgaacggtcggaggtccatgcttggcgtgctcagtatgctcaatccggatgtgctgaccaaaggcggactgatca

SEQ ID NO: 89074 - DNA, 327 bp, Zea mays
  Clone ID: MRT4577_181236C.1
gccttaactgctggatgggctgctgggggggaaggcattgagccaggtggtggagacgtccttctttatgcaaccaaggtgcttgacaagatctagcacagcacactaggaccaaacgatgggtgttaaaatcatcatgaatacaatgaaggatcccttgatgaccatatgtgcaaacgctgacattgatggagctataatcatatggaaactgataaaacaaaaggacctgagttggggctatgatgcaacaaaaggggagtacgtagacatgatcaatggcggcatcatgtatcccttgaaggtgatccgctccgtacttcaaga

SEQ ID NO: 89075 - DNA, 313 bp, Zea mays
  Clone ID: MRT4577_181237C.1
agcagtggtaacaacgcagagtacgcgggggactgtatgtaattcgtacgtacattagttctaggctctttgtgtagatattcgatggaatggaactacgaactaccgctcactgctaataatcattgggttcaaaaaataataataacaagcggttccatcgtttggaacttagaatggtaccaaaaaaaaaaaaaaaaaaaaaaaacaaaaaaaaaaaaaaaaaaaaaaaaaaaaaaaaaaaaaaaaaaaaaaaagggaaaaaaaaaaaaaaaaaaaaaaaaaaaaaggcctttgggttgttaccactgtt

SEQ ID NO: 89076 - DNA, 598 bp, Zea mays
  Clone ID: MRT4577_181238C.1
ctttggaccctcgaggccggccggggttcggtccaaacttgggctgtcggcctcacgttttccactgcttccagaggcttcctctcgagtccgcagtctctcttccctacgaagttcagaagttgtcacaatgactcgcggcgaccagagggaacgcgaccggcagagggcgcaggcgcggcggcccgcggccaaggggcgcgacgacgggctcaccccggagcagcggcgggagcgggacgccaaggcgctgcaggagaaggctgccaggaaggcggcgcaggccgcgggaggcgcctgcgccaagggcggcaagaacaccggcaagaagtagccggggtctttactctttagttcgcaggatctgctcgtgttggaagatctgtatttgcctagatctggaatgcaatgcgatttcgtgggcgttgtctcgagcagtgctgaaacaacggttcacagtaaaatttgtagcaaagatttaaaaagaacgagggcgttggcacttaaaaaaaaaaaaaaaaaaaaaaaaaaaaaaaaaaaaaaaaaaaaaaaaaaaaaaaaaaaaaaaaaaaaaactcgaggaggggcccgggtaccc

SEQ ID NO: 89077 - DNA, 310 bp, Zea mays
  Clone ID: MRT4577_181239C.1
gccggcgtgggagtagttcagcttgcagctgccagaccgcgaccacgcacgacagctcgtcgccgccgtgcccgtggacgtcgctccttgagtggtgcaagtgcaggccctctgagcccaagagtgcgccgtgaaaatccgattgcgacggggccagatcgtgcagtctgtacgcctactgcccgaatacaccgtacgacgagccctaaatggaccgggttgacggctgctagtccaggaggttctggaaggagaggtcgctgctgatggggttccgcaacccgaaaagcaacaacgacgtcaagtgctt

SEQ ID NO: 89078 - DNA, 1661 bp, Zea mays
  Clone ID: MRT4577_18123C.1
ccacgcgtccggcagttgaggcatctgaaatggctgaacatgctcaacgtctaatctctgggaacccatctcttggacaccggatcacggtcatcaaggacaaggttgaggaagtattgcttccagagaaagctgacatactgatttctgaacctatgggaacccttttggttaatgagaggatgctagagtcttatgtcatagctagagacagattacttgctccagatggtaaaatgtttccaacaacaggaaggattcacatggctccattttctgatgaatacctttatgttgaaatagcaaacaaggctctcttttggcagcagcacaatttttttggtgttgatcttacacctttacatggttcagcattccagggatatttttcacagcctgttgtggatgcatttgacccaagattattaatttctccaccaatatatcatacacttgattttactagcatgaaggaagaggagctttacgagattaatattcctctgagctttgtagcttctgttggcactagagtacatggattagcttgttggtttgatgtattgtttaatgggagcactgtgcaaaggtggcttaccactgctccaggatcccctacaactcactggtaccaactacgatgtgtgctttcacagccattgtatgtcatggccggccaagaaataactggccgtcttcgtctcgtagcccatagtgctcaaagctacacaatatacttgacaatgtcagctaaaatgtggggtgtgggtgcggagcaaggcggtatcctacaaacatctacaggaaaacttgaactcaaggagccgtactacaggttgtctcagccgcaatcctacatgttgccacaagatcaacagcagcagcagcaattgtcatctttgcagccacacggatcggagcagcagatgcaggaagggcttagcccaggcatcacgatagaccaagtagacaaagattacggcctcaactagacagacttgagaacctgagttggatgctctgatattccagcaacgagctcaggtctgtacaagtacaacacttcagagtgctccttagcctatgtttgtcaggcgttagctgccaaatgctaacatcacgttcgaggtgtacgagaccattccagagttgtgcagctgcagctaactgctggcgcgcccctgctccgttacttacgagggagtggaaaaaagcaattataaaatgtacggtttcagctggctgaagcctggatccgatctgaatctgccgggcgttcgttcagttggaaaacagcaggaatcctacacacgtgagtcccgtgcgggacggtctgctagatcgcggagtgcatcaaacggtgctgccggcaatggaatatcccgtcccagccagcctgcgtgcttccaccaactttggaagcgatttccttgcgtaccatgccgtctcgtcgttgccaagaagctttcaagtacgggcagtatagatctgtcaactgtcgtacccaaatctgtcgatcgaacgtgtcgacaaatcttctgttgcttaacctcaaagcaaaattgcgaaggttgccatgccagcagcttcctgccaacggtcgtacctaaaactgtcgatgacatctcgtatgtatgcagtctcatcaaaattgtgctgcc

SEQ ID NO: 89079 - DNA, 708 bp, Zea mays
  Clone ID: MRT4577_181240C.1
cctcgaggccggcccacgcgtctccttgggctgtcggcctcacgttttccactgcttccagaggcttcctctcgagtccgcagtctctcttccctacgaagttcagaagttgtcacaatgactcatatccttggccacacattgtttttttttctgttcctgttgttctatcgattcttgtaagggcgggttttgcagttcgttgctcttttatgtcatggtggactcgttgttttttatgttttctgttggaacggcgtgtttcggatgatggttccgtttcgtccttgacctgggctgggctgcacgcggcgaccagagggaacgcgaccggcagagggcgcaggcgcggcggcccgcggccaaggggcgcgacgacgggctcaccccggagcagcggcgggagcgggacgccaaggcgctgcaggagaaggctgccaggaaggcggcgcaggccgcgggaggcgcctgcgccaagggcggcaagaacaccggcaagaagtagccggggtctttactctttagttcgcaggatctgctcgtgttggaagatctgtatttgcctagatctggaatgcaatgcgatttcgtgggcgttgtctcgagcagtgctgaaacaacggttcacagtaaaatttgtagcaaagatttaaaaagaacgagggcgttggcactttgctttgcaaaaaaaaaaaaaaaaaagcggcc

SEQ ID NO: 89080 - DNA, 457 bp, Zea mays
  Clone ID: MRT4577_181241C.1
gctcgaattccgttgctgtcgtaggcatccttcattgtgatggcgttcagcgcgcggtagtccacgcagaaacgccacgagccgtccggcttcttgactaggagcacggggaggagaaggcggagtcgctgcgtcgcacgatgccctgctccatcatagccgcgcactgccgttccagctcgtccttgtgcgcggctggatagcgatatggcctgactgccacggggaccgagccgagcttgagggtgatgtggtgtgcgtgcccccgggccggcggcagaccgaacggtgccgcgaagacatcctcgaaggcgtccaacagctcatcgaggaggggttcggtcactggagtggccgcatgaaggcggggagtgggcggaggcgccgtgccgcgccagctgacgtcctaccctgcatgtttgaaggccatggggcctgccgcgacgttccagacgat

SEQ ID NO: 89081 - DNA, 884 bp, Zea mays
  unsure (1)..(884): unsure at all n locations
  Clone ID: MRT4577_181242C.1
ccctccttacacccccggcccatcgcccttcaggaccgcgtcgtgcaggagctgctcctactcctgctcgagcccgtctacgaagccaggttctcgccaaagtccttcgccttccgcccaggtcgatccccgcatgccgcgattcgcaccatccgccgcagctttgctccgtacctctggtatatcaagggcgacctctccccactcctgcactcgcctgatcctgctctcgtggtcggtgcgcttatccgtgatgtgcgtgataaaaaagtggttgatttgatccgttcggccctgctcaccccggtggtgactgcaagcgatgatgctgcagtaaagaagaagaagaccaagaggaagtaccagaagaagaaggtgctgccagagggggagccgaagcctgacccttactggttgcagacgttttttgggtttgcaccagaggaagcacaaacacagcctgattggggccattgtggggtgctgagccctttgcttgccaatgtgtgcctggatgagtttgataagtggatggaagagaggattaaggagttttacaagccatccaagtccgatgttgtgggagggggatgatgggtattgagcagggcaatacatcatggccagagtttgtccccacgactggccctgacaagacaaggaaggtggactacattcgatacgggggacatttcttgattggtgtgagggggccaagagcagatgcagcggtgcttcggaagcagctagttgagttttgcgatcagcgtttcaggatcaaacttgttaacgagagcctccctattgggcacatcncaaaaggagtcatgttcctggaacatgtgctgtgccggtggtttgggggcccaacactgcgttacact

SEQ ID NO: 89082 - DNA, 322 bp, Zea mays
  Clone ID: MRT4577_181243C.1
cctcgagggcggccgggccgggacatcacacaagtcagctcaaagctctagttctagctagctagcaaagggggggaaaatggctccgcttctcgctgctgccatgaaccacgctgcaggccatgctggtcttaggaggcgcctattaggacccaacaatgagagggtctcacggaaccacctgccgtcttcttctccacacaacagcaaaggaaggtgtaatcttagctttactacacgtacctgcaagagtagtgagccaaaatggagtccaaatgtcgagcccgccccggctaccataaagggagtggatcccccctga

SEQ ID NO: 89083 - DNA, 379 bp, Zea mays
  unsure (1)..(379): unsure at all n locations
  Clone ID: MRT4577_181244C.1
caggcacgccacgtaagctcggaattcggctcgagtggagctacccgaggatttgtgtcttagggaggcacacgccattggagaatgtctccaaatcaagaacgaggtgctacgtgaagctgagcaagcattcgttcacctagatttagaatgagaccataagccagagcattcaattctcaacaagctttcgagcagccagacctgaaccgaacaaatcctgtgtggtagattgccctgcagaatctgctgcagtcattgcattggcgtctagtgctgacatgacaaaactaatagttcaattaagtacgtggccgggagtctaagaacacgcgcatctaagactacnagagatgaacgtgccagatgcagagatttc

SEQ ID NO: 89084 - DNA, 387 bp, Zea mays
  Clone ID: MRT4577_181245C.1
ttgaataagttaagtgatgaagataggaagggtcagctgaaattacatggtggacaagcagttaaagaaaaggactatgccggtgctttaaaattgtacaccgaggcaatcatgttggaccctgccgatgccacactgtattcaaatcggagcttctgccatctgaaaattggcgcagccagggatgctctggttgatgctaatgcttgcataggcctgcagcctgactggccaaaagcttactaccgtaaaggagcttgcctcatgtcgcttaaggagtacaaagaagcacgggatgcattcatgggagggttgaaactggatccttcaaatttggacatacaaaatgcttaccgggaggcagaagaggcgatgatcaaaaatcat

SEQ ID NO: 89085 - DNA, 409 bp, Zea mays
  Clone ID: MRT4577_181246C.1
gagacagctggatgcctgcagtcgactctagagatcctttagcggaatcttattccatattatcaagacataacgatgcaggatgttcatatatgaattgggactatgcgatgtcttattaggcctatcctgaagccaaaggaaatgagatcggaattgctctgggaattccaattccacattttcaagacataacgatgcataaacgttcatatatgaacaggaattatcggatttctgatcacgcctatcctgaaaccaaaggaaatgtgatcagaattcctcggagaatttcaattccacatgttcaatacatacagaacgctaaatgtacgtatatgaattgcaagtatgtgttttactatcacgcctatcctgaagccaaaggaaacgagatcggaatttctgg

SEQ ID NO: 89086 - DNA, 366 bp, Zea mays
  unsure (1)..(366): unsure at all n locations
  Clone ID: MRT4577_181247C.1
aataagggaccaaatttttatagttgtatttatttggcatgatcacacaagaggggacccacaccccctgtcacanggaaaagaccaaaaaggagggactggatttataacatgggatggataaaataagggggggaagctccattacccttcaaaaatacttgaacggagtttttggccgcccccccctggggggggctcttcaacttccttgaggtttcccggggcttctggtaagcctttttaaattcggcgctctccgcgggtgacgggtttttaaacccctcgttgaacttgggcggcggttttttgaccttctcaaaaactccggtgggcttgggggacttaagggaacccattgttttt

SEQ ID NO: 89087 - DNA, 415 bp, Zea mays
  Clone ID: MRT4577_181248C.1
caggcgggcgggggtctttttccaaaaaatgccaacgagctcctccctttccgtgagtgtgactctgcgtgatgacttccaaggaattcttcctcccgaccagtgcgcctggtcggctcgtcgtttactaaactgggagctgcgatgttggataaagcgtgggaaaatgacaacctgaatgcggctaacactctggcattgccgtatatagagtattatgagaacgagggagtggtctttgcctgcgaggttcttggctggtgactcagcgtatcctgagccagagcctctcaacaggaagaggacgaagagctaacgcaaaaccgcctaggtttctgttccaaacaagctacccgatagtgaccgccgacgcctctgacgctgtgcgagtgcgcccccttagcagtaaatcact

SEQ ID NO: 89088 - DNA, 312 bp, Zea mays
  unsure (1)..(312): unsure at all n locations
  Clone ID: MRT4577_181249C.1
cgaaccatcaaccancacagtggccatacaagttattttgttcaagaataaaaaaccggtgtaaggaacaactatccaccacgccaccacacacgtttcaagcgcagaccactatttacatacatgatcagccttctgcaaacatccagacagagctgccatggagctccagttccacgaccgcaccctactcctctcacggtcccccccaacagtccaccccaacacacactcaacactacaacctccgctcgacctaactaaacccgaaaagccccttgccataaaaatcttcaccatgcccatggacca

SEQ ID NO: 89089 - DNA, 1317 bp, Zea mays
  Clone ID: MRT4577_18124C.1
cgttcggcacgagggtccacccacgagtccaaacagcggcagctcgcctccacgcgagccaagcgcccgcaaaaccctagccccgcccgccccaaaccctaggcggctacggtctccgatcccggggtcacgtcctaatggcatcttcgccggacttgttccccaacgttaccttctccgacgtctccgaagccgcagcagggcctgcggccgagggggccaccgccgcgttcggtctcggcgccgccactggagccccgcgcctcagcctcgtgaaggccgaggcggagcccacggtcgagagcgacctcgccgacgcgcaggtatttaagttgggaccgacggagtggctgtgcgtgtgcgacgagtcggaggctaaggctggcgtggaagagtagtcattttcaagagccaattaaggttgttcttaggacagaagctgagagcaaagccttctctttagcttttcaacaatggtaaccaccaagttattagtggaaaagctggtgagaggttggagaattggatcaataattgcttcgaaaagcaaatttgataccaaaaattgaggcatcatcagcaaagatgtatttccactactacgggcaattattacatcagcaaaaacatgttacaagatttttgttcggacaggaacatactatgctgctgtaatggaaaaccgatctgactttgagggtcgagttgtggttgatgttggggctggaagtggtattctgtcgttatttgctgcccaggctggtgccagacatgtctatgcagttgaggcatccgaaatggctgaaaatgctcaacgtctaatgtccgggaatccgtcacttggacagcggatcacggtcatcaggggcaaggtcgaggaagtagagcttccagaaaaagctgacatattgatttctgagcctatgggaacccttttggttaatgaaaggatgctagagtcctatgtcatagctagagacagattccttgctccagatggtaaaatgtttccaacaacaggaaggattcacatggctccattttctgatgaatacctttatgttgaaatagcaaacaaggctctcttttggcagcagcacaatttttttggtgttgatcttacacctttacatggttcagcattccagggatatttttcacagcctgttgtggatgcatttgacccaagattattaatttctccaccaatatatcatacacttgattttactagcatgaaggaagaggagctttacgagattgatatccctctgagttttgtagcatctgttggcactagagtacatggattggctt

SEQ ID NO: 89090 - DNA, 340 bp, Zea mays
  Clone ID: MRT4577_181250C.1
acgaaaaaacaacgggctgctgatacaggatctcgaactacaccgcgtagagggcagtctctatcggctgcatagatcaagcagctgtcagaacattataagagcaaatacactgccccggcgcgtggctgcacatcttggactgcgatcacacctggcgaggccctataatgctccacggatctctgtgcccatactattaggcccagctggaggcagaagacaggcagcaactatttatccgctcctactgcaatgagtgtgagtctaatacgacaaaacactcgatattgcgagcaaattttggggttgagaacaatgtcactagctgtcatttact

SEQ ID NO: 89091 - DNA, 233 bp, Zea mays
  Clone ID: MRT4577_181251C.1
cgcagatctgtaggcatctctgggcctatgttcagaccttagacccaggcgccaacctagggggccgtggtagaatttggggcttatcaaaccagcatatgtctagaaacgagctgctccaatgctgcaacgaaaagaggacgacgagcttcagataatgctccatatgaaccttcatggctaccctccactgcagactgagtccaaactcatgaagccgacctccccagctt

SEQ ID NO: 89092 - DNA, 378 bp, Zea mays
  Clone ID: MRT4577_181252C.1
attcggctcgaggtcgaacatatgcgtgcattttaggataagttcctgcactccgattaagagggcgaccttgcaggcgggtgcgcaggcgccctgcaactgctggttgcagccgccgccgtaggcacagcggctacatggaggtcatgcaggcggccgtcagcgacccctgggctcggttcaccgcctagagaagctgtgggtcatggccaccagcggcgcccaggactacggcgtcaagctgaacttgcttttgccgacgctgtagacgttgatgagcaccgcctggacggcgatcgtgcccttggagtcgcccgacggtggactcagatcctcccactgccaggtgccgggactcgacatgtcccacaggaaggt

SEQ ID NO: 89093 - DNA, 331 bp, Zea mays
  Clone ID: MRT4577_181253C.1
acgcgtacgcgtacgcttgcgaattaattctatttcgtcctccactataccggcggaggcgacaacgtacttgttcctctacatcagtaaccacctccaccgtcggaaattaaaaacattcttgccaccgagaccatgggcattccccagggagttaccgttaccgtggcgggcaaactcttgaccgtggaagggccccgcggtaagctcaccctcaactttaagcaccttaacctcgactttcatacttcaaacgccgttcgcaagctcatagtctacgcctggtgtggaacccgtcgaaccatgtacgttattcgcaccgccatatatc

SEQ ID NO: 89094 - DNA, 397 bp, Zea mays
  Clone ID: MRT4577_181254C.1
ctctcgccaggtcttgctgctgcctgcatttttaccctcctctccgggagagcctctctcgcgttcagctcccctgcccttccacgccacgccgaccaaggcgccaaaagaaaacgccgcgccactacgtggcgagggagtttctcacggctgcgttgcttgccacctcgtcttcgcggagggcggagggcctcgccgccacgacgatggaggttgccgaggcgcccgcgcccgcgcccgacgaggacggcctggacgagcgtggcgtggcgctgcacctggacctcccgaggctgctggccggcgtcgtctccggcgccctcactggcctcttcgctctcgctggagctctgacgggggcggtcaccggcgcggtggcgggcagagcttccgacag

SEQ ID NO: 89095 - DNA, 438 bp, Zea mays
  Clone ID: MRT4577_181255C.1
gaatatgactgttctgtacttttttggggtttcgtttgttttttttctatcttggtccctctgttaaaacaaggggactggcacctattactttggggggggccgagaatgacctgccaaaaagctttttcagatgttcaactgaacacaaaaaatgaaagggggcccccccaaatttgggcgatggcagggggcgcccacgagaactaaaaaaaagcgtgaccaggggaaaaaaatgtgcaattccaaaggggggtggggggccgccccaaaacttttgaaaaaaagggaaaacccttgtttgggcaaaaaaagaaaaacaccattgagccatcttttgggttaagggaccacaatcattcgtgggggaaaaaaaacggggggcaaaacagcgcccattggttcaaaaggaaaactgtgatttcgcaagaaggcacc

SEQ ID NO: 89096 - DNA, 156 bp, Zea mays
  unsure (1)..(156): unsure at all n locations
  Clone ID: MRT4577_181256C.1
tggatanntctgcagaaattncngtcccttaagcagggggtaanncaacgcagagtacngnncggggggaaatggcagnnnccaaatcgggcggtagaacnntccgtccaagagcttaaatacatggcgacgagacctgatagtcgtacaatgtac

SEQ ID NO: 89097 - DNA, 266 bp, Zea mays
  Clone ID: MRT4577_181257C.1
tagaaaataaacagagttgtctttgttggaaactttttacgtgtcaataccctctcaatgaaacttttggcatatgcactggattactggtcaaaaggtcaactaaaagcattgtttctaggacatgagggttactttggagccgatggtgcacttctggggctgcaaaatttcagctaaagcatcaggtctctctctctgctattaatgtcttccaagaggaactaaaaccggaggcattattactgcattgttggtcactggga

SEQ ID NO: 89098 - DNA, 744 bp, Zea mays
  Clone ID: MRT4577_181258C.1
atgaaagcgacgacgtggcgcggcgcgccggggaccctaccggccgccagcgccaaggagaagaggaggaagcaaaaaacgcccgcgccgcgcggcttgatgtgcggctgcggcagcaccaggtcggtctccgtcgacatctccgccgctgtcacgacggcggcgcggacgaggcgacgcgtttccacggcgggggagccagcatctgcggcaaagacgacgacgacgacaggctgcggccgcggcgctgacgaagcgagcgccgagggcacgcccagcgtggactcgcttctgcggcagctgcgggagctggagcgcggcgtccgcgcgctgggcctgggcgtccgggaacgggaggagggcggcggcgcggcatcagggacggcgacgaccgcggaaacggcggcaaggccccgccggcacgcgcggagcgcgagcgtcgtggagcggctggactacgggagcgtggcggtggtgacggagtcggcggacccgctgcgcgacttccggcgctcgatggcgcagatgatcgtggagaacggcatcaccggcggcgccgagctgcgcgagctcctgcgccggttcctcgcgctcaacgccgcgtgccaccaccacctcatcctccgcgccttcggcgacgtctgggaggagatcttcgccgccgccgccgccggccgcgatggcggtagagctagcaaacggccacgcggtcgcgctggcgctggcgctgacactctaagctag

SEQ ID NO: 89099 - DNA, 717 bp, Zea mays
  unsure (1)..(717): unsure at all n locations
  Clone ID: MRT4577_181259C.1
cattgggtacctcgaggccggccgggactgtgttggccgtcggccttatccctggccacgctccatcgtcttcctcccacgcccgcctgcttccctgctcggatttcatccgtgccaagctccatccctagtcgtgccttgccttccgccgcccaaccgttatcttccacctcccaactcctcccagccatggtcgcccctatctgctcgcttggcttccagctccatggcttggctccgtcttcctgcgcgtcgtcgttcccctcgcagctcacggaggccgacctcggtagcgcccccatcgccgtggagctctctcggtcgtctccagccccacgcccactgcagctcacctccacaccgtgctcctctgttagccgcgacctcgccttggttcccatggcgctcggccgcgcatctcccaggtgctcggagtcgaccgccgcgtagcaggacgcggagacgaacgcatgcagactgtggtggcccgcgcgacgggactggccgtcccagctccttgtcctcccctcgactctctccctgctggagctccttcgctagtcgccatcaaccgtgctcggccttgctgtgtcaagagatggagaagaaaggagttagatgaaggaagngaagcccaatggcacacttgcttcgtgttcgaaatcaagccatgtggtgtttgatggactgttcgaaccgaagagcatggacgatctc

SEQ ID NO: 89100 - DNA, 1021 bp, Zea mays
  Clone ID: MRT4577_18125C.1
acaggaaaacttgaactcaaggagccgtactacaggttgtctcagccgcaatcctacatgttgccacaagatcaacagcagcagcagcaattgtcatctttgcagccacacggatcggagcagcagatgcaggaagggcttagcccaggcatcacgatagaccaagtagacaaagattacggcctcaactagacagacttgagaacctgagttggatgctctgatattccagcaacgagctcaggtctgtacaagtacaacacttcagagtgctccttagcctatgtttgtcaggcgttagctgccaaatgctaacatcacgttcgaggtgtacgagaccattccagagttgtgcagctgcagctaactgctggcgcgcccctgctccgttacttacgagggagtggaaaaaagcaattataaaatgtacggtttcaggtaaagtgaagatcggatgcaactaacaatggcgtgcatgttgtttaatatattattgctagaaattcatttattttccatgttcagtgaattgtgttcaatttgtgcgtctcgtggcgtatctgcatgcacaaatcttaagcatgtttgattcatgtggcttcattcgcagtttgttttggttaatttgagatccagtggtgtttgtaaactgtgatgaaatctttctgacggggggctaattcctgtagagcagctggctgaagcttggatccgatctgaatctgccgggcgttcgttcagttggaaaacagcaggaatcctacacacgtgagtcccgtgcaggacggtctgctagatcgcggagtgcatcaaacggtgctgccggcaatggaatatcccgtcccagccagcctgcgtgcttccaccaactttggaagcgatttccttgcgtaccatgccgtctcgtcgttgccaagaagctttcaagtacgggcagtatagatctgtcaactgtcgtacccaaatctgtcgatcgaacgtgtagacaaatcttttgttggttaaccttaaagcaaaaatg

SEQ ID NO: 89101 - DNA, 739 bp, Zea mays
  Clone ID: MRT4577_181260C.1
cgactgacgaggcagatcgagcaactgcacaacgaccactgcgcgcacgtcgaggagctcgtctacctcaagtgggtcaacgcctgcctccgccatgagctccgtgaccatgacggccagcccaccgccgagcaacaaggccccagcgccggctccagagacctgtcggccctggagctgagcaagagcatgagcttccggtccagcgagagggccaagcagctcatgctgaggtacggtagccccggcctggaccgcttcgaccctgccctcttctccccgctgcacgagtcagtcgacggcgacggctacggctacgagcggtcgccggcgcacagctacgagcccgagcggagcccttgcgctaggcccggcggacggcgacggcctcgtcctcccccgccgcagcaccggggaagaaagcggggccgcgcaggctcaagcttctcggtaacatcaagaagctgctgccggcggtcggcaagagaagccactcaaaccacgggcacgggcacgccggccacgatggcaggaaggcgccggcgccggctccggctcggagggacgagtacctcgacaaggccatgcagtggctgtcggcccacgacgtgctcgacggcgaccactcgtacgtgagcacgccgctgtcgtcgtgcgagaggacgccgctgagcagcgccacgaccagcacgaccggggactcacgcgcccgctacggcgacggtggtggtggccgcag

SEQ ID NO: 89102 - DNA, 352 bp, Zea mays
  unsure (1)..(352): unsure at all n locations
  Clone ID: MRT4577_181261C.1
ttttaaaaaaaaattttggggggttttttttttttttttggggagagggggttgaaatggtttttaacaacggtgggttcattaggccctgatacatactcgtggtttttttcaagggccaaaaaatcacttgggggggtttgaaggggggcttttttcccccctaattaatccccaacccccaaaaaaggggaagattggagaaattcgcaaatgaatccgtnaaaaacggccatagtccatcttcattttttacatacttgggnaaaccccgctggggcccagggggggagtcctttccctgggggggggggggggggcccccccgccgtggtgtgttttttgggggggg

SEQ ID NO: 89103 - DNA, 1086 bp, Zea mays
  Clone ID: MRT4577_181262C.1
ccccagcgtccgcccacgcgtccgcccacgcgtccgcggacgcgtggggcgcctcggagaggctcgcgtttgcgcaattgcgctgccagtgccaccggcccctgcccttccccagccgctggtcccacgcgcgtccagcccacgggcaccaccgccgcaccaggcttttagctctcgacgcgtcgccgccgaccacagcacggctagcgtgtcgattcctcccgctctcgtcgccggatccccccacccgacgcgcccacctctgagtccaatggtggcagagatccgttagggcgaggactggtcccagcttgggtcgggtctccttctccagcttgtgagatcgacactggttgacactgattgtagcacttcgtggcgccttattgggtcgcgggtgcggtttgcgctctacaaattttgggtttggtttcgctgaaccctcatgacccaagcgaagtccactcctgggaggagggagatgggccgggcgcgatcgccggaaccgctcgatttcttcatatggactgtcgaggatgttggattatggctggaagaaataaatcttggtggctacagacaagtatttcaagaaaatagtgtcaatggagaatatctagaaagcttgtccatgtttactactgagcagattctgcgctttattaggcggtgccatatgaaatggggagactttatcacactgtgcaaagagttgaggcgcattaaagtggcgtgccttaaaggggagcaagaagtccgcaggccatggtgggcgccggcatgcctctccgtagttttcgtgagggcagccaagcagaacaggaagtcccgtgttgtctcgttgaagctggaaccataatgcttgtcaagcacttcgaaccgtcgtgcgctagcctaaagtggtatggaagctgttttcgctctgggtgcatcatgctcaactagtctgtcttatcccttgttagttcttcatatataaggtttggaacagtaatctgttgtagacaaagaaagaaacatataggtgattcaattcctggtcaccaaaccagcccataatatgcagatgtttcctggctccctaca

SEQ ID NO: 89104 - DNA, 261 bp, Zea mays
  Clone ID: MRT4577_181263C.1
ggcgtcacaaagctccccgcgctcgccctcctggcgcggcgagccccccctacacacagagggccggcgactatgaagccagcgagccagggcgagtaacagacctaccgcttgcaagggacgccgctcgagcgacccaactagctcaactgcatcccagagcgaaggctccaccggccgctgctgcaaaggcaccaaccaccggtgcgtctgccccagcgactgccactgctgcctccacgctggagctgcgctgagcaa

SEQ ID NO: 89105 - DNA, 682 bp, Zea mays
  Clone ID: MRT4577_181264C.1
gaccctcgaggctggccgggaattgcgctgccagtgccaccggcccctgcccttccccagccgctggtcccacgcgcgtccagcccacgggcaccaccgccgcaccaggcttttagctcgatttcttcatatggactgtcgaggatgttggattatggctggaagaaataaatcttggtggctacagacaagtatttcaagaaaatagtgtcaatggagaatatctagaaagcttgtccatgtttactactgagcagattctgcgctttattaggcggtgccatatgaaatggggagactttatcacactgtgcaaagagttgaggcgcattaaagtggcgtgccttaaaggggagcaagaagtccgcaggccatggtgggcgccggcatgcctctccgtagttttcgtgagggcagccaagcagaacaggaagtcccgtgttgtctcgttgaagctggaaccataatgcttgtcaaaagtggcatggaagctgttttcgctctgggtgcatcatgctcaactggtctgtcttatcccttgttagttcttcatatataaggtttggaacagtaatctgttgtagacaaagaaagaaacatatagggtgatttgacgactagggaattgtagggaattggaggggatctattggaggaattcttcttgctattcaagggattt

SEQ ID NO: 89106 - DNA, 139 bp, Zea mays
  unsure (1)..(139): unsure at all n locations
  Clone ID: MRT4577_181265C.1
tggagcangaagatgcaggcagagcacgggactcagtcgcggacacgcgacatgttcgcgcggcncttccgcaagaaggggtacatcacgctcaccacgtacctgcgcacctacaagatcggcgactacgtcgacgtca

SEQ ID NO: 89107 - DNA, 1081 bp, Zea mays
  Clone ID: MRT4577_181266C.1
aattcttctccctgtccattcggtgttatctctgggtatgtgtggtactaacccgatctgtccgttcactactcgattagggtctccttctccagcttgcgagatcggcactggttggcactgattgtagcacttcgtggcgccttattgggtcgcgggtgcggtttgcgctctacaaattttgggtttggtttcgctgaaccctcatgacccaagcgaagtccactcctgggaggagggagatgggccgggcgcgatcgccggaaccgctcgatttcttcatatggactgtcgaggatgttggattatggctggaagaaataaatcttggtggctacagacaagtatttcaagaaaatagtgtcaatggagaatatctagaaagcttgtccatgtttactactgagcagattctgcgctttattaggcggtgccatatgaaatggggagactttatcacactgtgcaaagagttgaggcgcattaaagtggcgtgccttaaaggggagcaagaagtccgcaggccatggtgggcgccggcatgcctctccgtagttttcgtgagggcagccaagcagaacaggaagtcccgtgttgtctcgttgaagctggaaccataatgcttgtcaaaagtggcatggaagctgttttcgctctgggtgcatcatgctcaactggtctgtcttatcccttgttagttcttcatatataaggtttggaacagtaatctgttgtagacaaagaaagaaacatataggtgatttgacgactagggaattgtagggaattggaggggatctattgaggaaatcctcttgctattcaagggattttctatggattctcttcaattcctggtcaccaaatcagcccataatatgcagatgtttcctggctccctacaaggtctgctctctgctctttcaaatcttcctgagtcgttatggtgcatgcatttttctaaaagaataaaagattggtcaagaagacccgtttccatttttctcctaggtgatgtaattaacagatgtttggtttgaagaatcaatttattccgaaaaaaaaaaaaaaaaaagcggcc

SEQ ID NO: 89108 - DNA, 1155 bp, Zea mays
  Clone ID: MRT4577_181267C.1
tcgagggccggcattggaaaactcgaaaccggccggggctttctagctcgctatgcccacgagctcgctttctactagctctcgacgcgtcgccgccgaccacagcacggctggcgtgtggatccctcccgctctcctcgccggatctccacccgcctcgctctctctgagtccagtggggcagagatccgtgagcgcgaggactggtcccttcttgggttgggtctcttctccagctcgcgagttcgccactggttgacactgattgtagcacttcgtggtgcctgattggatcgcgggtgcggtttgccctccacaaatttgggtttggttccactgaacccccatgacccaagcgaagtccgctcctggaaggaaggagatgggccgtgggcggtcgccggaaccgctcgatttcttcatatggactgtcgaggatgttggattatggctggaagaaattaaccttggtggctacagacaagtatttgaagaaaatggtgtcaacggagaatatctagaaagcttgtccatgtttactactgagcagattctgcgttttattaggcggtgccatatgaaatggggagactttatcacactgtgcaaagagttgaggcgcattaaagtcgcctgcctcaaaggggagcaagaagtccgcaggccatggtgggcgccggcatgcctctccatagtgttcgtgagggcagccaagcagaacaggaagtcccgtgtcgtctccttgaagctggaaccataatgcttgtcaagcacttggaatcgtcgccgcctgtgctccaatcctccagctctataggaggcagcctgcgcacaccatcgtgcgctagtccagagtggcatggaagctgtctgttttcgctcttggtgcatcatgcacaactggtctctctctctctctctctctctctctctctctctctctctctctctctttatcccttgctacttgttcttcatatataggtttggaacagtagtatgttgtagacaaagaaagaaacatataatgtgcagatggtctctggtctgctcttttcttgcaaatcttcctgagtagttatggtggtgcatgcgatttgctaaaagaataaaagattgtggtcaccttaccagcccataattaaagggggtgcc

SEQ ID NO: 89109 - DNA, 756 bp, Zea mays
  unsure (1)..(756): unsure at all n locations
  Clone ID: MRT4577_181268C.1
attgggtacctcgaggccggccgggacttcactcaagccaatccacgagctcaagtcgaacctgacccttcggtcgtccaatcgtttaccaactaatactatctttaataaacacctccgccaacacccaaccttttccctaccaccaagttctataccctaatcagtcaagatgcgtggattcattgctgctactcttttcaccgctgcccttgcggccccccactacggctcttacggccagcccgagtacggctctggctacagcaccggcgaggagacccccgccgtgagcgtcccggtcgagtcccccactcctgaggtccccagctacccggtctctacacccgctgtctcctcggccaccaagcccgcctaccctgaggagacccccgccgtgtcttccagcgtcgttgagtcctccagcgttgaggttcccggctacggaactccttccagcgtctccgttgaggtccccgttgtccccaccgagagcgcctacgtgcccgaaacccccgaggtccctgccaccagctccgcacccgctgctgagacctccgcacctgctggatacccgactggacccgcccccgtgccaagcagcgttgtaccctcggcccctgccggtactggctcttacggcgtccccgttccctccgtgcctgctgctccttacccctcggccccggcatccagcgttgttgccccatacccatccggcagcggntctccccctgctcccccgggcggcaccgc

SEQ ID NO: 89110 - DNA, 668 bp, Zea mays
  Clone ID: MRT4577_181269C.1
ttttcttctcgctatgccccgagctcgctttctactagctctcgacgcgtcgccgccgaccacagcacggctggcgtgtggatccctcccgctctcctcgccggatctccacccgcctcgctctctctgagtccagtggggcagagatccgtgagcgcgaggactggtcccttcttgggttggatgttggattatggctggaagaaattaaccttggtggctacagacaagtatttgaagaaaatggtgtcaacggagaatatctagaaagcttgtccatgtttactactgagcagattctgcgttttattaggcggtgccatatgaaatggggagactttatcacactgtgcaaagagttgaggcgcattaaagtcgcctgcctcaaaggggagcaagaagtccgcaggccatggtgggcgccggcatgcctctccatagtgttcgtgagggcagccaagcagaacaggaagtcccgtgtcgtctccttgaagctggaaccataatgcttgtcaagcacttggaatcgtcgccgcctgtgctccaatcctccagctctataggaggcagcctgcgcacaccatcgtgcgctagtccagagtggcatggaagctgtctgttttcgctcttggtgcatcatgcacaactggtctctctctctccctctc

SEQ ID NO: 89111 - DNA, 1130 bp, Zea mays
  Clone ID: MRT4577_18126C.1
ccccggccccggtgcccgccctttttttttttttttttttttttttttttgtgtgcatgtcatcagattattgtactaagagcaggaacagcatatggtcgaggctgaaacagaagactagtatacagatccgtgtaggaaagaaaaaaaaaaactagctttgaacacgctgaaaacgacctggacactgaatgcaaacatcacccgccatacaggtctctcctcgaagctcgaaaaaaaaaaactagctttgaacacgctgaaactgaaaacgacctggacactgaatacaaacatcacccaacgccggcgggctctcctcacagctcgtcctccgaccggtacttgtccgcgtccgcccgccggtgcttccccttgccgtcgacggcggtgacgtcgggcccggcgaccctctccttcacctcctccagcctctccttggccgtgtccgccgtctcccgcgccttctccttcaccctctcatacccttcgccggccttctccttggccgcctccaccgtctcccacgccgcgtccttggccgatgccgtcttctccgtggccttccccttggccgcctccttggactcctgcgccttcttgccggccttgtccgccttctcccacgccgcgtccttggccgcctcggccttctccttcgctgcggccgtcgtctcccacgccgcgtccttggccgccgcggccttctccgccgccgcgtccgtggtctggctcagcgtctcctgcgccttgccggccgcgtccttggcgctctcgtacccctgcccggctttctctcgggccttctcctcgaccttggccttgcccttcttcgaccgctcgtgcgcctcggcacccctctcgctcgccgcctcggcggcctccttggtcttctgcttgccgtactccgccttgctggacgcttcgccggccgcgcccttcaccgtgtccttggcctggtccttggcttgcccggccttgttcgacgcgccggccgcggcatctcccgccgtctccttggcgtaccccgccttcttccctatctcggacgcggtgtgctgggcggactcgcgcgcggacttgacggtgtggcctgccttgcgcgcggtctcctcctcgtcgacgtcggc

SEQ ID NO: 89112 - DNA, 609 bp, Zea mays
  unsure (1)..(609): unsure at all n locations
  Clone ID: MRT4577_181270C.1
ctcgnattaggtctccttctccagcttgtgaggacgacactggttgacactgattgtagcacttcgtggcgccttattgggtcgcgggtgcggtttgcgctctacaaattttgggtttggtttcgctgaaccctcatgacccaagcgaagtccactcctgggaggagggagatgggccgggcgcgatcgccggaaccgctcgatttcttcatatggactgtcgaggatgttggattatggctggaagaaataaatcttggtggctacaaacaagtatttcaagaaaatagtgtcaatggagaatatctagaaagcttgtccatgtttactactgagcagattctgcgctttattaggcggtgccatatgaaatggggagactttatcacactgtgcaaagagttgaggcgcattaaagtggcgtgccttaaaggggagcaagaagcccgcaggccatggtgggcgccggcatgcctctccgtagttttcgtgagggcagccaagcagaacaggaagtcccgtgttgtctcgttgaagctggaaccataatgcttgtcaagcacttcgaaccgtcgtgcgctagcctaaagtggtatggaagctgttttg

SEQ ID NO: 89113 - DNA, 1065 bp, Zea mays
  unsure (1)..(1065): unsure at all n locations
  Clone ID: MRT4577_181271C.1
ctagaataaattgattcttcaaaccaaacatcctctgttaattacatcancctaggagaaaaatggaaacgggtcttcttgaccaatcttttattcttttagaaaaatgcatgcaccataacgactcaggaagatttgaaagagcatttgaaagagcagagagcagaccttgtagggagccaggaaacatctgcatattatgggctggtttggtgaccaggaattgaagagaatccatggaaaatcccttgaatagcaagaggatttcctcaatagatcccctccaatttccctacaattccctagtcgtcaaatcacctatatgtttctttctttgtctacaacagattactgttccaaaccttatatatgaagaactaacaagggataagacagaccagttgagcatgatgcacccagagcgaaaacagcttccataccactttaggctagcgcacgacggttcgaagtgcttgacaagcattatggttccagcttcaacgagacaacacgggacttcctgttctgcttggctgccctcacgaaaactacggagaggcatgccgacgcccaccatggcctgcggacttcttgctcccctttaaggcacgccactttaatgcgcctcaactctttgcacagtgtgataaagtctccccatttcatatggcaccgcctaataaagcgcagaatctgctcagtagtaaacatggacaagctttctagatattctccattgacactattttcttgaaatacttgtctgtagccaccaagatttatttcttccagccataatccaacatccgacccaagctgggaccagtcctcgccctaacggatctctgccaccattggactcagaggtgggcgcgtcgggtggggggatccggcgacgagagcgggaggaatcgacacgctagccgtgctgtggtcggcggcgacgcgtcgagagctaaaagcctggtgcggcggtggtgcccgtgggctggacgcgcgtgggaccagcggctggggaagggcaggggccgaaggcactcccggccggcctcgagggtcccaatg

SEQ ID NO: 89114 - DNA, 814 bp, Zea mays
  Clone ID: MRT4577_181272C.1
aaaccccgctctacccacgcgtcttttgggtgtgctggacaacctggggcgggtgggccagcagcacgggtctgtccaccaagggcgccaacgaggtgctcctcgtcatcgaggcctacaagacgctccgtgaccgggcgccctacccggccagcttcatgctcgcacagctcaccggcagctacgccttcgtgctcttcgcggggggggcgactccctcctcgtcgcatctgatcctgagggcaaggtgccgctcttctgggggatcactgctgatggctgcgtcgccttctctgatgacattgacatgctcaaaggatcatgtggcaaatcgctcgcgcctttcccacaaggttgcttctactctaacgcccttggaggcctgaagtgctatgagaaccccaagcacaaggtcactgctgttcctgcagacgaggaagaaatctgtggtgcaactttcaaggtggaagggtctacagtcctgacagcgctgcatttttaggagatttccgtgtggaagcgtgggtggagcgcaatgcaatgcagaactgttgtacatgcatggtggattggtggtgtaacatagtggcaagtcatgttcatgcaactgagtctatctgtgtaatgcatctttcataaaaagagaagtactggaggcacttaagggttgatggttgtgtgtgtaccctgtatccctaggtgttcaacttacatggaacttgggtggttgagacatggtgctaatataatcgatcggttgcgtggaatatgtgaagtttgtaatctgttcctaataacaaagctttgtttctcc

SEQ ID NO: 89115 - DNA, 492 bp, Zea mays
  unsure (1)..(492): unsure at all n locations
  Clone ID: MRT4577_181273C.1
aatcccgggtcggcgggcgtccggctcgctgtgtcccctctctctcacccatggcttcggcggcggcggcaactcatgtgggggcttagttgcttctgaactactacaacctgcttcaacaaaccccctatgtcgtccaccagttctacagcgaatccagcaccatggtccgcgtcgacgacctcaccggcacgaccgcttctgtcaacaacatgatggacatacactctctcatcatgtctttgaacttcacccaaattgagatcaagactgccaattttgtgaactcatggggcgatggggtgctagttatnnncnctnnnttttttcattaccaatgtgttcagccacggnnggaaatttatccatatgttcttccttgcccctcaagagaaaggttactttgatctcaacaattactttcactttttttaccaaaaacatgtgcattctgcgccattgattgctttatatgacttctattacaatttg

SEQ ID NO: 89116 - DNA, 543 bp, Zea mays
  Clone ID: MRT4577_181274C.1
gcgttcgtactactgttttttttttgggagagagagaagatagaatccaaactgttcttggtgttagaacggtaggggatggagacatcagacgacatgagacatgggcatgctaattgtaacacccaaaattcctatgatggtaggtttgaagaattctccaacaaaaacaagtaaaaatgtcttataataagaattttctctacttttgaaattactcttcctaaaataaagaaaagatgaacagggaatcttgaattaaactaagcatttgaaaaaagatattgtcttgcactaaatgagggcactattaaccaactttaggtttgaatcttgatactagaattataatttgaacttcagaaaaaaaaaacaaaggaaaagttttcaatttgtttaattaagggacttgcttcctttgtatgcatacaagcatttttctaagaagataaataattagtatacaaacatacttgcatcatgctggttctttgatgtatttggtttatattcaaagccccaaactaagtttgaatttgtttg

SEQ ID NO: 89117 - DNA, 278 bp, Zea mays
  Clone ID: MRT4577_181275C.1
cggccgcccttttttttttttttttttttttttttttttttaaaaggtcctccaatagattcttcattcaaaaatagcatgatggtctacaggtctacaaaaaaaaatatagctcaggaatgctaaaaaaacaatgggggaaaagggagggagaaaaatagcggagtggtcgagttttggagtaatctaaaacacaagtaatggccggtggtggagcactgaagctttggacgtaggccgcaatgccccacccattcattggtctgatctgaaaaatg

SEQ ID NO: 89118 - DNA, 314 bp, Zea mays
  Clone ID: MRT4577_181276C.1
gatccgatgtggtgtcccccgagcgcgcgggccgcgggtgcctagacaggacacccggcgccgactactccttctagcccttagagcgtgggaggcacgccgagagcctgcacagcgacctcgactccctggaccagaacctgacccaaagcctggaggggcgagatcataggaacccctttcgaggacgccgacgacaaggccaccccggtggagccctacgccgaggacgcacgagctccaaaggttccgcgagtgcgagctcatacacggtcactaggccatgctcagagagcctcggggccctcaccgtg

SEQ ID NO: 89119 - DNA, 158 bp, Zea mays
  Clone ID: MRT4577_181277C.1
actgaattttcgactcaaaagccctcaataccaccggagggggggtcatttattatgtctgaacaccacacatatagtgcctcaccctcatacactgttctatctttaaccacatccatccccacctacctaacgcaccaatcagattcttcacaccc

SEQ ID NO: 89120 - DNA, 372 bp, Zea mays
  Clone ID: MRT4577_181278C.1
ctgacgcgtggcctgctgtcaccttttaaagcacttcctttcctaaccgatcacagtggagcggtttcgatgcgggagctctggtacgtggcaggcgggcgtgcagctgggagtgtcccgtgtggtggacgctgctcacacaccttaggagcctgatcggcgcgtgcggagaagggacgcggagcggactcggccgggccttgttgggtcccgcgacggcgcatgcgcgcggggaccgcagctgctcactcgacgacctactttctacggagcccggccggagggctgatgccgcgctgctcatagcggcggctggacgttccgggagcctggcggtgaccgtggctattgctagagcgaaggttacaggtg

SEQ ID NO: 89121 - DNA, 717 bp, Zea mays
  Clone ID: MRT4577_181279C.1
attgggaccctcgaggccggccgggaaaaaaataaaaaaaaaaaaaaaaactctgctttctccacgatgtccgggagcttcgtcaacgtcggctgccgccgtgcgccggcgctggcggtcgggtggtggtcgcggcgccgggtgctggcgggatcggaagatctccatcccagcctcgcggtcctagcgcttgagcttgcccgcaaggccggcgccggcgccggcgccacagggctgcgcgcagatctcacgtgcggcgccggtccgtgcctccccacctgatctcctcccccccatcctacgcgccgggcgcccgcgctggtcgtccacacgctgctccgctgtcgcgtaacgcgcatctttggacagcccagacactccgccttcgtttggcagcagccaagcaaagcaagatcccctcttcctccactttctatttgtccgcagtgctagctatcttgtcttgttgtggactcgtggcattgaaatagtcagaatcagacgtatgtccctaaccttgacatggtttggttgcttaagagttcactctggtttggaaatcgaagcagcttgcactgacatgataacacagtattgcgttagacaggatgtgcaacatggtgctgccattccttctttctctgtcaagttccaccgtttatgatcgttcgttgagaagatatgatatgccttgaaaaaaaaaaaaaaaaagcggcc

SEQ ID NO: 89122 - DNA, 267 bp, Zea mays
  Clone ID: MRT4577_18127C.1
aacactttgagttgcatatattcacaacaacaacatggctgccactgctgctgcaggcatagcgcccatgttttacttcttctattaacagtgtcaaatgtcttcgttcctccaagaactgctccataatagaccctcttataacaacagtgccctcaaaccgtggcatgtttgggtcacacttggtggaacctttgtccattaattcgcacaagttgtggggacctataatttctgctgctgttgcacaagaagaggctgttgttg

SEQ ID NO: 89123 - DNA, 573 bp, Zea mays
  Clone ID: MRT4577_181280C.1
gccggccgttccgggatctctcactaccaccaccactgctccggataataccatatgtaggacaaatagcgccagctatgttctcactcctgatagaagtgttgatcgttcggcttgatgacgggagaggatcatcgcgcctgctgtccacggtgattaagaaccggggcgtgcagacagataccctatacatcgggtcgccggacttacttggtgccggagaggccgtcgcctgccaggagctatcctgcagtaggtgaacctcaaatactcgagcgttggtaactactacctcataacacaagatgcgtacgtggacaccatccccgtcatcgtggtggtgtgctcgagcgatttgtccagtgtcatgcgagagcatctgcgccacaaggtgtgtcactaggatatatacgacatatgcgcagtgctcgccttactcggcataccctcatttcaccatctccgaactacattctgcccagtcccatgccagagctatgcatccacttcgcatgttacgatgcgcaacgactagctcacggtgcccttagagatacttcacggacctgtatc

SEQ ID NO: 89124 - DNA, 426 bp, Zea mays
  Clone ID: MRT4577_181281C.1
attctccctgctcatcggcggctactacgtagcactggggtaccatgagcttgaggccgggcacgagcacgtatccgtacaccgcgcttccgctgtctgctggcgacccgtacccttccactgtcactgctgccggacatggcgctgcgagcgtcgaaattacacaacggctacatgatggcactccgatgcacgtctaccagcaacgtgctcatgcctacgaggttcagcacgcagaacctgcgaccgttgaagcgcgtgatccttccagcctgaaagatcgatacttgggactggtaacaacacatgacactgagcctcacctccatggcgcatacctaccagcctgtgagacatctagctatcacgaacggtactgtattcgtgactatgggaacgattgcgtcgaacccaattgctacggat

SEQ ID NO: 89125 - DNA, 681 bp, Zea mays
  unsure (1)..(681): unsure at all n locations
  Clone ID: MRT4577_181282C.1
cgccccccggcggcggcgttgtctctgacgatgaacaccgccgtcctgggcttcttgggagcgggcgggcacgccaccgcctccgccggtatcctccacccttcccccctcggcgtcacgggctcttcctcctcctcgccgtcctcggtggccgccgcgtgccgtcggcggccggccttgacctcgacgcgtacgggcttgagctggtgcagcggcagggcggcgatcccggcgccggacaggcccagcacccaggcctcgctgccgtcttggtggtggtgcccgtgacgatcttcccctcgcgtgctatgcacgagccgcttcttcttcttctgcttcacctccggcagccccatgatcatctgcttcttcttcttctcctcctcctctcacctctctgcctgcttgttcttgcccaaccaagaatgcaggcaatggaaatggagtgtagggtgcgtgtgtgtatgagagtgagtgagagctttgttggagcacacaaagaaagaggggtgctactggaggctaaataagcgaggctttaggctttctgagctctgccttcttttgacaaagctcaaggggttactcttactctagtttgtgtgtgtgtgcgcgcatgtataatatatacatatataaaaaacgccgggaattnccggaccgagaaactggcaggcgtac

SEQ ID NO: 89126 - DNA, 564 bp, Zea mays
  Clone ID: MRT4577_181283C.1
aattcctataatttattttttttgactctttttttttttctttcggggctgaaagatttacgcccggcagggggggaaaaatattggtttatggagggagacactgccccaccggccgttaattaaccggaatttaacttaacagcccatggatcccctccaaacagttttgtgccctccacaacaggaggccccaaaagggcattctttccccaacaaaaggtctatttggcaggtgcttagggggcccaaaactaccactcaacatgattgccccagaggcatgtatcaccccccgatgatacatagccccggggtatcgaaactcaccgccctcctttctgcatttggaatcttgccttgggccttgaaaaagcagaagtaccaggttttgccaacgaattgcccccaaaaggttgaatgggggaaaaatcgtcggcgtcgagctcgatgataaatcctgtaaaggcctttcgcccactcaatattatttttcggtcacacgatggaggggggtctgaaaaactcttgagcccaggatcagactgtattgaatccagtagc

SEQ ID NO: 89127 - DNA, 236 bp, Zea mays
  Clone ID: MRT4577_181284C.1
attactgttcagaactacatgaaacatctgattgtttagcgcacagagaaccgaaaatgctgcataaagggcccacattgtgaaggacacaaatgctgattttagttaaataaactctaattaggccacatgacaaaaaaccagcctttaagttccaatcggtgaatctgttggaataatacaaatgggaaaattaagttgacatctaatacccttacactgcacgatatgcattt

SEQ ID NO: 89128 - DNA, 1073 bp, Zea mays
  Clone ID: MRT4577_181285C.1
aattccgttgctgtcggcggaaggagacttggaaagcttgccagttatctgtcttcgatataggacagcaatgttgccaaagttgcacccctcagcggtaccagatgtaatttcaatgattttgtcaataacaaatgcgcattgggaatcttcactgtggcactccttgacagtgatcttacagccagaagggttgtcggtctctacaagcctaggatgatgccgcttagtgttgttctgaattagagcagttgctgcttcaacaattgcacgtgtggagcggtaattcttgctcaacctgatctctttatgatccggaaaatctttacgaaatgaatcaaagccagatacatcggcaccattgaaactgaagatggactgatcttcatcaccgacaatagttatatgattgtgggaagctagaatcttcagaagacaatactgcatagcactggtatcctgaaactcatcaactacaattgcccgccacatatcctgacactctttgtacacttcaggaaaatttgtgagaagggttatagatgagttaatgaaatcatggtaatcaagagcattacaagatcttaatatttcattgtaatgtcgaagaacagaagctcctgtcaaatcaccttttttttcatagtcctctggagttcttcctgaagcttttgcctgtgtaataaatttctgccactttttagctttgtctttgaaagaattttttatgtccccatcatactgtttagttgtatctccaacaccattatttttgtcattttccaaaaggcgctctgtctcaataagcgcccttcgttgctgtccatgtccgtagattatgaattcagatgtgcgtcctagcttttcagcatgtgttctgcaaagctgcaagcaaaatgagtgaaatgtgcttattgcaatatccttggcaactgcctttcccgccactgtccctatcctctctctcatttctgaggcagcagccgtggtgaatgtcatagcaagaatgtttggtggtggaataccctctttgagaagtgtgagcaccctaccaaccattgtggaagtctttc

SEQ ID NO: 89129 - DNA, 183 bp, Zea mays
  Clone ID: MRT4577_181286C.1
agggtacagaaccctttaaaggtttttttttgagcttgtctatcaatttacaacttttcaagatgaatcaaagacaacccgggggggaaattccaagttccccctattcaaaactttgtacacttcccttctaccaataagaatggggactataaataaaaccgttaacgggacaaggatcgg

SEQ ID NO: 89130 - DNA, 293 bp, Zea mays
  Clone ID: MRT4577_181287C.1
gttttggctatccgttatgatgcttttggtgaggattcaagttctgcaatgggagttgagaacagagccaaattagaggccaggttgagaactttggaagacagagggataagaaaaataagtggaacaggaaaagcattagcaaaaacagaaaaatatgaacacaaaagttgaagaagaggaagaagaaaaagtggcagaagaagaagaaacatctgtgaagaagaagaagaaaaggggtaaaaagaaacacattaaggaagaaccactttctgaggtagaccatgtaccag

SEQ ID NO: 89131 - DNA, 302 bp, Zea mays
  Clone ID: MRT4577_181288C.1
taggcccaactttctacctcacgagtatactcagacgacgacaaaccccattttattgcgtattcacaactaaacaaccttcgtgcatacatccttacaatttccttattactattgcatacatactattcattcaaactctccttctctcaacaaattacacagtaataaacaactcccaaacttttttaataacattccaactccactaaataagatgcacaaatcttaccataaactacctcgcattttctggacaatagccacataatgagacaaataaaaattcaactataaccccc

SEQ ID NO: 89132 - DNA, 287 bp, Zea mays
  Clone ID: MRT4577_181289C.1
ttttttttttttttttttttttttttttttttttttttttttttttttttttgggaacccaaaaatgaacccattttatacattgggttattaatagatacccattttacaatggggtaaataaaacccccaagatcggtaatttgataaaatcacagccctgctttcttttttaaacaaaataccccccccacattacgaacaatttaacacattaagcgactttagggccctcagggggcattggtgagcctcctggagttttttctggtctcaccttgggaccc

SEQ ID NO: 89133 - DNA, 302 bp, Zea mays
  Clone ID: MRT4577_18128C.1
aaagaaaccggaaaaacccccccatttaaaagggccttttattctttgcacggatgctcaaattccaacgctttcagaattaaaatacattcaagcgggacagtccaagccaaatttttaacttttagcttttccagccacgcccaaaaaaacaatcaagtttggaaacccatttaaccaaccaggggtcacaacaaacacaaggtgctctcacatggattggacccacaacatacaaaggggggagcctattcccaaaaaaactttcggtccaatggaaacaaacaaacgtgttatgcaaa

SEQ ID NO: 89134 - DNA, 519 bp, Zea mays
  Clone ID: MRT4577_181290C.1
tttttttttttttttttggccaaggattatttgacatgcattgggatcggcagattaagaatgggatggctaagggttcgtcgaaaagaagccatactcgaatcaatttgctaaaattacggcacaaataatgctacctacaagctgtaagtatatgcactgccctcttcaagatctaagatatcttgctgtctgttcatggaaggaaggtcccgttgttccatgggaagcaaggtctgcctctcttccaggttgccatcctgagcccacgggtgctgctggtatctcctcagcctctccagcctctcagccgcctccttcatcgtcgggcgttcctctccactcatgctcaggcatcgcatcacgaggtgggcaatttcttcaagcacctcggctctcatctcgttcctcacttggctgtcgagaagctctttatgccggccagccttggtcgccgtcatgaagcatgacactaggctcctgtcttcctctggcccgtcgaagtagagcgccttcttc

SEQ ID NO: 89135 - DNA, 298 bp, Zea mays
  Clone ID: MRT4577_181291C.1
ctaaaaacctgcaaaggagagggggagatctttttttttttatggccgtcccaaaggtctagtggtggtaaacccaaaaacggatttatcggatggaaaccagaaaaaatcaattttgccacacgccaacaagataccagccggtaatcaaattctgatggtaaacgtcgtcaaccaacccgattaaaaacagagaaaacccatcctttgtgaatacaccggcccccctttttattaccaaaaaaaaattctgtgaccttatgaaaaaaaacaaacatggagcattggcggacataaa

SEQ ID NO: 89136 - DNA, 393 bp, Zea mays
  Clone ID: MRT4577_181292C.1
cggcacgaggcggcattggatgatgtcaggcggttccgagaggcagtgatggagatcggcgaggaggatgatgaggatgaggttgagaaatgtgaaaaggaaaatgacgggtactggagtgagtgagtgagcagtgtaaaacaaagctgagctaaagcatggaaaaaagtggctatgggttttgttctggtaaaatgttttttgttctgaattcagaggatctattcgagatcttaaggagcccaagtatttctagctttagctgtactcttgtttaggtcatcatttgattttcaggtgaacaatccgattgggcatcttaaacatccctatttgtaggatgaaactcagaactggtggctaccaataaagtgctgttttttttcgcccccc

SEQ ID NO: 89137 - DNA, 343 bp, Zea mays
  Clone ID: MRT4577_181293C.1
aattcgcacgaggccgaactctctctccctccctcggccccctccccatcccccgtgtccttccttccatctaatcataaccgccgccagcgccaaaaccctaccccacccacccaccgagggcctccccggggccggcctcccccggggccgggggggggcactgccccccgccgggcatgggtctcgcgggcctcgccaccatgggccaaaacctggccctgaccatggccgggaaagggttcccgatttccgtttacaaccgaacggccgccaagggggactccaccctgtcccgcgcccggaacaagggctcgttgccggggctgggcccccgcgaacc

SEQ ID NO: 89138 - DNA, 772 bp, Zea mays
  Clone ID: MRT4577_181294C.1
ttatgttgatttagtatgtcttaatttagttactttcaattcttgatgctaataatatggatagattgtgacactactttctggcttgagcagaaatgagtttgttgcatatagcagaatatagtttttgtagctggcaacaatgaccgctctttggatgatctaaaaactattctgtagtcaggtagttaaatatagctgaatatacattattatgttttattaatcttatttgttttttctgtcaaaagaacacacctctccatctttcggtgctaggtggatcaccgtctaaacaatccaccaccagaaccgccctaccccaagatagtttttcagttggagaaaacatttaagacaatattttctcgtttgttctccatatggggcttgttccacgccacttgaaggaagaagggaatggtggtgttaagttcggacaatacatctacacatcttggagcatcggcatcaatgttttcaatcttctcaaatttcaaattattctggtctcttcgtgcaaccataaaagtttattaagtcacttatctgagtggtctaaaagtctagcatatttttgttcctctgcctgtcgagacggatcaactgacatgaataatatccagtgaatactgcaagagctattcatgatctgccgtgaactagctagtatgatataactcagtttgtggagtgctaatgcacaaacaggaaataggatgatacttcatgtatatttttttatttcatgaaaatgaactatagctcgtgc

SEQ ID NO: 89139 - DNA, 1389 bp, Zea mays
  Clone ID: MRT4577_181295C.1
atctttcttcagttttagatgtgatagatattggtatgaaagataaaaactagaatgctatgtctgtcaaaggagctttcttcagttcaggcagctccatctcagtcgttgtacccattcaacgccgagctggtggcagcgatgcaggagatgatccagccgaggtgtacaagtacatgttagtggacgtcacctgccaaagatacacagtttctactgtttttcagttggagaaaatatttaagacaacattttcatcgtttgttctccatatggggcttgtttcacgccacttgaaggaaggagggaatgatggtgttaagttcggacaatacatctacacatctatgaaatgtacaaccacgatgtagagcatagagtttctaaagttgggtaagctgtttggctgttttatagaaatttgtatcaacatcaacatagatttttagtcccaaacaaattggggtaggctagatttgaaacccaacaagaagtcaccaaaaagagaaagagagataaaggggaggggaaaagcttttgagagaactaaaagagaaaatgcctaatcacggttcgggcacgtggatagcttctttccaagcatttctatccaaacacaactcctttgggtgtgtggggtgatattagaagcttcatgttaggtgtttgatactttcttgaatataggatttttgtgtgtgtggtgtagtataaataatgtccatagttgaataccaaaatgtggatattgtacagtgggagttatggctgccttcttcattgcttgatcttagttgttggttgcaatcttctaacttagagtatgatgcttgaagagatttggatgatgttggagatgtgctttggtgtagttcatctctcccgaatcaaggttcataccccactattttggtttcctaaactgataggcacaactagaaattatcgagtgatgtctaactttcctacctgtcttgcaatgcagagtctggtttatggggctaaggtagaggctgccatcgccattggattcaatgacttcattacatatgctctgagaggcatttggttctaccagaaggataacatggagatcaagaaggccaatggcaatggcacactgatccctgagcagatctttgaaaagactaggagaagttctagatgaattgatgcttggctgaagagggatgtcagatttgtacaatgctcacccacaaagaataatacatttctccaatgtccactgttttgaaaaatacctccattccaatgtttaacattctaacgatgtctgaatttattgtaaagagacacatgattgttcattgttgtaacttatgtacaatatatgcgtgtgtgaaataaagatcatcttggagcaccggc

SEQ ID NO: 89140 - DNA, 1570 bp, Zea mays
  Clone ID: MRT4577_181296C.1
gcagtattcactggatattattcatgtcagttgatccgtctcgacaggcagaggaacaaaaatatgctagacttttagaccactcagataagtgacttaataaacttttatggttgcacgaagagaccagaataatttgaaatttgagaagattgaaaacattgatgccgatgctccaagatgtgtagatgtattgtccgaacttaacaccaccattcccttcttccttcaagtggcgtggaacaagccccatatggagaacaaacgagaaaatattgtcttaaatgttttctccaactgaaaaactgaaactgaagaaagctcctttgacagacatagcattctagttttatctttcatactaatatctatcacatctaaaactgaagaaagatcatctgactcaggaaccataaacacacacttttgccatcggatctaatgattttaaagacgtgctcaagaggcatgtcctcgttctgtgccccaacggacgtggaggcggggtcgtccccacgaccccggacagcgaacgagaactcactgccggtgtaggtgaggctcttgcgtagcttctgcctccgttgctgctggtggtacgacgccacgtgctccagcactttctcccagatcgatcgcccctaaggcgatgccatggacgcccccatcgtggccacgaaggacgaggggagtcggggtgcaagggtgtggacggcgccggatgttcgggggtggggagtggagggggaggccaagatggaggcaagtgggcagaagagagatgtgggagaaaattgcggatcaaggagagcggcgaaggtagttcccacgcgtccgaccacatagtaaatctaagagaagaagaaaaaatatgtgattggaaacaatgaacataagtgtttgaaagtgcagggcgatacgcgtatagaaattatccatcggctggatggctaataaagcagagcagtacctgaaactgaagaaagctcctttgacagacatagcattctagttttatctttcatactaatatctatcacatctaaaatttgattgtaaagatataggagttgtagaaagagaaaaactaaaggaaaaaatgaataatacgaattacaaaatgtagaacatacactttacaaaatatgcacaatccagttctattccaaatatgtgttaaaataaatcatattgcatgagctatattaaagcataaaagtacctaaaactgaagaaagatcatctgactcaggaaccataaacacacacttttgccatcggatctaatgattttaaagacgtgctcaagaggcatgtcctcgttctgtgccccaacggacgtggaggcggggtcgtccccacgaccccggacagcgaacgaggactccctgccggtgtaggtgaggctcttgcgtagcttctgcctccgttgttgctggtggtacgacgccacgtgctccagcactttctcccagatcgatcgcccctaaggcgatgccatggacgccgccatcgtggccgcgaaggacgaggggagtcggggtgcaagggtgtggacggcgccggatgt

SEQ ID NO: 89141 - DNA, 1070 bp, Zea mays
  Clone ID: MRT4577_181297C.1
attcggctcgagaggtgatagaatataccctgctgaacttccaatcaaatatgctgggtactccacatgcttccggaaggaagctggttcgcatggaagggacacagctggtatcttcagagtccaccagtttgaaaaaatcgaacaattctgcattacaagcccaaatgacaacgattcttgggagatgcatgaagagatgctaaaaaactcagaagattactataaggagattgggctaccataccaagttgtttccattgtctctggcgctcttaatgatgctgctgctaagaaatatgatttggaagcatggttccctgcatcaaagaccttccgagagttaaatgatgagcagtccaagcagtttgttcatatgctgaactctaccttgacgaacacaaatatgctagacttttagaccactcagataagtgacttaataaacttttatggtttcacgaagagaccgggataatttgaaatttgagaagattgagaacattgatgccgatgctccaagatgtgtagatgtattgtccgaacttaacaccaccattcccttcttccttcaagtggcgtgaaacaagccccatatggagaacaaacgatgaaaatgttgtcttaaatgttttctccaactgaaaaactaatgattttgaagacgtgctcaagaggcatgtcctccttctatgccccgacggacgtggaggcgaggtcgtccccatggccccgaacagcgaacgagagctcgccgccggtgtaggtgaggctcttgcgtagcttctgcctccgttgttgctggtggtacgacgccacgtgctccagcactttctcctagatcgatcgcccctaaggcgacgccatggacaccaccatcgcgaccgtgaaggacgaggggagttggggtgcgggggtgcggatggcgccggatgttcgggggcggggagtggagggggaggccgagacggaggcaagtgggcagaagagagacgtgggagaaaattgcggatcaaggagagcagcggaggtagttggggaaggaggtttcatcccggcccggccggcct

SEQ ID NO: 89142 - DNA, 418 bp, Zea mays
  Clone ID: MRT4577_181298C.1
ctctcctcagccaaagttgacagcagcctacaagcgccagcagagctcttcccggtggccatggccaagcccccgcttcagacagcaacgatcatcctgctcgtgctcctcgtggccgcgtcgtgcctccacaccgtcgacgccgccgctttagggttctcctggggcaagtgttgcgttcggtgcgcgagggcgaccacgcggcgggcacgggaggcgtgcatgagctcctgcggcctaaaatgcgagttttgcaaatgcgggcctgcgatgccgccgcgcgacatccatgactgcccctgctaccgcaacatgctcaccgccagccccaagaagaggcccaagtacccttgagactgagactgcgaggccggctcacacgacggcattcatgggactgcgactgctgcttgcaact

SEQ ID NO: 89143 - DNA, 2542 bp, Zea mays
  Clone ID: MRT4577_181299C.1
gccggtgctccaagatgatctttatttcacacacgcatatattgtacataagttacaacaatgaacaatcatgtgtctctttacaataaattcagacatcgttagaatgttaaacattggaatggaggtatttttcaaaacagtggacattggagaaatgtattattctttgtgggtgagcattgtacaaatctgacatccctcttcagccaagcatcaattcatctagaacttctcctagtcttttcaaagatctgctcagggatcagtgtgccattgccattggccttcttgatctccatgttatccttctggtagaacccaatgcctctcagagcatatgtaatgaagtcattgaatccaatggcgatggcagcctctaccttagccccataaaccagactctgcattgcaagacaggtaggaaagttagacatcactcgataatttctagttgtgcctatcagtttaggaaaccaaaatagtggggtatgaaccttgattcgggagagatgaactacaccaaagcacatctccaacatcatccaaatctcttcaagcatcatactctaagttagaagattgcaaccaacaactaagatcaagcaatgaagaaggcagccataactcccactgtacaatatccacattttggtattcaactatggacattatttatactacaccacacacacaaaaatcctatattcaagaaagtatcaaacacctaacatgaagcttctaatatcaccccacacacccaaaggagttgtgtttggatagaaatgcttggaaagaagctatccacgtgcccgaaccgtgattaggcattttctcttttagttctctcaaaagcttttcccctcccctttatctctctttctctttttggtgacttcttgttgggtttcaaatctagcctaccccaatttgtttgggactaaaaatctatgttgatgttgatacaaatttctataaaacagccaaacagcttacccaactttagaaactctatgctctacatcgtggttgtacatttcatagatgtgtagatgtattgtccgaacttaacaccatcattccctccttccttcaagtggcgtgaaacaagccccatatggagaacaaacgatgaaaatgttgtcttaaatattttctccaactgaaaaactgcaaaggtacatgtaaaatatttctgtctcaatataccatgatcataaaaagataaaagttcaaataaactagctatcaaaagctcaagcacacctatcatgatcccgatttctgccttgaaaaatcacacaacctttggttttgcgcaagctacgaattaattatcaccatgaaaaaaataaaatgtgtaccagtagaaactgtgtatctttggcaggtgacgtccactaacatgtacttgtacacctcggctggatcatctcctgcatcgctgccaccagctcggcgttgaatgggtacaacgactgagatggagctgcctgcgtaggaaaggtgggatggaggagactgcggcggcatgagcacgaaagagagatatagaaaagaaatgctaagtttactctttactctagcttaatgaacagtcagcaaaaacatttttggacttaaatgatattcagtttccaaatatgtttttattatggttaaatatatttgtaaacacagtatgtcgccttgtacacattctgatccgtgagacagaatgttttcaaccttataacatgaaaaatatatagaatcgaagcattttttattatcagtgttatattactgatattcatgtgatatttttcctaaaggacatgcaatttgttggttgtttggaactaaaaacaaagtgaatagcagaaccaaatcctattgtaccaaagtctattacaggttgtaccaatatctaaatgagtagttgaacctgcacatacctatcttggggtagggcggttctggtggtggattgtttagacggtgatccacctagcaccgaaagatggagaggtgtgttcttttgacagaaaaaacaaataagattaataaaacataataatgtatattcagctatatttaactacctgactacagaatagtttttagatcatccaaagagcggtcattgttgccagctacaaaaactatattctgctatatacaacaaactcatttctgctcaagccagaaagtagtgtcgcaatctatccatattattagcatcaagaattgaaagtaactaaattaagacatactaaatgaacataaaatacacggaaaaactaaaatcacatgagtatacaaattaacctacaaaccaaactgagaccacaaccacatagtaaatctaagagaagaaaaaaattatgtgattggaaacaatgaacatgtgtttgaaagtgcaggggcgatacacgtatagaaattatccatcggctggatgactaataaagcagagcagtacctgaaactgaagaaagctcctctgacaggcacagcatactagttttcctccctcatactaatatctatccggctcgag

SEQ ID NO: 89144 - DNA, 532 bp, Zea mays
  Clone ID: MRT4577_18129C.1
gtgtggggtttttttttttttttttttttttttttttttttttttttttttttttttttttttttttttttttttttttttttttttttttttttttttttttttttttttttttttcccacaccaaaaaaaaggccccaacctattttcgggggttgaaggggccaccaatttaaactttttttttgcccccacaaaaaaaaaaaaacctaggctttaaaaccccaacccaaaaaaaaaaaaatcctgaaacgggaattggccccccttcccaaccaaaggaccccaaattgttaaaaaatttttattataaaaccgaaaaaaaaatttttttttaatgaaaaagccctccccccccttggtcccccccgaaaattccgaaccggtccctgaagggtaaccatttttccttaaaggaagccaaataaaacctgggcaaaaaaatggaaaaagcttttccctgggaaaaaatttaaccccccaaaaatcccacaaaaaaaacaacccggaaaaaaaaaggaaaaaccccggg

SEQ ID NO: 89145 - DNA, 425 bp, Zea mays
  Clone ID: MRT4577_1812C.1
ggtgatgggggaaaagggggtgcgtcgtcgccaccctgttccttggtcgtcgagtatcggccgtggtgcattgtcgggccatgatgaactcgtctatggcggtgggtaatgcgggggacctctgtgatcacgcagatttctcgccagagtacatgcgccaccgcaggactgccctttgccatggtcgggggccgtcggcatgtctaccccggtcaagaacaggtaccgtcaagatgaggagcatgaaggttgttgcgatgagtttgtgagaggtctaggtcatcgtctcccagtcaactatgcttgctggatcgttgtctccttatgatgtaattatttaattattttgtatagaactccgttatatattaaagatgtgacattcgtttcaaaaaaaaaaaaaaaaaaaaaaaaaaaaaaaaaaa

SEQ ID NO: 89146 - DNA, 252 bp, Zea mays
  Clone ID: MRT4577_181300C.1
gaaatgtcatgtctgcgttcaaatatcagtctacgtgcggaacgacgggggcaatagctggaggattcactccaccatcagtgcaccacgccaccatccctgcctcaatcaacgtctcatcattacggacgcctataaatgcctaggtgcgtgcgggcactaccactaccatacagggcatgactctcaacccggacaaggataggctacatacggtaacgatggcgcctgtggacatgatgagcatgtgcg

SEQ ID NO: 89147 - DNA, 312 bp, Zea mays
  unsure (1)..(312): unsure at all n locations
  Clone ID: MRT4577_181301C.1
cctcgaggccggccgggagnggtttcgaagagagacacaactcctcgatattcacaagggcaagggaggcgcgcgcctcgcgcctcgccacgcctcccccggtttagacccggaggagagggagctgagtaaaaagcggacgacccgggaatgctcgccgtcggggggcgccaccacgaggaggtgctccatgagcaaagacgatggacgcggacaagctggataacggcggaggagggggagacgcatagagcccgcgccgcggcggaaagcacgacgactggaacggcatgccctgcatcatcgcaaacg

SEQ ID NO: 89148 - DNA, 652 bp, Zea mays
  Clone ID: MRT4577_181302C.1
ccctccctcgagtttttttttttttttttttttttttttttttttttttttttttttttttttttttttgggggggataaaatctttcgcattttgttttccaatttttggtaacggggggcttccctccctccgtaaccaaaaggcaaaaaaggggaacccttgggcccgaagaaaaaacagggggaagcaggcggagcccgggccaacacgaaaacggaacggggggaaagcggggaggaacaaaatagaagggggcccaaatccgggggcgttcggggggggggccgaccggaattaaagctttgccccggggggacccaacctgggggggggggcccctaagaacgaccggggggtaggggggggttatggcgcccccaatgggggggcccacccaaaaaattccttggggggaccaaaccctggggggggggggaaagaaccggggttccaaggatactacccggtttggggccgcccccggggagggggatgggggccagggccacctggaccccggggaacccaatagaaaagggggctggcccccccccttgggggtcacggcccccgccctgggggccgggggcgaaaaaaacgtcgcaaaaaaaaacaaacgggcccgggacctgggaggcaaggccggggc

SEQ ID NO: 89149 - DNA, 367 bp, Zea mays
  unsure (1)..(367): unsure at all n locations
  Clone ID: MRT4577_181303C.1
cccaagcgttttttttttctttttttttttttttttggaaatataacccctcatttctaggaggccacatacctcaaccaaaaaacacctcggccgcaaccaccctgagccccggccgcgccccccctccggacacttgccgggcggcgggggccccgtccaacgggcccccgtccccctaccaagcgcggcgtgaccatggactgcccgcctccttacctctacttttcctcgcgccccctgtcccgccccctctcattgcgtccgcttctctttcccctcccttnacgtcttttcctttcgctggcgggctctccttcctcccttccgtctccgggttttccctttngggcccctggcccccccc

SEQ ID NO: 89150 - DNA, 229 bp, Zea mays
  Clone ID: MRT4577_181304C.1
cggacgcgtgggcggacgcacgggtgctttgataataattactgaacttgcaaaatcaggggaggaggagcatgacctcaaaacaagccatcaaggacgtgaaaaataacagaggtgcctctgcctgggccggaaaggagaagaccaaagacggcgtgcatgagaaggcgggcaaagctagggcacacataccctgccgagaatgcagtggctgtagacacgatgcacg

SEQ ID NO: 89151 - DNA, 360 bp, Zea mays
  Clone ID: MRT4577_181305C.1
ctatgtaatccgattcaactactactaatccactacatcaagaaacttatataagtaaaataaataaaaaaacattaccttcaccttctactctctctaaacaaagctaatggtatttacggtcttcttcggccgacaatacagctcaggaacccatcttgccggcaggtttgcatccagcggccgagatcagcgcggtcgtcttctcctggagctcgcgaaccacctccaccatggagggccgcgtcccggggccgtcgccgatgcaccgcagcgcaagcgccgccacggtggccgcctcgtgcgtgtcgtactcgtctccgagcccggacgctgggtcgacccgggggtgccggtccg

SEQ ID NO: 89152 - DNA, 1413 bp, Zea mays
  unsure (1)..(1413): unsure at all n locations
  Clone ID: MRT4577_181306C.1
ttggggcactcgcctccggccgggtcgccactcttataaagccgccgcgcacgcgctctggcttcttccagtccagtccaccatccgcgccatggcgatggcgttcgcggctgcctccgcctggagcctcagtcttacagccttctccctcccgctgccccagtctctgcgcccgaaacctagccaactcctccatggcgcgaccagctcgttcccgcggccacgccgatgcgggtggggcgccgtggtgcgctgcgcgaagcgcacggggaagcagcggtacccgtcggagaagaagcggttgaacaggcgaaaacaggagttgctacgccaggccgccccggaggaggggagcaaggggcgggagtccgggtactggcggctctcgaagctcgctgttcccgcccgcgacgacccaggcaaggacttcaccggcatctccctgccgctactccaggccatcgccaaagccatcaagttcccggttccttctatgctccctgacgaggctttcactgtcatccgcaagtcatttgacgcacgaaaggttttgaaagaacctcaattcacttatattgttgatatggatgttaagaagattcttaatattgagccaagggcatgggattttattgctcggttggagcccaaacttggagttgtggaatacatgaccgaagagaagttagcagttgatctggtcagcatgctaaatgtgaacttggtgcagaagttaccttattggagcgtggtcagcctgttgaacagagaggtcgtgacattggtgcactagcagttagacgaattctacaaccagagagcaacttttgctttggcgagggtggtgcaggtacgtggagtgatgggaagctgatgaccaggataggaaaaaacactgatggtgttcaggctgttatgaaaacatttgttcactttggagcccctccaaacattttagttgatgggaaaccacacttgggtactgataaacttgttccactgctgcgaaaattcaggcatcacttaagagagttgggtgttaccataagatttaatgctagagtagatgaccttatagtagaagatgggcaggtaaaaggaattgtggtctctgatgtggaactacagccaggtcctgccagccagaaactagcatttgacgcagttgtaatggcagttggtcattcagctcgtgacacatacagtatgctttggcagcataatgtagacatgagcccaaaaagttttgctgttggcttaagaattgagcatccncaagaattgataaacagtatccaaaggttgcacatctttacccacatgccgtgttacccatttgccaaggggactagaatttccattcatctataccgaggagacgaggcagggtagcaatacgaggcctttccaaag

SEQ ID NO: 89153 - DNA, 775 bp, Zea mays
  Clone ID: MRT4577_181307C.1
aatgggcatctccctgccgctactccaggccatcgccaaagccatcaagtgcccggttccttctatgctccctgacgaggctttcactgtcatccgcaagtcatttgacgcacgaaaggttttgaaagaacctcaattcacttatattgttgatatggatgttaagaagattcttaatattgagccaagggcatgggattttattgctcggttggagcccaaacttggagttgtggaatacatgaccgaagagaagttagcagttgatctggtcagcatgctaaatgttagtagcaaaggttccaataatgtactaggaattagagacactcatagtggcatgatttatcgtcaacaaaagaagcccagagtggcagttataggaagtggaccatctggcttgtttgcttcccttgtgctaggtgaacttggtgcagaagttaccttattggagcgtggtcagcctgttgaacagagaggtcgtgacattggtgcactagcagttagacgaattctacaaccagagagcaacttttgctttggcgagggtggtgcaggtacgtggagtgatgggaagctgatgaccacgataggaaaaaaactgatggtgttcaggctgttatgaaaacatttgttcactttggagcccctccaaaattttagttgatgggaaaccacacttgggtactgataaacttgtttcactgctgcgaaaattcaagcatcacttaagagagttggggtgttccatcagatttaatgctagagtagatga

SEQ ID NO: 89154 - DNA, 543 bp, Zea mays
  Clone ID: MRT4577_181308C.1
caaaaaaaaccaaaaaaaaacccccttttttggcaaaaaaagggaaaaccaaatttaacctttcaaaaccaaaacccgggggccaaccaaaaccatcggaaaggggccccccatttataaaaaaaccaaaatacccggaggagggggggccccaaaccaaaaaccaggctttgcgggggggcccacagcccagttaagcccatctcccctcccaaaggaatttcggtgggggggcccctggcccctcgggcctaaattaaagggccagggccccaaaaaacaggggaaccagcggcaagtggccccaaaagaaaacgggggcggaattcggcaaattcctcaacgagggccccaatggcttcaaggaaatggcccccggggccaaaaaacccaacaaccctgttgtcgttttgccccgaaccctgaaacggggccccaagttggttcccaaaaggcccgggtgttttccccggccgggccacgagcgtaaaaaaggccacaacccggggtttggtcctgccccacccccagggagggaaggcc

SEQ ID NO: 89155 - DNA, 403 bp, Zea mays
  Clone ID: MRT4577_181309C.1
ggcaggggaaccacaagctcagttggtgggaacctgtagcacgtacacaatacgaatacatggccgtttctagagcagcagctacaggattgttttacagtacaggcccagtttacaacccccaggtgggcttgaaacaaaagctttgcctttttttttaataagggggggggctcctttggaccaccctttgactttgcccttatttttaaaaataaacccttttttctttccctttttttttttttttagggcttattaaaataccggggataaaagtccgtaataccgccacttgtagctcttgtccaccccaaccccaagcagggccttgaataccataaagcaccacttgaacttggtgcccataacgaggaggaaactaacctgggaggtggcgggg

SEQ ID NO: 89156 - DNA, 193 bp, Zea mays
  unsure (1)..(193): unsure at all n locations
  Clone ID: MRT4577_18130C.1
taccgtctctattatctntcgcccaacgtccgatgacaaatgacgtcggtctagcctgtaaaagacactatattaagttagtggaggtggatagacgaagacctgctcgtattccattttgccagtttgttctcagactcgattttgatgatgtttatggcgtaatcaagaaatcgcttgttttgagtgaaga

SEQ ID NO: 89157 - DNA, 1001 bp, Zea mays
  Clone ID: MRT4577_181310C.1
tcggccgggcttgctcgccaggccctgccaggactcctgcgaactccaacctcatcgcctagccccgccaccgtttctaaagtggtgatcacaacttccctctgttgtcagtgaatacaatttttgctagtaccttgctgatgtatgtgtgtaccgtgtacgtgtgtgcaattggagcataggaatcccatgaatgtgtggagaagcaagccccaacacgacgcccgctagattttcgataaaatgagtgaactagggtttcgtcgttgttcttgcaaatatcgaatttagtcttggtgggctaattctctatttttgttcgttggttgattgatggactgataattctctaggagtgtgtaggttcatgatcattttttatttctgattctgaaaacaattggttcctagtaagatattttacttgagtgggtgtggtcagattttggtagggcataggtcacatattgtttttttctgatatcttttgcactacattctattttaaccattgaattttatgttaacctcattgcagcctttgcaggcacttcctatatttcttgataggatgtttcatcatgttcttgctgtaatattgtcagtgacatttgttcttgcctttggagagggatcatatctgagctcagactggggctcatgtcgctcggcctaatgtagcagcacagtcatttcaggagaccattgatagtatgatgaggtcgatgcaaaaaaaaataacagccaccttcatcaactattaagcttcagtcgaggtcaagcgtgtccatctttaagtctgcttgaccactataggatctgtaaccttatggatgttatagtagctagtaacaatatgcttaatatttagtacttgagttgaagttataggattttctttggaattgaagttaaaggatttgtagatatatgttttgacgttatatgattctctaatggatgaaatattcgtgttcaaaaaaaaaaaaaaaaaagcggcc

SEQ ID NO: 89158 - DNA, 453 bp, Zea mays
  Clone ID: MRT4577_181311C.1
ggatgtgccaagcattggtgtgaactacacgcttacagactagaatttgaaatacactatgatagctgctggagacagctttatagataacaagaccatataccagactcacccatgacaatattcccagctaatttattactatggtggctcatagagccaacaccttttttttagtatatgtcttaattatattaacacgcacccaggcaaacacaccatggttttattcatacggatccattgctttagtttacaagttggtgcctgctgcgatgatctcctcagtcaggctgttgtcgttccctatcttgtacctggctaacactctctaagctcttgttgaaaagaccgccgagcctcaggagattatacttgtacgcatgcttgtacgttcaagcgttgatcgactagaggattaacgacgggacgccgatgatcttagtggggatc

SEQ ID NO: 89159 - DNA, 414 bp, Zea mays
  Clone ID: MRT4577_181312C.1
ccaagtcctatcgcagatcacatagtcaagaacagagctcagacgtgagctattgccatgtccatcgcctaatccatggctaccgggctgcctatacgactcgcgctggatgcctccctgcttgtctacctcttcttcaacacgtaggcgaccagggaggcgctgcggcccgcgctacaggacttgctagagcagttgctctactccaacctcagctcgacactgtgctatgcagagggcttgccaactagcgagccagactttgttgaagacgtcgtaagctcacactcgagcggacctatagtactacctgcagaacgtgggactctttgtgcaattgaatcaacgatagaatggatccgaacaaggagccgatcatatgcgacttcaaaagcgaacaaaggagtaatctct

SEQ ID NO: 89160 - DNA, 729 bp, Zea mays
  unsure (1)..(729): unsure at all n locations
  Clone ID: MRT4577_181313C.1
ttgggtacctcgaggccggccggggttcgttcgtagcctatgcctatcttctccgcccgcctgtacagctgcagtgtttgccaagtcgcttcctcagtccacactccacagatcgagtcagagagaagggagagtgagcgagacatgggcaagggtcacgtctcggtgctgccgatgccgtgccactgccagggccacgccacgccgctcatgaaggtctcccaccgcctgcatggtcgaccaaggcttgaggtcaccttcgtcaacaccgaggtcgaccacgcgttggtggtagcgagcggcgctaggcggcggcatccacctgtcgtccatcccagacgggcaggccgacgaggacgaccgcaaggacatgaacaancaagctcgtggacgcttagtcgcgccacatgccaggctgcctcatcgcgccgacatggagaaccgccgtgcttggccttcatgctcaagattcccgagctgatggcctgtgcaatgcatggggttgccagtccgntcaggagacgttccagttcgcccccggggatgccgccgctgcctcggtcgcaagctgtcgtggaacaacgccggcgaagcccgaggggcagcacattcatcttcgagctggtgacccggaataacaagctgaacgacagtggcgggaaaaatggtggtgagcaactccttctacgcggcgaaaggcggggcgttaaagcttttcccgggatcctg

SEQ ID NO: 89161 - DNA, 493 bp, Zea mays
  Clone ID: MRT4577_181314C.1
aaaagcaggggccccaaaaaaataccaaaaatgggagggaagccccccccccacaaaacagacccaaaccctaaattcaattcccaaccccctaaaataaaaaggccacaacaaaagggagaaaacagggggagggcccaccccaaaacaggaaactatgaaaaaagcagggatccaaaactgggctttaaagaaaatttcaggcctaccccacccgaaaaaaacacttcaaaaccccacccacccgggtaagggtcaccaggcgggcaccaccaaaaccacctttgccggaagaaaaaaacggggggcaaccccttgcatcctgaaaccttgaaacccccccaaaccccccggggaaaccctgaaggcccccgccccccgggggccccccacccctttgaccacaaatggcccccctgccggagaatccaaacctggggccacccccccgccccccctgggacaaaacaaaaataccccgccactttcccaa

SEQ ID NO: 89162 - DNA, 569 bp, Zea mays
  Clone ID: MRT4577_181315C.1
cactctaacacaacaatctaatccagctcaacttactctaacaccttttactcccactaccaacaccaaacaactctaaattacaatggattccgccaaggctgccgtcaaggacttcatggccaagtctggtcaccacgacaccactgtccacgagaaggtcgctcctgctgtcaagcacgagactatcgagaggcagaagcacgaggagtacgtctccgccatcgacaaggaggtccaccaagaccactaccacaccaccgagtagcccatcctcgataaggaggttcttcctactcagcaccacgccaacatcatccccgtcgagcaccgcagctacgagcacggcaacaatgacgaggtccgaggcccgtcttgccaaggagcgcgccagctacgttgacaccacggagaggattgagggtgccaccacccgtgagatcgctcccgctgctgcaggcgagcacaagcaccaccacctccacgacaccatccagcccgcgatccacaatgagaccattgagcctcacgttacccacacccccgtccccattcaccacgtttaccac

SEQ ID NO: 89163 - DNA, 598 bp, Zea mays
  Clone ID: MRT4577_181316C.1
ggcgtgggcagccgcgcgcggagccggggctggagcggtgcgcggctgtggggtcgagaccgcgcggcggttgagcggcgggaggcgccggcgggcgggcgagggccccgcggagtggctgcacgcatgcatgagcccccggctgcgtggttgggcccggtagcacaccgtgggacaggagtgtgcgcccacacatggtttggccctgcagcgaccagagcagtccgggccgccaccatgatgaagctgttggtggccaaaatcctttgcatggtgggcgtgttcttcttcatgctgcttggctccttgctccccgtgaagatcatcgagacggattttgagaaggcccatcgctcaaaaaagatcctctcactctgcaacacctttggaggcggggtctttctggccacatgcttcaatgctctcctgccagccgtgagggacaagctccagaaagttctgagtcttgggcacatcagcactgactacccactggccgagaccatcgtgatgctgggcttcttcatgaccgtcttcctggagcagctcatcctgaccttccgcaaggagaagccatccttcatcgacctggagacct

SEQ ID NO: 89164 - DNA, 733 bp, Zea mays
  Clone ID: MRT4577_181317C.1
ctcgtcaaggcccatcagtcgtcgtcggagatgtcatgtacaagctgcagagcgaagagaagtacatcatggttgtcgacgcggtccagatgactctgtcggcggtgccccttcctgatgccagaacgctcctctacgctggtaaccactggattggcaggacaccggacggccggctttgtttcttcgtgatcagggagcagcttactctcgccacctgggttctccaagcacctgggaagtgggtggagcagcaacccgtggacctgcgcacgctgatgcacccggcgtttatgggtgatctcgcccacatgaagctctcggcgaagatgtcggaccagctccgtggcttcaaacttgtgagcttcgcagcgttctgtgagggtacatgcacgctgttctttgtcatggcagattgggttgtgatgctcgaccctaggacgaggagactgctgaggctgtggcgcaacagtgatgagtcgcggccattgggtgatgtatacccgtgtgagatgctgcagtggccgccagtgcttaagaactttggcgggtctgaatcagatgaggcgggtctttaaaatacgacttggcggcgtagtgtttgtggtgatttgactagaaaagttgtgtgccacgctatatggccgcttattgtcatgaatccatgtatgtgaactgaattcaattgggaaaaacacggatttgaatgaattccaattcaatgtattttttc

SEQ ID NO: 89165 - DNA, 516 bp, Zea mays
  Clone ID: MRT4577_181318C.1
tccacgctttcgtactggtcctattataacggggagactacaaggacgaaccataagacgatcctaagctagcttatgaggttgcccttgatgctgaccttgctgtcaatgctgctcacagcgctgatcacagagctgatgctgtaaccaagtgtagtgaccactgctgtgaagccttctgttgctcgctacgtaatgcacaacgaacttgactaccttgccagacctgaggacaactccaacacaatccatttgccggtatcgatggcggatccaagatctcaagtattaatggtgtcattgagacagtgctggtcacagtccttgtccgcattcttagcgacacattgaactacgcactttgacaatgcacatggatattctgttggaaaatatgataaactagaggataaacctgatctcatagctaatgttattgaaaggcgaatgctatagggctttctactgagcttgccactgctatcaaattagcagacaatgctgcaagcaatactg

SEQ ID NO: 89166 - DNA, 1533 bp, Zea mays
  Clone ID: MRT4577_181319C.1
atggcgaagaagaaggagaaggcggtgaacgtgtcgggcaagccgcggcactcgaacgacgtcaaccgccccaatgacaagaagggcgcgggcggcggcgccggtggcgggagccggtccgcggctaccgtgcggcggctcaagatgtacaagacgcggcccaagagggaccgcgccgggaaggtgctcaggaacgatttccagtctaaagagctccccaacacccgcatcgagcccgaccgccggtggttcggcaatactcgcgttgtgggccagccacagcttgaaatgttccgggaggaactccagagtcggctttccgacaacttcagtgtcatcctgaaagaacggaagctgccactatcgctcctgcaagatcatcaaaagcaagcgaaggcacatctgcttgaagttgaaccttttgagcatgcttttgggccaaagggcaagaggaaacgtccgaaactaactgctcttgactacgaatctttgctgaagagagctgatgattcccaagatgtgtttgagcaaaagtatgcttcatcaaagttgccaagggaggaagaagaagatggcttacgtgatctagtgaggcatacaatgtttgagaagggacagagcaaaagaatctggggtgaactatacaaagttattgactcttcggacgttgttgtgcaggtgttggacgccagggatccaatgggcactcgatgctaccatctagagagacatctaaaagagaactgcaagcacaaacacttggttttcttactaaataagtgtgatctaatccctgcttgggctacaaaaggatggttaaggaccctttcgaaggactatcccaccctagcattccatgcaagcatcaacaagtcatttggcaaagtctgcaaggttgctccaatacctggagagacaaaagtgtggcagtacatcactctcactaaaaagatatttttgattgattgtcccggtgttgtatatcaaaacaatgattcagaaactgatatagttctgaagggtgtggtccgggtgacaaatttggcggatgctgctgagcacattggtgaagttcttaggcgtgttaaaaaggagcatctccaaagagcgtacaaaattcaagattggtctgatgataacgattttcttgtccagctgtgcaggaccactggaaaacttctcaagggcggggagcctgatctgacaacagctgccaagatgatacttcatgactggcagaggggtaaaatccccttctttgtaccccctccgcagcaaagcgacggcggtgcatctgaaagtgctgaacctattgggattaccaaagaggacggagtaagcagcgacaggactgccgcagccatgaaagccattgcaggaataatctcgtcacagcagaacatgaatgtgccctgccataaggaaaacaatgcagacaatgaagacactactgaaaatgcagataacgaagacattgagagttcagataacgaagacaatgatgacatcgagcctgcagagcgatctgagtga

SEQ ID NO: 89167 - DNA, 805 bp, Zea mays
  Clone ID: MRT4577_18131C.1
agagcgcgcactgcaagcttccaaaaatgaattcgatcgagccagacgcacgcccaaccacaatcgttgtttgaatcgtagcagcatcacgcggcggcagggcagcccaccttcctccttgtcgccgcctgcttcattcactccgccggtgcgcgccgccccgctccaatttcccacccagccaatctcggctcttcccccctccccaagaggccagattgcttccatggacgccgccgccgccgccgccgtcaccaccgccggagactgacggaactcctccctcgccgtctccacagcccccggcgagcgcggaggcccgtctaggcccgtctcccccagcaggctcgcctctctcgctcgctcgctgctgcgccgtcggaggatcccgcgaggatgtcgtggtgcaccatcgagtccgaccccggtgttttcaccgagttgattcaggagatgcaagtaaaaggtgtacaggtggaggagctttactctctcgatgtggactctcttagtcaactacagccagtatatgggttaatttttctcttcaagtggatggctggaggaaatgatgaacggcctgttgtcagcgacccaaacccaaacttgttctttgctcgccaggtgatcacgaatgcatgtgccactcaagctatcctctcaatcctcatgaaccgcccagaaatcgacataggtccagagctatcaaacctgaaggagttcacaggagctttcgcgcctgacatgaagggcctggccatcaacaacagtgactccatccgggctgcccacaacagcttcgcaa

SEQ ID NO: 89168 - DNA, 2217 bp, Zea mays
  Clone ID: MRT4577_181320C.1
gcctgacgcgcacgtgcgagccacgctgccctctcctgtcaaaaccctagtttcccaacatcgtcggctcctctctttcccaccgccttcttccactactcttcaccctcccctcctccccatcgcgaactcacaagagaaccaagtagacgagggagaaggagatggcgaagaagaaggagaaggcggtgaacgtgtcgggcaagccgcggcactcgaacgacgtcaaccgccccaatgacaagaagggcgcgggcggcggcgccggtggcgggagccggtccgcggctaccgtgcggcggctcaagatgtacaagacgcggcccaagagggaccgctccgggaaggtgctcaggaacgattttcagtctaaagagctccccaacacccgcatcgagcccgaccgccggtggttcggcaatactcgcgttgtgggccagccacagcttgaaatgttccgggaggaactccagagtcggctttccgacaacttcagtgtcatcctgaaagaacggaagctgccactatcgctcctgcaagatcatcaaaagcaagcgaaggcacatctgcttgaagttgaaccttttgagcatgcttttgggccaaagggcaagaggaaacgtccgaaactaactgctcttgactacgaatctttgctgaagagagctgatgattcccaagatgtgtttgagcaaaagtatgcttcatcaaagttgccaagggaggaagaagaagatggcttacgtgatctagtgaggcatacaatgtttgagaagggacagagcaaaagaatctggggtgaactatacaaagttattgactcttcggacgttgttgtgcaggtgttggacgccagggatccaatgggcactcgatgctaccatctagagagacatctaaaagagaactgcaagcacaaacacttggttttcttactaaataagtgtgatctaatccctgcttgggctacaaaaggatggttaaggaccctttcgaaggactatcccaccctagcattccatgcaagcatcaacaagtcatttggcaaaggatctcttctgtcagtattgaggcaatttgctcgtttgaagaatgacaaacaagctatttctgtcgggtttgttgggtaccccaatgttgggaagtcatcagttattaacacactacggtcgaagagtgtctgcaaggttgctccaatacctggagagacaaaagtgtggcagtacatcactctcactaaaaagatatttttgattgattgtcccggtgttgtatatcaaaacaatgattcagaaactgatatagttctgaagggtgtggtccgggtgacaaatttggcggatgctgctgagcacattggtgaagttcttaggcgtgttaaaaaggagcatctccaaagagcgtacaaaattcaagattggtctgatgataacgattttcttgtccagctgtgcaggaccactggaaaacttctcaagggcggggagcctgatctgacaacagcagccaagatggtacttcatgactggcagaggggtaaaatccccttctttgtaccccctccgcagcaaagcgacggcggtgcatctgaaagtgctgaacaacctattgggattaccaaagaggacggagtaagcagcgacaggactgccgcagccatgaaagccattgcaggaataatctcgtcacagcagaacatgaatgtgccctgccataaggaaaacaatgcagacaatgaagacactgaaaatgcagataacgaagacattgagagttcagataacgaagacaatgatgacatcgagcctgcagagcgatctgagtgatctttgggtacagatgtggattattagagttgatatgtcaaggctaatgaatttgtcagcccaggtgttgtgtagctacttgaccatatcactggcgtgccagaaaaaaaaggatcatgttgagttgcactttttgtaactatcgtacctgaatctttgtaatagggcaagaagagcagttttgctaggtacctggttgtatcgggatgcttatctgtgctgtctactacaaatacagttacatctattttacttaaatcaagtggaagttatctctaaatttttattgcggcttcaaaaaaaaaaaaaaaaggcccctattaaaaaaataataaaaattataataaaatattttttatttttatatattaatttttttttttattttttt

SEQ ID NO: 89169 - DNA, 213 bp, Zea mays
  Clone ID: MRT4577_181321C.1
aactaaaaataaaaatataactaaacacaaaaaataaaaaaaatccaaaataacctacgcggagggggtcactcctaaggcggggtataaagctatcccaactaatgtgctgaggacctgtgcacagcgtggtagttgcgctagccctctattcaccgaggtaagccgcctactataaaatcccacctccgcggactccgctactgggaggac

SEQ ID NO: 89170 - DNA, 169 bp, Zea mays
  Clone ID: MRT4577_181322C.1
cccccagaaggaagaccgaagaactgagtttgaatgaggagccgcatctgcttttcaggagcagggccaaacagaccgactcaggagtccacacactgtctactacgacgtcaccagcaaacacgatcccggaggtcgaaaggaccaaccactttttttttaaagaggg

SEQ ID NO: 89171 - DNA, 624 bp, Zea mays
  Clone ID: MRT4577_181323C.1
gggaattagtactcagattacggattaccaatatccattctcgggtatagaatcttacccatactcgtacctgcgcaggtaattttacccgtcaggtaacccgtacccgcaaagaaagtctcaaattataatatgccaatcactcaaaatgtcaaacaaacacacaaaaacaagttcaacttcaaatataacaaatcatatagttatataactttatagttaaacaagaaggattttcttgcagctaagatgggcttttaacagatggtaatagttgtatgatgcatatattttatcaatgggtacacgggtatgtatagtatccacccgtattcgtatccgtatccatctacccgattggtataggttcttgcccattaatatacccgggtaaagaaatcatcacatactcatctttatatcgggtaaaacccatcgggtattagggtttcgggtacccattatcatatctaactctaagataattaacctaccagcctgtgaccttcatcctccgtcaaatgagattttctctaacctcttgcattttgggcaccattatttctgacaataacatattttttgctttatatatctttctgatgtaagatttcagccaaagtt

SEQ ID NO: 89172 - DNA, 838 bp, Zea mays
  Clone ID: MRT4577_181324C.1
ccggccgggccaaccgcatgcagactgctcactacatgaactgcggttctgaagaggtccgatccgacttctttgctttcaacgattactcctggtgcaacagtgacttcaagacctctggctgggacgtcaaggtcaagaacttcaccgactacggtattcctatcttcctgtctgagtatggctgtattgagagccgtcctcgtaagttccaggagatcaagcccatgatggactccgacatgtcctctgtctactctggtggtctcatgtacgagtactccctcgaggacaacgactaccgcatcgtcaagatcaagggtaacaccgttacccccgaggacgagttcgacctcttcaagtctgctctctcaaagtaccctgctcccactggttccggcggtgccgccaaggcttctcacggcgttgagtgccccaagtccgagtctgtctggcaagtcgaccccagctatctccccgagatgcctgctcaggccgagaagtacatgaaggacggtgctggctagggccctggtatcaacggttagggctctcacttcgacactgactgcggtactgccaccgccagtatgaccgttggcacctctacctccaccggcgattcttcttcatccaactctgatgacgatgatagcggtgccgctgccctcggcttcggtgctctctatgtcaccggagctgccaccttcttcaccctctttggaacccttcttctgtaaatggcagatttgccatttgacttgcttgcgtacgctagatgtggggattgccgccaaagctatgatttacgcctcccagttgggttcatgataatcgc

SEQ ID NO: 89173 - DNA, 302 bp, Zea mays
  Clone ID: MRT4577_181325C.1
acgcgtccgcccacgcgtccgagaacagtgctatcgatgagatggcaagttacgcacaattcttcgtgtgcgacaaagaccaaacggggaacccgaacgctattgttttcaactactggcagtactatgaaactcctagttataggatgcagacgatttttcgagtgtacagtggaaccatgatacatccaatttatatcagctgacgttcctcgagttcgctaggcgagtatgccatcacttgccacgatgtagagcatatcatgctgagagtgatgggctacaaatattgttacgacaca

SEQ ID NO: 89174 - DNA, 260 bp, Zea mays
  unsure (1)..(260): unsure at all n locations
  Clone ID: MRT4577_181326C.1
tnaagangcnggcnngcatnaagcgacatngcaacaatgagaagctnggcaaaccacggacacnagtaggaggaagaaccacgagcaacagnggccacnnggangaggagganatggcccancngcggcacacggaaggngantgccgtacgtcgntgcgcacgcncaagntcagcaactccattnttacaacagcttccaagaaggccctgccagataggaancancactgnngtctcagnataatgacccntnaaanc

SEQ ID NO: 89175 - DNA, 2700 bp, Zea mays
  Clone ID: MRT4577_181327C.1
atgacgggggagaagaagatgttcacctcctacgtcaagaacaaggatcccccagattcaatcatattcggtgatgggaatcaaggcaaggtgaaaggcttaggcaaaattgcaatatcaaatgagcactctatttctaatgtgtttttagttgagtctcttggatataacttgttatttgttagtcaattatgcaatatgggatataactgtctattcacaaatgtagatgtgtctgtctttagaagaagtgatggttcactagcttttaaagcttgtcaagcaggcaaacaggtgggaagctctcatcacaccaaaaatgtgatgaccacatcaagacctttggagatgcttcacatggaactcttcggacccgtcgcctatctaagtataggaggaagtaagtatggtcttgttatagttgatgatttttcccgcttcacttgggtattctttttgcaggataaaactgaaacccaagggaccctcaagcgcttcctaaggagagctcaaaacgagtttgagctcaaggtgaagaagataaggagcgacaatgggtccgagttcaaaaaccttcaagtgcaggagtaccttgaggaggtctaccttcatcgcctcctcaagaagacgtcatacgagctactaaccgtgaagaagggtaggaattccaaatttgctcccaaagccatagaagggtttttgttaggttatgactcaaatacaaaggcgtatagagtcttcaacaaatcatcgggtttggttgaagtctctagcaacgttgtatttgatgagactaatggctctccaagagagaaagttgttgattgtgatgatgtagatgaagaagaagttccaacggccgcaatacgcaccatgacaattggagatgtgcggccacaagaacaagatgtgcgagatcaaccttcttcctcaacaatggtgcatcccccaactcaagatgatgagcaggaggcgtgtgatcaagggggagcacaagatgatcttgcaatggaggaagaagcgcaaccggcacctccaacccaagttcgagcgatgattcaaagagatcatcccgtcgaccaaattttgggtgatattagcaagggagtaactactcgatctcgattagttaatttttgtgagcattactcttttgtctcttctattgggcctttcagggtagaagaggccttgctagatccggactgggtattggccatgcaggaggagctcaacaatttcgaaagaaatgaagtttggacactggtgcctcgtcccaagcaaaatgttgtgggaaccaagtgggtgttccgcaacaaacaagacgagcacggagtggtgacgaggaacaaggcacgacttgtggcaaaaggttatacccaagtcgcaggtttggactttgaggagacttttgctcctgtggctaggctagagtccattcgtattttgctagcatatgccgctcaccattctttcaggatgttccaaatggatgtaaagagcgctttcctcaacgggccaattaaggaggaggtgtacgtggagcaaccccctggcttcgaggatgaacggtaccccgaccacgtgtgtaagctctctaaggcgctctatggacttaagcaagccccaagagcatggtatgaatgccttagagactttttaattgctaatgctttcaaggttgggaaagccgatccaactctttttactaagacttgtgatggtgatctttttgtgtgccaaatttatgtcgatgacataatatttggttctactaaccaaaagtcttgtgaagagtttagcagggtgatgactcagaaattcgagatgtcgatgatgggcgagttaagctacttccttgggttccaagtgaggcaactcaaggatggaaccttcatctctcaaaccaagtacacacaagacttgatcaagcggtttgggatgaaggacgccaagcccgcaaagactccgatgggaaccgacagacacaccgacctcaacaaaggaggtaagtccgttgatcaaaaagcataccgatctatgatagggtctttactttatttatgtgctagtagaccggatatcatgcttagtgtatgcatgtgtgctagatttcaatctgatccaagggagtgtcacttagtggccgtgaagcgaattcttagatatttagtcgctacgccttgcttcgggatctggtatccaaaggggtctacctttgacttgattggatattcagactccgactatgctggatgtaaggtcgataggaagagtacatcggggacgtgccaattcttaggaaggtccctggtgtcatggagttctaagaaacaaacctccgttgccctatccaccgctgaggccgagtacgttgtcgcaggacagtgttgcgcgcaactactttggatgaggcaaaccctcagggactttggctacaatctgagcaaagtcccactcctatgtgataatgagagtgctatccgcatggcggataatcctgttgaacacagccgcacaaagcacatagacattcggcatcactttttgagagaccaccagcaaaagggagatatcgaagtgtttcatgttagctccgagaaccagctagccgatatctttaccaagcctttagatgagcagaccttttgcaagttgcgtagtgagctaaatgtcttagattcgcggaacttggattga

SEQ ID NO: 89176 - DNA, 153 bp, Zea mays
  Clone ID: MRT4577_181328C.1
actggttacatacaacacttccattttcccgagctcgcattcaatcagggcccaattgaggtaataatataacaacaatggtggttcccgtcatcaacttttccaagctgaacggcgctaaaagggcaaaaaccctggcgcaaatcgccaatg

SEQ ID NO: 89177 - DNA, 334 bp, Zea mays
  Clone ID: MRT4577_181329C.1
ggccgggaacattcctcctctagtccttcttcgtaagacttcaaaccgacgaatttgaacaactgacacccagagcgcgatctcattcgccgcggaagaagcaccttcgttgcgagcctcctctatgccgagctccgaccatgcttccaccaccgcccccacagacgagtctgacagatactgactgccgatgttggtagccgcgcgcgaccgcctccactctcactactaccacggtaaggacaagtacttctagtcccgtcgtgcagcgatacggctccaccgcgtccgcgaatgacacgcgtcgccgtcggccctccatgtagccgcgaac

SEQ ID NO: 89178 - DNA, 288 bp, Zea mays
  Clone ID: MRT4577_18132C.1
cggggggagccacgcgtccgggagaaggtgttcgacgatatcattttctgtctcaaggcacgccccaccgctagagccgttggcgcgcaccacggcgagcagtattttgggcactcctcctgcgtgcgtgcgtgccatggccaggcttgcctttaaacgcgcgtcgtgcattcacgatactagattctatcctaggtgcctttcatctatattcgagtacggatcctgcaataaacttgtgctgtttgctgataacagaatttgcttttgctctaattcttcgagatc

SEQ ID NO: 89179 - DNA, 4344 bp, Zea mays
  unsure (1)..(4344): unsure at all n locations
  Clone ID: MRT4577_181330C.1
atggatcctaagggaaaggggatggtgatcgacaacaacgagaaggagtctatcctcaatgagccgaagaatgacaagtctaccgacttgggctcaagccacaagcgcaaagatgggaagaagaagaagacaaggcacatcaaggagatcgtctactacgacgacagcgatgagtctacttcgtcccaaaaggacgacgacaacgactacaggaagacggttaattcgaacttttcatttgattattctcgtattccacatagttcgaattcgcatttgctttccattcctcttggcaaacctgcacaattcgatggggaggactacggattttggagtcacaaaatgcgtagtcacttattctctctccatccaagcatatgggagattgtagagaatggaatgaaatttgatagctcggatagccctatgcttataaatgaacaaatccatagaaatgcacaaactactattgttctattagcatctttgtgcagggaagagtacaataaggtgagcggcttggacaacgccaagcagatatgggacaccctcaaaatctctcacgatgggaacgacatcaccatgctcactaaaatggagttggtggagggcgagcttggacgattcgcaatgataaggggagaggagccaacccaaacttacaaccggctcaagacccttatcaacaaaataaggagctatggaagcactcgatggacggaccacgacgtcgttcgcctaatgctaaggtcctttaccgtccttgatcctcatctcgtaaacaatattcgtgagaatctcaggtacacgatgatgacgcccgaggaggtactcggaaaatttgtaagcgggaggatgatgatcaaggaggcgagatacgtcgacgacgctctaaacggtccaatcaatgagcctcaacctcttgctctcaaggcaacaagaagcaaggaaacgctacctagcaaggtggcacaaattgaggcagccggacttaatgatgaagagatggctctcatcatcaagagattcaagacggcactaaaaggccgcaaggggcaaccaagcaagaccaagacaaaagggaagcgctcatgcttcaaatgtggtaagcttggtcattttattgctaactgtcccgacaatgatagtgatcaggatcaagggaacaagagggagaagaagaagaactataagaaggcaaagggcgaggcgcatctaggcaaggagtgggactcggactgctcctcttccgactccgacaatgaaggactcgccgccaccgccttcaacaagtcatccctcttccccaacgagcgtcacacatgccttatggcaagggagaagaaggtgagtactcaagactccacttatgctttttctagtgataatgagtctagtgatgatgatgacatagattattcatgcttattcaagggcttagatagatctaagatagataaaattaatgaattgattgatgccttgaatgataagaataggcttttagaaaagcaagaggatttgctgtatgaagaacatgacaaatttgtagaaacacaaaaatcacttgcattagagattaagagaaatgaaatgctttcttttgaactatctacttgtcatgaaaccatttctactttaaaaggtgtcancaatgatttaaatgctaaattagaagtagcaaataaatctaattcttgtgtagaacatgttgtaatttgtactaggtgtaaagattttgacattgatgcttgtagtgaacacctagtttcaatttccaagcttaatgatgagttggctagtcttaatgtttatgcatccgggggttcaagctggattatcgacagcggatgcacaaaccatatgacgggggagaagaagatgttcacctcctacgtcaagaataaggattcccaagattcaattatattcggtgatgggaatcaaggcaagaataagtctgaaacccaagggaccctcaagcgcttcctcaggagagctcaaaatgagtttgagctcaaggtgaagaagataaggagcgacaacgggtccgagttcaagaaccttcaagtggaggagttccttgaggaggaagggatccagcacgagttctccgctccctacacaccacagcaaaatgccgtgaacacggcttgccacgccatcaacagggtctaccttcatcgcctcctcaagaagacttcgtatgagctactaaccggtaacaaacccaatgtatcttactttcgtgtatttgggagcaagtgctacattctagtgaagaagggtagaaattctaagtttgctcccaaagctgtagaagggtttttgttaggttatgactcaaatacaaaggcgtatagagtcttcaacaaatcatcggatttggttgaagtctctagcgacgttgtatttgatgagactaatggctctccaagagagcaagttgttgatcttgatgatgtagacgaagaagatgttccgacggctgctatacgaaccatggcgattggtgatgtgcgaccacaggaacaagatgagcaagatcaaccttcttcctcaactatggtgcatcccccaactcaagacgatgaacaggttcatcaacaggagacgtgtgatcaagggggagcacaagatgatcatgtgatgggggaagaagcgcaaccggcacctccaacccaagttcgagcgatgattcaaagggatcatcccgtcgaccaaattctgggagatattagcaagggagtaactactcggtctcgattagttaatttttgtgaacattactcctttgtctcttttattgagccttttagggtagaagaggccttgctagatccgtactgggtgttggccatgcaagaggagctcaacaacttcaaaaggaatgaagtttggacgctggtgcctcgtcctaagcaaaatgttgtgggaaccaagtgggtgttccgcaacaaacaagacgagcacggagtggtgacaaggaacaaggctcgacttgtggcaaaaggttatgcccaagtcgcaggtttggactttgaggagacttttgctcctgtggctaggctagagtccattcgtatcttgctagcatatgccgctcaccattctttcaggttgttccaaatggatgtaaagagcgctttcctcaacgggccaataaaggaggaagtgtacgtggagcaaccccctggcttcgaggatgaacggtaccccgaccacgtatgtaagctctctaaggcgctctatggacttaagcaagccccaagagcatggtatgaatgccttagagatttcttaattgctaatgcttttaaggttgggaaagccgatccaactcttttcactaagacatgtgatggtgatttgtttgtgtgccaaatttatgtcgatgacataatatttggttctactaataaaaagtcttgtgaagagtttagcagggtgatgacgcagaaattcgagatgttaatgatgggcgagttgaactacttccttgggttccaagtgaagcaactcaaggatggcaccttcatctctcaaacgaagtacacgcaagacttgctaaagcggtttgggatgaaggacgccaagcccgcaaagactccgatgggaaccgatggacacaccgaccttaacaaaggaggtaagtcagttgatcaaaaagcataccggtcaatgataggatcgttactttacttatgtgctagtagaccggatattatgcttagcgtatgcatgtgtgctagatttcaatacgatcctaaggagtgtcacttagtggcagtgaagcgaatccttagatatttagttgctacgccttgcttcgggctctggtatccaaaggggtctacctttgacttaattggatattcagattccgactatgctggatgtaaggtcgataggaagagtacatcggggacgtgccaattcttaggaaggtccctggtgtcatggaactctaagaaacaaacttccgttgccctatccaccgctgaggccgagtatgttgtcgcaggacagtgttgcgcgcaactactttggatgaggcaaaccctccgggactttggctacaatctgagcaaagtcccactcctatgtgataatgagagtgttatccgcatggcggaaaatcctgttgagcacagccgaacaaagcacatagacatccggcatcactttttgagagaccaccagcaaaagggagatatcgaagtgtttcatgttagcaccgagaaccagctagccgatatctttaccaagcctctagatgagaagaccttttgcaggctgcgtagtgagctaaatgtcttagattcgcggaacttggattga

SEQ ID NO: 89180 - DNA, 660 bp, Zea mays
  Clone ID: MRT4577_181331C.1
attgggtacctcgaggccggccgggcatcgtctcgaagaactcccgagagaacactagtaaactagtaactactcccagaagcaattttgcctctgtgcgtctgcgtacgtaactacaaaaattgtagcagcttgttgctacgatggccatgaccagcaagttcgttctgccgctgctgctagcggtgctgatgctgttggccgtttcaggctcggcgcgccgagtggaaggcgacaggtgggccggcggcgaaaccgccgcctccgtcgttggccgtcccaccatacagttcctcaaacggctctacttgcaacagctggcagctccatgtccctcaggcatgacctacgacccaaacagcaacccccattgtcatcatcggtgattatcagaagatagcatgcatgtatatgtatatataggtattgggctgtgatgctatatatatgtatacctctatgtgatagacatagactggtacagtgaattggtgatggtattcgactattcgatacatacttggtagcagccacgacgaataacgtaactctgttgttgtatcttataatttttttctgaataaagtggcagccctgtatcaggaattctgaaaaaaaaaaaaaaaaaaaaaagaaaaaaaaaaaaaaaaatttgcggcc

SEQ ID NO: 89181 - DNA, 3456 bp, Zea mays
  Clone ID: MRT4577_181332C.1
atggatcctaagggaaaggggatggtggtcaacgataaggagaaggagtccatcttcaacgagccgagggatgacaaagccactgactctggctcgagtcaaaagaagaaggacgggaagaagaagaggcgggtcaagaagatagtctactacgacagtgacgagtcttcctcttcccaaaaggacgacgaatacgaggagaaaaagaaaacggaagaatatcataaggtgagcggcttggataacgccaagcaaatctgggacaccctcaagatctcgcatgagggaaacgacgtcaccatgctcaccaagatggagttggtggaaggtgaactaggaaggtacaacaagatgacgcccgaagagatacttggaaagttcgtaagcgggcgaatgatgatcaaggaggcgagatatgttgatgaggcgttaaatggcccaatccacgagcctcaaaccattgctctaaaagcaaaaagtagcagggaggcactacctagcaaggtggcacaagttgaggcagccgggctaaatgaagctgaaatggccctcatcatcaagcgcttcaagacggcgctcaaatgtcgcaaggagcatcccaacaagagcaagacgaaggggaagcgctcctgcttcaagtgtggtaaggatcaagaaaagaagagggaaaagaagaagacttacaagaaagcgaagggcgaggcacaccttggcaaagagtgggactcggattgctcttcatccgacgacgaaggacttgccgcctcggccttcaacaaatcatccctcttccccaacgagcatcacacctgcctcatggcaaaggaaaagaaggtttatgcatccaggggctcaagctggattatcgacagcggatgcacaaagcacatgacaggggagaagaatatgttcacctcctacgtcaagaacaaggactcccaagattcaatcatattcggtgatgggaaccaaggcaaggataaaacagaaacccaagggaccctcaagcgcttcctaaggagagctcaaaacgagtttgagctcaaggtgaaaaagataaggagcgacaatgggcccgagttcaagaaccttcaagtggaggagtaccttgaggaggaagggatcaagcacgagttctccgttccctacacaccacagcaaaatggtgtggtagagaggaagaacaagatgcttatagacatggcgaggacgatgcttggagagttcaaggcccccgagcgcttttggtcggaagccatgaacacggcttgccacgccatcaacagggtctaccttcatcgcctcctcaagaagacgtcgtatgagctactaaccggtaacaaacctaatgtttcgtattttcgagtttttggaagtaaatgctacattctagtgaagaagggtaggaattccaaatttgctcccaaagccgtagaagggtttttgttaggttacgactcaaatacaaaggcgtatagagtcttcaacaaatcatcgggtttggttgaagtctctagcgacgttgtatttgatgagactaatggctctccaagagagcaagttgttgattttgatgatgtagatgaagaagaagttccaacggtcgcaatacgcaccatggagattggagatgtgcggccacaggaacaagatgtgcgagatcaaccctcttcctcaacaatggtgcatcccccaactcaagacgatgaacaggttcatcaagaggaggcatgtgatcaagggggagcacaagatgatcatgtggtggaggaagaagcacaaccggcacctccaacccaagttcgagcaatgattcaaagggatcatcccgtcgaccaaatattgggtgatattagcaagggagtaactactcgatctcgattagttaatttttgtgagcattactcctttgtctcttctattgagcctttcagggtagaggaggccttgctagatccggactgggtgttggccatgcaagatgagctcaacaacttcaagaggaatgaagtttggacactggtgcctcgtcctaagcaaaatgttgtgggaaccaagtgggtgttccgcaacaaacaagacgagcacggagtggtgacaaggaacaaggctcgacttgtggcaaaaggttatgcccaagtcgcagttttggactttgaggagacttttgctcctgtggctaggctagagtccattcgtattttgctagcatatgccgctcaccattccttcaggttgttccaaatggatgtgaagagcgctttcctcaacggaccaatcaaggaggaggtgtacgttgagcaaccccctggcttcgaggatgaacggcaccccgatcacgtgtgtaagctctctaaggcgctctatggacttaagcaagccccaagagcatggtatgaatgccttagagactttttaattgctaatgctttcaaggttgggaaagccgatccaactctttttactaagacttgtgatggtaatctttttgtgtgccaaatttatgtcgatgacataatatttggttctaccaaccaaaagtcttgtgaagagtttagcagggtgatgactcagaaattcgagatgtcgatgatgggcgagttaagctacttccttgggttccaagtaaggcaactcaaggatggaaccttcatctctcaaaccaagtacacacaggacttgatcaagcggtttgggatgaaggacgccaagcccgcaaagactccgatgggaaccgacggacacaccgacctcaacaaaggaggtaagtccgttgatcaaaaagcataccggtctatgatagggtctttactttatttatgtgctagtagaccggatattatgctaagtgtatgcatgtgtgctagatttcaatctgatccaagggaatgtcacttagtggctgtgaagcgaattcttagatatttagtcgctacaccttgcttcgggatctggtatccaaaggggtctacctttgacttgattggatattcagactccgactatgctggatgtaaggtcgataggaagagtacatcggggacgtgccaattcttaggaaggtccctggtgtcatggagttctaagaaacaaacctctgttgccctatccaccactgaggccgagtacgttgccgcaggccagtgttgcgcgcaactactttggatgaggcaaaccctcagggactttggctacaatttgagcaaagtcccactcctatgtgacaatgagagtgctatccgcatggcggataatcctgttgaacacagccgcacaaagcacatagacatccggcatcactttttgagagaccaccagcaaaagggagatatcgaagtgtttcatgttagctccgagaaccagctagccgatatctttaccaagcctttagatgagcaggccttttgcaagttgcgtagtgagctaaatgtcttagattcgcggaacttggattga

SEQ ID NO: 89182 - DNA, 3681 bp, Zea mays
  Clone ID: MRT4577_181333C.1
gatcaagggaacaagagggagaagaagaagaactataagaaggcaaagggcgaggcgcatctaggcaaggagtgggattcagattgctcctctttcgactccgacaatgaaggacttgccgccaccgccttcaacaagtcatccctcttcctcaacgagcgtcacacatgccttatggcaagggagaagaagggcctagatagaaccaaggtagataaaattaatgaattgattgatgccttgaatgataagaataggtttttagaaaaacaagaggatttgttgtatgaagaacatgacaaatttgtagaagcacaaaaatctcatgctctagaagttaaaagaaatgaaatgctttcttgtgaattatcttcttgccatgagataatttctagcttaaggagcattaatgatgatttgaatgctaagttagaaatagctagtaaatcaacatcttgtgtagaaattgttgaaacttgcaatagatgtaaagactttgatattaatgcttgtagcaaacacctagcctcaatttctaaattaagtgatgaggtggctagtcttaatgcccaacttaagactagcaagagtaattttgataaactaaaatttgctagggatgcctacacggttggtagacatccctctattaaggatggacttggcttcaagagggaagccaagaacttaacaaaccataaggctcccatctccgccaaggagaaagggaaggctcctatggcaagtagtactaaaaagaaccatgcttttatgtacaatgatagaagacaatctcataggagttgtaatgcttttgatgcacatgcctatgattcttatgctatgtttgcttcaagttcttcttatttgcatgatagagatatgtctaggagttatgttcatcatgtgcctagaaagaatattgttcatgttgctaggaaagttatggatggtccttctacaatttatcatgctttaaatgcttcctttgctatttgtagaaaggataggaagatagttgctagaaaattaggggcaaaatgcaagggtgataaaacttgcatttgggtccctaagacaattgtgactaaccttgtaggacccaacaagagttgggtttatgcatccgggggttcaagctggattatcgacagcggatgcacaaaccatatgacgggggagaagaagatgttcacctcctatgtcaaaaacaaggattcccaagattcaataatattcggtgatgggaatcaaggcaaggataagtctgaaacccaagggaccctcaagcgcttcctaaggagagctcaaaatgagtttgagctcaaggtgaagaagataaggagcgacaacgggtccgagttcaagaaccttcaagtggaggagtttcttaaggaggaagggatcaagcacgagttctctgccccctacacaccacaacaaaatggtgtggtagagaggaagaacaggacgctcatcgatatggcgaggatgatgcttggagagttcaagacccccgagtgcttttggtcggaagccgtaaacacggcttgccacgccatcaacagggtctaccttcatcgcctcctcaagaagacgtcatatgagcttctaaccggtaacaaacccaatgtatcttactttcgtgtatttgggagcaaatgctacattctagtgaagaagggtagaaactctaagtttgctcccaaagctgtagaagggtttttgttaggttatgactcaaatacaaaagcgtatagggtcttcaacaaatcatcgggtttggttgaagtctctagcgacgttgtatttgatgagactaatggctctccaagagagcaagtttttgatcttgatgatgtagatgaagaagatgttccgacggccgctatacgaaccatggcgattggtgatgtacgaccacaggaacaaaaggagcaagatcaaccttcttcctcaactatggttcatcccccaactcaagatgatgaacaggttcatcaacaggaggcgtgtgatcaagggggagcacaagatgatcatgtgatggaggaagaagcgcaaccggcacctccaacccaagttcgagcgatgattcaaagggatcatcccgtcgatcaaattctgggtgatattagcaagggagtaactactcgatctcgattagttaatttttgtgagaattactcttttatctcttctattgagcctttcagggtagaagaggccttgctagatccggactgggtgttggccatgcaagaggagctcaacaacttcaagagaaatgaagtttggacgctggtgcctcgtcctaagcaaaatgttgtgggaaccaagtgggtgttctgcaacaaacaagacgagcacagagtggtgacgaggaacaaggctcgacttgtggcaaaaggttatgcccaagtcgcaggtttggactttgaggagacttttgctcctattgttcaaatcgatgtgaagagcgctttcctgaacgggccaaccaaggaggaggtgtacgtagaacaaccccttggcttcgaggatgaatggtaccccgaccacgtgtgtaagctctctaaggcgctctatggacttaagcaagccccaagagcatggtatgaatgccttagagatttcttaattgctaatgctttcaaggttgggaaagccgatccaactcttttcactaagacttgcgatggtgatctttttgtatgccaaatttatgtcgatgacataatatttggttctactaatcaaaagtcttgtgaagagtttagcagggcaatgacgcagaaattcgagatgtcgatgatgggcgatttgaactacttccttgggttccaagtgaagcaactcaaggacggcactttcatctcccaaacgaagtacacacaagacttgctaaagcggtttgggatgaaggacgccaagcccgcgaagacgccgatgggaactgacggacacaccgacctcaacaaaggaggtaagtccgttgatcaaaaagcataccggtctatgatagggtctttactttatttgtgtgctagtagaccggatattatgcttagcgtatgcatgtgtgctagatttcaatccgatcctaaggagtgtcacttagtggctgtgaagcgaattcttcgatatttagtcgctacgccttgcttcgggatctggtatccaaaggggtctaactttgacttgattggatattcagattctgactatgctggatgtaaggtcgataggaagagtacatcgggaacgtgccaattcttaggaaggtccctggtgtcgtggaactctaagaaacaaacctccgttgccctatccaccgctgaggccgagtacattgccgcaggacagtgttgcgcgcaactactttggatgaggcaaaccctccgggactttggctacaatctgagcaaagtcccactcctatgtgacaatgagagtgctatccgaatagcggaaaatcctgttgagcatagaagccgcacaaagcacattgacatccgacatcactttttgagagaccaccagcaaaagggagatatcgaagtgtttcatgttagcaccgagaaccagctagtcgatatcttcactaagcctttatatgaaaagaccttttgccggctgcgtagtgagctaaatatcctagattcgcggaacttggattga

SEQ ID NO: 89183 - DNA, 4557 bp, Zea mays
  Clone ID: MRT4577_181334C.1
atggatcctaagggcaaggggattgtgatcaatgataaggagaaggagtcctttgtcaacgagccgaaagatgacaagcctaccgactcgggctcgggccacaaacgaagagatgggaagaagaagaagacgaggcgcatcaaggagatcgtctactacgacgacagtgacgagtcctcttcttcccaaaaggacaacgacgacaacgactacgacaaacgaaagacgatggagttggtggagggagagcttggaagatttgcaatgataaggggagaggagccaacccaaacaaataaccggctcaagaccctcatcaacaagataaggagctacggaagcacgcgatggacggaccacgacatcgttcgcctattgctaaggtcttttactgtacttgatccacatttggtgaacaatatccgtgaaaatcctaggtacaccaagatgtcgcccgaagaagttctttggaaattcgtaagcgggcgaatgatgatcaaggaggcgagatatgtcgacgacgcgttgaacggtccaatccatgagcctcaacccattgctctcaaggcaacaaggagcaaggagtcgctacctagcaaggtggcacaaattgaggcgacagggctcaatgatgaagagatggccctcatcatcaagcgcttcaagacggcgctaaaggatcgcaagggacagccaagcaagaccaagacaaaggggaagcgttcatgcttcaaatgcggtaagattggtcattttattgctaactgcctcgataatgaaagtgaccaggaacaagggagcaagagggagaagaaggcatacaagaaagctaagggcaaggcacaccttggaaaggagtgggactcggattgttcgtcatccgactccaaaaatgaaggactcgccgccaccgccttcaacaagtcctccctcttcccaaacgagcgacacacatgcctcatggtaaaggagaagaaggtatgtactcgagacagtactacttatgattcttctagtgatgaagaaatagattactctagtttgttcaagggattggatagaactaaagtagataagattaatgaattgattgatgccttgaatgaaaaggataaactcttagaaaaacaagaggaccttttatatgaagagcatgacaaatttgtagaggcacaaaaatcttatgctttagaagttaaaagaaatgaaatgctttcttgtgaactatcttcttgccatgagacaatttctagcttaaggagcataaatgatggtttgaatgctaagttagagatagcaagtaaatctaactcttgtgtagaacatgttatgatttgcaataggtgtaaagattttgacattgatgcttgtagtgaacacatagcttctattgcaaaattaagtgatgaagtagctagtcttaatgcccaacttaagactagcaaaagcgaatttgataagttaaaatttgcaagggatgcctacactattggtagacacccctcaattaaggatggacttggcttcaagagagaagccaagaacttaacaagccataaggctcccatccccgccaaggagaaagggaaggcccctatggctagtagtcctaaaaagaaccatgcttttatgtaccatgatagaagacagtcttataggagttgtaatgcttataatgcttttgactctcatgccatgtttgcttctagttcttcctatatgcatggtagagatatgtctagaagatacgttgttcatatgcctaggagaaatgttgttaatgttcctaggaaagttaatgaaccctctacaatatatcatgctttaaatgcttcctttgctatttgtagaaaggataggaagatagttgctagaaaattaggggcaaaatgcaagggagacaaaacttgcatttgggtccctaaggatatttgtgctaaccttgtaggacccaacatgagttgggtttatgcatccgggggttcaagctggattatcgacagcggatgcacaaaccatatgacgggggagaagaagatgttcacctcctacgtcaaaaacaaggattcccaagattcaataatattcggtgatgggaaccaaggcaaggataaatctgaaacccaagggaccctcaagcgctttctaaggagagctcaaaacgagtttgagctcaaggtgaagaagataaggagtgacaatgggtccgagttcaagaaccttcaagtggaggagtaccttgaggaggaagggatcaagcacgagttctccgctccctacacaccacaacaaaatggtgtggtagagaggaagaacaggacgctaatcgatatggcgagaacgatgcttggagagttcaagacccccgagcgtttttggtcggaagccgtgaacacggcttgccacgccatcaaccgggtctatcttcaccgcctcctcaagaagacttcgtatgagcttctaaccggtaacaaacccaatgtatcttactttcgtgtatttgggagcaaatgctacattctagtgaagaagggtagaaattctaagtttgctcccaaagctgtagaagggtttttgttaggttatgattcaaatacaaaggcgtatagggtcttcaacaaatcatcgggtttggttgaagtctctagcgacgttgtatttgacgagactaatggctctccaagagagcaagttgttgatcttgatgatgtagatgaagaagatgttccgacggccgctatacgaaccatggtgattggtgatgtacgaccacaggaacaaaaggagcaagatcaaccttcttcctcaacaatggtgcatcccccaactcaagaagatgaacaggtttatcaaaaggaggcgtatgatcaagggggagcacaagatgatcaagtaatggaggaagaagcacaatcggcacctccaactcaagtccgagcgatgattcaaagggatcatcccgtcgaccagattttgggtgacataagcaagggagtaactactcggtctcgattagttaatttttgtaagcattactcctttgtctcttccattgagcctttcagggtagaggaggccttgctagatccggactgggtgttggccatgcaagaggagctcaacaacttcaagaggaatgaagtttggacactggtgcctcgtcctaagcaaaatgttgtgggaaccaagtgggtattccgcaacaaacaagacgagcacggagtggtgacgaggaacaaggctcgacttgtggcaaaaggttatgcccaagtcgcaggtttggactttgaggagacttttgctcctgtggctaggctagagtccattcgtattttgctagcatatgccgctcaccattctttcaggttgttccaaatggatgtgaagagcgctttcctcaacgggccaatcaaggaggaggtgtacgtagagcaaccccctggcttcgaggatgaacggtaccccgaccacgtgtgtaagctctctaaggtgctctatggacttaagcaagccccaagagcatggtatgaatgccttagagactttctaattgctaatgctttcaaggttgggaaagccgatccaactcttttcactaagacttgtgacggtgatctttttgtgtggcaaatttatgtcgatgacataatatttggttctactaataaaaagtcttgtgaagagtttagcagggtgatgacgcagaaattcgagatgtcaatgatgggcgagttgaactacttccttgggttccaagtgaagcaactcaaggacgacaccttcatctctcaaacgaagtacacgcaagacttgctgaagcggtttgggatgaaggatgccaagcccgcaaaaactccgatggggaccgacggacacaccgatctcaacaaaggaggtaagtccgttgatcaaaaggcataccagtcaatgatagggtcattactttacttgtgtgctagtagaccggatattatgcttagcgtatgcatgtgtgctagatttcaatccgatcctaaggagtgtcacttagtggcagtgaagcgaatccttagatatttagttgctacgccttgctttgacctgattggatattcagattccgactatgctggatgtaaggtcgataggaagagtacatcggggacgtgccaattcttaggaaggtccctggtgtcatggaattctaagaaacaaacctctgttgccctatccaccgctgaggccgagtatgttgccgcaggaaagtgttgcgcacaactactttggatgaggcaaaccctccaggactttggctacaatctgagcaaagtcccactcctatgtgataatgagagtgccatccgcatggcgggaaatcctgttgaacacaaccgcacaaagcacatagacatccgacatcactttttgagagaccaccagcaaaagggagatatcgaagtgtttcatgttagcaccgagaaccagctagccgatatctttaccaagcctctagatgagaagaccttttgcaggttgcgtagtgagctaaatgtcttagattcgcggaacttggattga

SEQ ID NO: 89184 - DNA, 747 bp, Zea mays
  unsure (1)..(747): unsure at all n locations
  Clone ID: MRT4577_181335C.1
gcgcaactagggttgagcgccgccgccgtcctcctggtcgacggcgagctcccgcctctccgccggtcgcacccatccccgcctccctatctctccacgggagctcgaccccgtcgtcctctccctccgcgggagctcagctacaacgaccggccgtcgcaggacactggtcctatcccatgccgccgcctggacgccgcgctggaggctctctcggccgccgggagccgggacgcgttcctccacaacgccgtgatcccgggcttcactgactcgggcctcccggacagcgctctggccgccgtcgggcgcctgactgcttcaccttccccgtcctcctcaagtgccgcgcgcgcccaagctcctcgaggatggcatgaggtgcacgaggtgcggcatgacagagtcgggattatccactactcttgccgtttgcttcctgaaataggcgttgatgcaagggcatgggctggaggaagacgccaaggttggcacctctcttcttgacaagtgtggtgccattgcttctgacgaaggtgtccgcgatgattgaggaggtagaggggatgctcggcatgccaatggagcatctctgacgcgctccttgagctggatcatggcctgcacagagacatccacttcaagctcaagatgctcgtcagctacgtcgacacctccctctaagggtgaagaagtccggcaagaatgagaaggccgacatgtcaagnnttcacggcgcagttggac

SEQ ID NO: 89185 - DNA, 4998 bp, Zea mays
  Clone ID: MRT4577_181336C.1
atggatcctaaggggaagggaatcgtgatcaacgacaaagaaaaggaatccttcgccaacgagccgaaggacgacaagcctaccgactctggctcggggcatagacggaaggaaggaaagaagaagaagacaaggcgcatcaaggagatcatctactacgacgatagtgatgagtctacttcttcccaaaaggatgatgacaacgactacaaaaagacggtcaattcgaacttttcatttgattattctcgtattcaacatagttcgaattcgcatttgctttccattcctcttggcaaacctccacacttcgatggggaggactacggattttggagtcacaaaatgcgtagtcacttattctctctccatccaagcatatgggagattgtggagaatggaatgaagtttgatagctcggatagccctatgcttataaatgaacaaattcatagaaatgcacaagctactactgttctcttagcatctttgtgcagggaagagtacaataaggtgagcggcttggacaatgccaagcagatatgggacaccctcaagatctctcacgaggggaacgacatcaccatgctcaccaagatggagttggtggagggtgagcttggacgattcgccatgataaggggagaggagccaactcaaacttacaaccggctcaagactcttatcaacaaaataaggagctacggaagcacgcgttggacggatcacgacgtcgtccgcctaatgctcaggtcctttactgttcttgatcctcatctcgtgaacaatattcgtgagaatcccaggtacacgatgatgacgcccgaggaagttcttggaaaattcgtgagcgggcggatgatgatcaaggaggcaagatacgtcgacgacgcattgaacggtccactccacgaaccccaacccattgctctaaaggcaacgaggagcaaggagtcgctacctagcaaggtggcgcaagttgaggcggccgggctcaatgatgaagagatggctctcatcattaaaagattcaagacggcgctaaaaggtcaaaagggacagccaagcaaggccaagaccaagggaaagcgatcatgcttcaaatgcggtaagcttggtcattttattgctaactgtcccgaaaatgatagtgaccaggagcaagggaaaaatgggaagagagagaacaagaaggtttacaagaaggccaaaggcgaagcacaccttggaaaggagtgggattcggattgctcttcgtccgactccgacgacgaaggactcgccgccactgccttcaacaaatcagctctcttccccaacgagcatcacacttgcctcatggcaagggaaaagaaggtaatcactcgtaatgctaatacttatgattcttctagtgatgatgaatctagtgaggatgaaattgattactctagtttattcaagggattggatagaactaagatagctaagattaatgagttgattgatgccttaaatgaaaaggatagaatcttagagaaacaagaagaccttttatatgaagaacatgataaatttgttagtgcacaaaattcacttgctctagaagttaaaagaaatggaatactttcttgtgaactttctacttgtaatgaaaccatttcttctttaaaaggtgaaattaatgttttaactgctaaactagaagtagcaagtaactcttgtgttgaaaatattacaatttgcactaggtgtaaggattttgatgttaatgcttgtagtgaacacttagtttcaatttcaaaactaaatgatgaagtggctagtcttaatgctcaacttaagactagcaaaagtgaattcgaaaaactaaaatttgcaagggatgcctacactattggtagacacccctcaattaaggatgggcttggcttcaagagggaagccaagaacttaacaagccataagactcctatctccaccaaggagaaagggaaggctcctatggctaatagtgttaagaagaatcatgctttcatgtattatgataggagatactctagaaatgcttttaggagtaatgatgtttttgattcacatgcttatgactcttatgctatgactgcttctagttctcatgttatgcatggtagaaatgtgtttagaagaaatgttgttcaccaaatgcctaggagaaatgtagatcataatgctcctaggaaagtagtgaatgaaccttccgaaatttattgtgctctaaatgcttcctttgctatttgtagaaaggataagaaaattgttgctaggaagttaggggcaagatgcaagggagataaaacttgcatttgggtccctaagaatatttgtgctaaccttgtaggacccaacatgagttgggtttatgcatccgggggttcaagctggattattgatagcggatgcacaaaccatatgacgggggagaagaagatgttcacttcctacgtcaagaataaggattcccaagattcaattatattcggtgatgggaatcaaggcaaggataagtctgaaacccaagggaccctcaagcgcttcctcaggagagctcaaaatgagtttgagctcaaggtgaagaagataaggagcgacaacgggtccgaattcaagaaccttcaagtggaggaatttcttgaggaggaagggatcaagcacgagttctccgctccctacacaccacaacaaaatggtgtggtagagaggaagaacaggacgctaattgatatggcgaggatgatgcttggagaattcaagacccccgaatgtttctggtcggaagccgtgaacacggcttgtcacgccatcaacagggtgtaccttcaccgcctcctcaagaagacatcgtatgagctactaaccggtaacaaacccaatgtatcttactttcgtgtatttgggagcaagtgctacattctagtgaagaagggtagaaattctaaatttgctcccaaagctgtagaagggtttttgttaggttatgattcaaatacaaaggcgtatagagtcttcaacaaatcatcgggtttggttgaagtctctagcgacgttgtatttgatgagactaatggctctccaagagagcaagttgttgatcttgatgatgtagatgaagaagacgttccaacggccgctatgcgcaccatggcgattggtgatgtgcgaccacaggaacaattggagcaagatcaacctcactcctcaactatggtgcaacccccaactcaagacgatgaacaggttcatcaacaggaggcgtgtgatcaagggggagcacaagatgatcgagtgatggaggaagaagcgcaaccggcacctccaacccaagttcgagcgatgattcaaagggatcatcccgtcgatcaaattatgggtgacattagcaagggagtaactactcgatctcgattagttaatttttgtgagcattactcctttgtctcttctattgagcctttcagggtagaggaggccttgctagatccggactgtgtgttggccatgcaggaggagctcaacaacttcaagagaaatgaagtttggacactggtgcctcgtccgaagcaaaatgttgtgggaaccaagtgggtattccgcaacaaacaggacgagcacggggtggtgacgaggaacaaggctcgacttgtggcaaaaggttatgcccaagtcgcaggtttggatttcgaggagacttttgctcctgtggctaggctagagtcaattcgaatcttgctagcatatgccgctcaccattctttcaggttgtaccaaatggatgtgaagagcgctttcctcaacgggccgatcaaggaggaggtgtacgtagagcaaccccctggcttcgaggatgatcggttcctcgaccatgtgtgtaagctctctaaggcgctctatggacttaagcaagccccaagagcatggtatgaatgccttagagatttcttagttgctaatgctttcaatgttgggaaagccgatccaactctttttactaagacttgtaatggtgatttgtttgtgtgccaaatttatgtcgatgacataatatttggttctactaaccaaaagtcttgtgacgagtttagcagggtgatgacgcagaaattcgagatgtcgatgatgggcgagttgaactacttccttgggttccaagtgaagcaactcaaggatggcaccttcatctcccaaacgaagtacacgcaagacttgctaaaaaggtttgggatgaaggacgccaagcccgcaaagacgccgatgggaaccgacggacacacagacctcaacaaaggaggtaagtccgttgatcaaaaagcataccggtcaatgatagggtctttactttatttatgtgctagtagaccggatattatgcttagcgtatgcatgtgtgctagatttcaatccgatcctaaggagtgtcacttagtggcggtgaagcgaattcttagatatttagttgctacgccttgcttcggactctggtatccaaaggggtctacctttgacttggttggatactcagattccgactatgctggatgtaaggtcgataggaagagtacatcggggacgtgccaattcttaggaaggtccctggtgtcatggaactctaagaaacaaacctccgttgccctatccaccgctgaggccgagtatgttgccgcaggacagtgttgcgcgcaactactttggatgaggcaaaccctccgggactttggctacaatctgagcaaagtcccactcctatgtgataatgagagtgctatccgcatggcggaaaatcctgttgaacacagccgcacaaagcacatagacatccggcatcactttttgagagaccaccagcaaaagggagatatcgaagtgtttcatgttagcaccgagaaccagctagccgatatctttaccaagcctctagatgagaagaccttttgcaggctgcgtagtgagctaaatgtcttagattcgcgaaacttggattga

SEQ ID NO: 89186 - DNA, 4998 bp, Zea mays
  Clone ID: MRT4577_181337C.1
atggatcctaaagggaagggaatcatgatcaacgacaaggagaaggagtccttcgtcaacgagccaagggatgacaagtccaacgactcgggctcgggccacagacgcaaagatgggaagaagaagaagacaagacgcatcaaggagatcgtctactacgacagcgatgagtctacttcctcccaaaaggacgacgaccacaacgactacgagaaaaagaaaccggtcaattcgaacttttcttttgactactctcgtattccgcatagttcaagttcacatttgctctccattccactcggcaagcccccacactttgatggagaggactacggattttggagccacaaaatgcgtagtcacctattctctctccatcctagtatatgggagattgtagaaagtggaatgcactttgatagttccgatagtcccatgttcattaatgagcaaatacataagaatgcacaagctactactgttcttctagcttctttgtgcagggatgaatacaacaaagtgagcggcttggataacgccaagcaaatatgggacaccctcaagatctctcatgaagggaacgacgtcaccttgctcaccaagatggagttggtggagggcgagcttggacggttcgcaatgataaggggcgaggagccaactcaaacatacaaccggctcaagacccttatcaacaaaataaggagctatggaagcacgcgatggacggaccacgacgtcgtccgactgatgctaaggtcctttaccgttcttgatcctcatttggtgaataatattcgtgagaatcccaggtacaccaaaatgtcgcccgaagaagtccttggaaaattcgtaagtgggcgaatgatgatcaaggaggcaaggtacgtggacgacgccttgaatggaccgatcaacgagccgcaacctcttgctctcaaagcaacaaggagcaaggaggcgctaccgagcaaggtggcgcaagttgaggcggccgggctaaataatgaggagatggccctcatcattaagcgcttcaagacggcgcttaaaggtcgcaagggacagccaagcaagaccaagacaaaggagaagcgctcgtgcttcaaatgtggtaagattggtcatttcattgctaactgtcccgataatgaaagtgaccaggaaaaggggaacaaaagggagaagaagaagcattacaagaaggccaagggcgaggcacatatcggaaaggagtgggattcggattgctcctcctccgactccgaccatgaaggactcgccgccaccgccttcaacaagtcatccctcttccccaacgagcgtcacacttgcctcatggcaagggaaaagaaagtaagcactcatgatactagtacttatgcttcttcaagtgaggatgagtctagtgatgatgatgagatagattactcatgcttattcaagggattagatagatctaaaattaataagattaatgagttgattgatgctttgaatgacaagaatagattactagaaaaacaagaggatcttttatatgaggagcatgataaatttgttagtgcacaaaattctcttgctctagaaattaaaaggaatgaaatgctctctagtgaagtatctacttgtcatgaatccatctctaaattaaaaagtgttaatgatgatttgaatgctaagttagaaatagctagtaaatcaacatcttgtgttgaaattgttgaaacttgcaataggtgtgaagattttgacattgatgcttgtagtgaacacctagtttcaatttccaaacttaatgatgaattggctagtcttaatgctcaacttaagactagcaagagtaattttgataagctaaaatttgcaagggatgcctacacaattggtagacacccctcaattaaggatggtcttggctacaagaaggaagccaagaacttgacaagccataaggctcccatctccgccaaggagaaagggaaggcccctatggctagtaatgtgcaaaagaaccatgcctttatgtaccatgataggagacaaactagaaatacttttaggagttataatacttatgatgattttgactctcatgccatgtttgcttctagttcttcctatatgcatggtagaaatatgtctaggagaaatgcttttcatcatgtgcctagaaagaattttattcatgcttctaggaaagcagtgaatgaaccttctacaatttattgtgctttaaatgcttcctttgccatttgtagaaaggataggaaaatagttgctaggaagttaggggcaaaatgcaagggagacaaaacttgcatttgggtccctaaggatatttgcactaaccttgtaggacccaacatgagttgggtttatgcatccgggggttcaagctggattatcgacagcggatgcacaaaccatatgacgggggagaagaagatgttcacctcctatgtcaagaataaagattcccaagattcaattatattcggtgatgggaatcaaggcaaggataagtctgaaacccaagggaccctcaagcgcttcctcaggagagctcaaaatgagtttgagctcaaggtgaagaagataaggagcgacaacgggtccgagttcaagaaccttcaagtggaggaattccttgaggaggaagggatcaagcacgagttctccgctccctacacaccacagcaaaatggtgtggtagagaggaagaacaggacgctaatcgacatggcgaggacgatgcttggagaattcaagacccccgagcgtttttggtcggaagctgtgaacacggcttgccacgccatcaacagggtctaccttcaccgcctcctcaagaagacttcgtatgagcttctaaccggtaacaaacccaatgtatcttactttcgtgtatttgggagtaaatgctacattctagtgaagaagggtagaaattctaagtttgctcccaaagctgtagaagggtttttgttaggttatgattcaaatacaaaggcgtatagggtcttcaacaaatcatcgggtttggttgaagtctctagcgacgttgtatttgatgagactaatggctctccaagagagcaagttgttgatcttgatgatgtagatgacgaagacgttccaacggccgcgatacgcaccatgacgattggagatgtacggcctcgggagcaattggagcaagatcaaccatcctcctcaacgatggtgcatcccccaactcaagacgatgaacaggttcatcaaaaggaggcgtgtgatcaatggggagcacaagatgatcacatgatggaggaagaagcgcaaccggcacctccaactcaagttcgagcggtgattcaaagggatcatcccgtcgaccaaattttgggtgacattagcaagggagtaactactcgatctcgattagttaatttttgtgagcattactcttttgtctcttctattgagcctttcagggtagaggaggccttgctagatccggactgggtattggccatgcaggaggaactcaacaacttcaagcgcaatgaagtttggacactggtgcctcgtcctaagcaaaatgttgtgggaaccaagtgggtgttccgcaacaaacaagacgagcacggagtggtgacaaggaacaaggctcgacttgtggcaaaaggttatgcccaagtcgcaggtttggactttgaggagacttttgctcctgtggctaggctagagtctattcgtatcttgctagcatatgctgctcaccattctttcaggttgtaccaaatggatgtgaagagcgctttcctcaatgggccgatcaaggaggaggtgtacgtggagcaaccccctggcttcgaggatgaacggtaccccgaccacatgtgtaagctctctaaggcgctctatggacttaagcaagccccaagagcatggtctgaatgccttagagactttttaattgctaatgctttcaaggttgggaaagccgatccaactctttttacaaagacatgtgatggtgatttgtttgtgtgccaaatttatgtcgatgacataatatttggttctactaaccaaaagtcttgtgaagagtttagcagggtgatgacgcagaaattcgagatgtcgatgatgggcgagttgaactacttccttgggttccaagtgaagcaactcaaggacggcaccttcatctcccaaacgaagtacacgcaagatttgctaaagaggtttgggatgaaggacgccaagcccgcaaagacgccgatgggaaccgacggacacaccgacctcaacaaaggaggtaagtccgttgatcaaaaagcataccggtccatgataggttctttgctttatttatgtgctagtagaccggatattatgcttagcgtatgcatgtgtgctagatttcaatccgatcctaaggagtgtcacttagtggctgtgaagcgaattcttagatatttagtcgctacgccttgcttcgggatctggtatccaaaggggtctaactttgacttgattgggtactcagattccgactatgctagatgtaaggtcgataggaagagtacatcgggaacgtgccaattcttaggaaggtccctggtgtcgtggaactctaagaaacaaacttccgttgccctatccaccgctgaggccgagtatgttgccgcaggacagtgttgcgcgcaactactttggatgaggcaaaccctccgggactttggctacaatctgagcaaagtcccactcctatgtgataatgagagtgctatccgcatggcggaaaatcctgttgaacacagccgcacaaagcacatagacatccggcatcactttttgagagaccaccagcaaaagggagatatcgaagtgtttcatgttagcaccgagaaccagctagccgatatctttaccaagcctctagatgagaagaccttttgcaggctgcgtagtgagctaaatgtcttagattcgcggaacttggattga

SEQ ID NO: 89187 - DNA, 4989 bp, Zea mays
  Clone ID: MRT4577_181338C.1
atggatcctaaggggaagggaatcgtgatcaacgataaggagaaggagtccttcgtcaacgagcccaaagatgacaagcataccgactcaggctcgggccatagacggaaggaagggaagaagaagaagacaaggcgcatcaaggaaatcgtctactacgacgacagcgacgaatcttcctcttcccaaaaggacaacgacgacaacgactatgacaaacaaaagacggttaactcaaacttttcttttgattattcgcgcattccgcatagctcaaatgctcatttgctccccattccacttggcaagcctcctcactttgatggagaggactacggattttggagtcacaaaatgcgtactcacctattttctctccatccaagcatttgggagattgtggaaagtggaatgaaatttgatagctcggatagcccttcatttattaatgaacagatccataaaaatgcacaagctactactgtgttgctagcctctttgtgcagggacgagtatcacaaggtgagcggcttggacaatgccaagcagatttgggacaccctcaagatctctcatgaggggaatgatgtcaccttactcaccaagatggagttggtggagggcgagctcggacgattcgcgatgataaggggcgaggagccgacacaaacatacaaccggctcaagatccttatcaacaaaataaggagctacggaagcacgcggtggacggatcacgacgtcgtccgcctaatgctaaggtcatttaccgttcttgatcctcacttggtgaacaatattcgtgaaaatcctaggtacatcaagatgtcgcccgaagaaattcttggaaaatttgtaagcgggcgaatgatgatcaaggaggcgaggtacgtggacgacgcattgaatggcccaatccatgagcctcaacccattgctcttaaggcaacgaggagcaaggaggcgctacccagcaaagtggcgcaaattgaggcggctggtcttaatgatgaagagatggccctcatcatcaaaagattcaagacggcgcttaaaggtcgcaagggacagccaagcaagaccaaagccaaggggaagcgctcatgcttcaaatgtggtaagcttggtcattttattgctaactgtcccgacaatgatagtgatcaggaccaagtgaacaagagggaaaagaagaagcactacaagaaggcaaagggcgaggcacatctaggcaaggaatgggactcggattgctcctcttccgactccgacaatgaaggactcgccgccaccgccttcaacaaatcaaccctcttccccaacgagcgtcacacatgccttatggcaagggagaagaaggtatgtactcggaactctacctatgcttcttcaagtgaggacgaatctagtgatgaagatgaagtagattactcatgtttgtttaagggtctagatagaaccaaggtagacaaaattaatgaattgattgatgctctaaatgagaagaacatgcttttagagaaacaagaggatttattgtatgaagaacatgataaatttatagaagctcaaaaatcctatgctttagaagttaaaagaaatgaaatgctttcttttgaactatctacttgtcatgaaaccatctctactttaaaaggtgtcaacaatgatttaaatgctaaattagaagtagcaaataaatccaattcttgtgtagaacatgtcgcaatttgttctaggtgtaaagattttgatattaatgcttgtagtgaacacttagtttctatttcaaaattaaatgatgaattagctagtcttaatgcacaacttaagactagcaagagtgattttgataaactgaaatttgctagggatgcctacactgttggtagacacccctccattaaggatggacttggcttcaaaagggaagccaagaacttaacaagccataaggctcccattcccgcaaaggagaaagggaaggcccctatggctactagcactaaaaagaaccatgcttttttatatcatgatagaagacaatctagaagtgcttataggggttataatgcttttgattctcatcatatgattgcttctagctcttcttatatgcatggtagaaatatgtctaggagaaatgctattcatcatgtgcctagaaagaatgttagtcatgctcctaggaaagtagtaaatgaattttctacagtatatcatgctttgaatgcttcctttgcaatttgtagaaaggatagaaaagtaattgctaggaagttaggggctaaatgcaagggtgataaaacttgcatttgggtccctaagaagatttgtgctaaccttgtaggacccaacatgagttgggtttatgcatccgggggttcaagctggattatagacagcggatgcacaaaccatatgacgggggagaagaagatgttcacctcctacgtcaagagtaaggattcccaagattcaattatattcggtgatgggaatcaaggcaaggataagtctgaaacccaagggaccctcaagcgcttcctcaggagagctcaaaatgagtttgagctcaaggtgaagaagataaggagcgacaacgggtccgaattcaagaaccttcaagtggaggagttccttgaagaggaagggatcaagcacgagttctccgctccctacacaccacagcaaaatggtgtggttgagaggaagaacaggacgctaatcgacatggcgaggacgatgcttggagaatttaagacccccgagcggttttggtcggaagtcgtgaacacggcttgccacgccatcaacagggtctaccttcaccgactcctcaagaagacgtcgtatgaactactaaccggtaacaaacccaatgtatcttactttcgtgtatttgggagcaagtgctacattctagtgaagaagggtagaaattctaaatttgctcccaaagctgtagaaggttttttgttaggttatgactcaaatacaaaggcgtatagagtcttcaacaaatcattgggtttggttgaagtctctagcgacgttgtatttgatgagactaatggctctccaagagagcaagttgttgatcttgatgaagtagatgaagaagatgttccaacggccgccatacgaaccatggcgattggtgacgtgcgaccacaggaacaagatgagcaagatcaaccctcttcctcaactatggtgcattccccaacacaagacgatgaacaagttcatcaacaggaggcgtgtgatcaagggggagcacaagatgatcatgtgatggaggaagaagcgcaaccggcacctccaacccaagttcgagcgatgattcaaagggatcatcccgtcgaccaaattctgggtgacattagcaagggagtaactactcgatctcgattagttaatttttgtgaacattactcctttgtctcttctattgagcctttcagggtagaagaggccttgctagatccggactgggtgttggccatgcaagaggagttaaacaacttcaagcgcaatgaagtttggacactggtgcctcgtcccaagcaaaatgttgtgggaaccaagtgggtgttccgcaacaaacaggacgagcacggggtggtgacaaggaacaaggctcgacttgtggcaaaaggttatgcccaagtcgcaggtttggactttgaggagacttttgctcctgtggctaggctagagtcaattcgtatcttgctagcatatgccgctcaccattctttcaggttgttccaaatggatgtgaagagcgcattcctcaacgggccaataaaggaggaggtgtacgtggagcaaccccctggcttcgaggatgaacggtaccccgaccacgtgtgtaagctctctaaggcgctctatggacttaagcaagccccaagagcatggtatgaatgccttagagatttcttaattgctaatgctttcaaggttgggaaagccgatccaactctttttacaaagacttgtgatggtgatttatttgtgtgccaaatttatgtcgatgacataatatttggttctactaataaaaagtcttgtgaagagtttagcagggtgatgacgcagaaattcgagatgtcgatgatgggcgagttgaactacttccttgggttccaagtgaagcaactcaaggacggcaccttcatctcccaaacgaagtacacgcaggacctgctaaagcggtttgggatgaaggacgccaagcctgcaaagacaccgatgggaaccgacggacacaccgacctcaacaaaggaggtaagtccgttgatcaaaaagcataccggtcaatgatagggtcattactttacttatgtgctagtagaccggatattatgcttagcgtatgcatgtgtgctagatttcaatccgatcctaaggagtgtcacttagtggcggtgaagcgaattcttagatatttagttgctacgccttgcctcgggctctggtatccaaaggggtctacctttgacttgattggatactcagactccgattatgctggatgtaaggtcgataggaagagtacatcggggacgtgccaattcttaggaaggtccttggtgtcatggaaatctaagaaacaaacctccgttgccctatccaccgctgaggccgagtacattgccgcaggacagtgttgcgcgcaactactttggatgaggcaaaccctcagggactttggctacactctgagcaaagtcccactcctatgtgataatgagagtgctatccgcatggcggaaaatcctgttgaacacagccgcacaaagcacatagacatccggcatcactttttgagagaccaccagcaaaagggggatatcgaggtgtttcatgttagcaccgagaaccagctagccgatatctttaccaagcctctagatgagaagaccttctgcaggttgcgtagtgagctaaatgtcttagattcgcggaacttggattga

SEQ ID NO: 89188 - DNA, 577 bp, Zea mays
  unsure (1)..(577): unsure at all n locations
  Clone ID: MRT4577_181339C.1
attgggtacctcgaggccggccgggacctctctttccacatcgaccgtcacccgctatgtattcagcaaccactggaaagtgttgctcttgatcgctgatgcatggaccaaggatgaccaccatcctgaactgaacctgcaaccacgacgagctgtcgatgagagattatcacgagatgaactagacgcatcttatctggatgctaggaccggcggaggtcaacaaaaatgacactacacgagcagctcgagtgtgtcgtcaacaagcacaagatccgctgatgccccttgagatgccacaaaggcactgttctcccttatgactctccctatcatgatcgcccattccatgcaccaacatatgaaggcagcttgcgaactgcgactagatcaggacacaaaggacgtgtgcatcacttcgttccatcattcttcaacgaaaagatactgcgaccacattaactaaaacattggaatcaattggtaccatatgtactgaactgtacgacagatcgctacaagcgaaatgnggcatggacgcatataggctctctatactatgaccctgaatactgcc

SEQ ID NO: 89189 - DNA, 738 bp, Zea mays
  unsure (1)..(738): unsure at all n locations
  Clone ID: MRT4577_18133C.1
atgcttccgtttaggtttcagcgttttctggttcacatccaacacgcagttggagttggagaccaagccgtagtgtggttaggtcgagcccgagctcaagcgtaaggtcgctgcaagatctataggactagaagaaaagcacggcagcacgcgcgtgcagtcagagttctgcgcgaggagtgacacctcgcacctgggtgcgcgtagcgagttcctctgctctctggttaggcgggctcgtaatgggcccgcgcgtcacgcccccgcgtgggccgaagaaagcgaaaagggggcgagcgagcgagcgaggaaacgacatccggaccggaccggaccgcatcgctgtcgcccccgccgcccgtatggccgaccacgtggcctgggcgtctggcatttcgtttcattttttgttgtgtgtgtcctcccccccaaggaaacagatgtgccgttacttcctgtggtcgcatgcatgtgctcgcagcacgcgtgccgtgtggaggcgcaggattcgcgcaggagtacaacgggtcatccaactgtcagagtaacggatccgacatgtccctggatggatccagcttctggaccgtagggtaacggctctggacaggctggttntctaacatagtcagaccgtgtactgtacttgtggcgtagtagtagcagtagtactaaaggacctgtggcatgagatctggctggcctnctcgtatccagaataacggcagcactaattag

SEQ ID NO: 89190 - DNA, 165 bp, Zea mays
  Clone ID: MRT4577_181340C.1
acgaggataaggttttgttttttttccacaaactgcttgagcggtccgccaggcgcgtaagaccaacaaaaccaccctggggcccttggttctgcccttctccgagcagatggatatgttgggggtcgagctgctccctcaccagttcacatccaagggctaaat

SEQ ID NO: 89191 - DNA, 4986 bp, Zea mays
  Clone ID: MRT4577_181341C.1
atggatcctaaggggaagggaatcgtgatcaacgacaaggagaaggagtccttcgtcaacgagccgaaggatgacaagcctactgactcggggtcgggccacaagcgtaaagatgggaagaagaagaagacaaggcgtatcaaggagatcgtctactacgacgatagcgatgagtcgacttcttcccaaaaggacgacgacaacgactacaggaagacggtcaattcgaacttttcatttgattattctcgtattccacatagttcgaattcgcatttgctttctattcctcttggcaaacctccacacttcgatggggaagactacggattttggagtcacaaaatgcgtagtcacttattctctctccatccaagcatgtgggagattgtagagaatggaatgaaatttgatagctcggatagccctatgcttataaatgaacaaatccatagaaatgcacaagctactactgttctattagcatctttgtgcagggaagagtacaataaggtgagcggcctggacaacgccaagcagatatgggacaccctcaagatctctcacgaagggaacgacatcaccatgctcactaaaatggagttggtggagggcgagcttggacgattcgcaatgataaggggagaggagccaacccaaacttacaaccggctcaagacccttatcaacaaaataaggagctacggaagcacgcgatggacggaccacgacgtcgtccgcctaatgctaaggtcctttaccgttcttgatcctcatctcgtaaacaatattcgtgagaatcccaggtacacgatgatgacgcccgaggaggtactcggaaaattcgtaagcgggcggatgatgatcaaggaggcgagatacgtcgacgacgctctaaacggtccaatcaatgagcctcaacctcttgctctcaaggcaacaagaagcaaggaaatgctacctagcaaggtggcacaaattgaggcggccggacttaatgatgaagagatggctctcatcatcaagagattcaagacggcactaaaaggccgcaaggggcaaccaagcaagaccaagacaaaggggaagcgctcatgcttcaaatgtggtaagcttggtcattttattgctaactgtcccgacaatgatagtgatcaggatcaagggaacaagagggagaagaagaagaactataagaaggcaaagggcgaggcgcatctaggcaaggagtgggactcggactgctcctcttccgactccgacaatgaaggactcgccgccaccgccttcaacaagtcatccctcttcccaaacgagcgtcacacatgccttatggcaagggagaaaaaggtgagtactcgagactccacttatgcttcttctagtgataatgagtctagtgatgatgatgacatagactattcatgcttattcaagggcttagatagatctaagatagataagattaatgagttgattgatgctttgaatgacaagaatagattactagaaaaacaagaagatcttttatatgatgagcatgataaatttgttagtgcacaaaattctcttgctctagaaattaaaaggaatgaaatgctctctggtgaattatctacttgtcataacaccatttctactttagaaggtgtcaacaatgatttaaatgctaaattagaagtggcaaataaatctaattcttgtgaagaatatgttgtaatttgtactaggtgtaaagactttgacattgatgcgtgtagtgaacacctagtttcaatttccaagcttaatgatgaattggctagtcttaatgctcaacttaagactagcaagaatgattttgataagctaaaatttgcaagggatgcctacacgattggtagacacccctcaattaaggatggacttggcttcaagagggaagccaagaacttaacaagccataaggctcccatctccgccaaggagaaagggaaggcccctatggcaagtagtactaaaaggaaccatgcttttatgtatcatgataggagacaaactagaaatgcttataggaataataatgcttatgatgattttgaccctcatgccatgtttgcttctagttcttcctatatgcatggtagaaatatgtctaggagaaatgctattcatcatgtgcctaaaaagaatattattcatgctcctaggaaagtagtgaatgaaccttctacaatttattgtgctttaaatgcttcctttgctatttgtagaaaggataggaaaataattgctaggaagttaggggcaaaatgcaagggagacaaaacttgcatttgggtccctaaggatatttgcactaaccttgtaggacccaacatgagttgggtttatgcatccgggggttcaagctggattattgatagcggatgcacaaaccatatgacgggggagaagaagatgttcacctcctacgtcaagaataaggattcccaagattcaattatattcggtgatgggaatcaaggcaaggataagtctgaaacccaagggaccctcaagcgcttcctcaggagagctcaaaatgagtttgagctcaaggtgaagaagataaggagcgacaacgggtccgagttcaagaaccttcaagtggaggagttccttgaggaggaagggatcaagcacgagttctccgctccctacacaccacagcaaaatggtgtggtagagaggaagaacaggacgctaatcgatatggcgaggacgatgcttggagaattcaagacccccgagtgtttctggtcggaagccgtgaacacggcttgccacgccatcaacagggtctaccttcatcgcctcctcaagaagacttcgtatgagctactaaccggtaacaaacccaatgtatcttactttcgtgtatttgggagcaagtgctacattctagtaaagaagagtagaaattctaagtttgctcccaaagctgtagaagggtttttgttaggttatgactcaaatacaaaggcgtatagagtcttcaacaaatcatcgggtttggttgaagtctctagcgacgttgtatttgatgagactaatggctctccaagagagcaagttgttgatcttgatgatgtagatgaagaagacgttccaacggccgctatgcgcaccatggcgattggtgatgtgcgaccacaggaacaattggagcaagatcaaccttcttcctcaacaatgatgcatcccccaactcaaaacgatgaacaagttcatcaagaggagtgtggtcaagggggagcacaagatgatcatgtgatggagaaagaagcacaaccggcacctccaacccaagttcgagcgatgattcaaagggatcatcccgtcgaccaaattctgggtgatattagcaagggagtaactactcgatctcgattagttaatttttgtgagcattactcctttgtctcttctattgagcctttcagggtagaagaggccttgctagatccggactgggtgttagccatgcaggaggaactcaacaacttcaagcgcaatgaagtttggacactggtgcctcgtcccaagcaaaatgttgtgggaaccaagtgggtgttccgcaacaaacaggacgagcacggggtggtgacgaggaacaaggctagacttgtggcaaaaggttatgcccaagtcgcaggtttggactttgaggagacgtttgctcctgtggctaggctagagtcaattcgcatcttgctagcatatgccgctcaccattccttcaggttgtaccaaatggatgtgaagagcgctttcctcaacgggccaatcaaggaggaggtgtacgtggagcaaccctctggcttcgaggatgaacggtaccccgaccacgtgtgtaagctatctaaggcgctctatggacttaagcaagccccaagagcatggtatgaatgccttagagactttctaattgttaattctttcaaggttgggaaagccgatccaactctttttactaagacatgtgatggtgatttgtttgtgtgccagatttatgtcgatgacataatatttgattctactaaccaaaagtcttgtcaagagtttagcagggtgatgacgcagaaattcgagatgtcaatgatgggcgagttgaactatttccttgggttccaagtgaagcaactcaaggacggcaccttcatctcccaaacgaagtacacgcaagatctgctaaagcggtttgggatgaaggacgccaagcccgcaaagacaccgatgggaaccgacggacacaccgacctcaacaaaggaggtaagtccgttgatcaaaaagcataccggtcaatgatagggtctttactttatttatgtgctagtagaccggatattatgcttagcgtatgcatgtgtgctagatttcaatccaatcctaaggagtgtcacttagtggcggtgaagcgaattctaagatatttggttgctacgccttgcttcgggctctggtatccaaaaaggtctacctttgacttggttggatactcagattccgactacgctggatgtaaggtcgataggaagagtacatcagggacgtgccaattcttaggaaggtccctggtgtcgtggaactctaagaaacaaacctccgttgccctatccaccgctgaggccgagtatgttgccacaggacagtgttgcgcgcaactactttggatgaggcaaaccctcagggactttggctacaatctgagcaaagtcccactcctatgtgataatgagagtgctatccgcatggcggaaaatcctgttgagcacagccgcacaaagcacatagacatccggcatcactttttgagagattaccagcaaaagggagatatcgaagtgtttcatgttagcaccgagaaccagctagccgatatctttaccaagcctctagatgagaagaccttttgcaggttgcgtagtgagctaaatgtcttagattcgcggaacttggattga

SEQ ID NO: 89192 - DNA, 4668 bp, Zea mays
  Clone ID: MRT4577_181342C.1
atggatcctaaggggaagggaatcgtgatcaacgacaaggagaaggagtccttcgtcaacgagcccaaagatgacaagcctaccgactccggctcgggtcatagacgaaaggaagggaagaagaagaagacaaggcgcatcaaggagatcgtctactacgacgacagcgatgagtctacttcttcccaaaaggacgacgacaacgactacaggaagacggtcaattcgaacttttcatttgattattctcgtattccacatagttcgaattcgcatttgctttccattcctcttggcaaacctccacacttcgatggggaggactacggattttggagtcacaaaatgcgtagtcacttattctctctccatccaagcatatgggagattatagagaatggaatgaaatttgatagctcggatagccctatgcttataaatgaacaaatccatagaaatgcacaagctactactgttctcttagcatctttgtgcagggaagagtacaataaggtgagcggcttggacaatgccaagcagatatgggacaccctcaagatctctcacgagggcaacgacgtcaccatgctcaccaagatggaattggtggagggcgaacttgggagattcgctatgataaggggggaggagccaacccaaacatacaaccggctcaagacccttgtcaacaagataaggagctatggaagcacgcgatggacggatcacgacgtcgtccgcctaatgctaaggtccttcaccgttcttgatcctcatctcgtaaacaatattcgtgagaatcccaggtacacgacgatgacgcccgaggaggtactcggaaaattcgtaagcaggcggatgatgatcaaggaggcgagatacgtcgacgacgcgttgaacggtccaatccacgagcctcaacccattgctctcaaggcaacgaggagcaaggaagcgctaccaagcaaggtggcgcaagttgaggtggccgggctaaataatgaggagatggccctcatcattaagcgcttcaagacggcgcttaaaggtcgcaagggacagccaagcaagaccaagactaaggagaagcgctcgtgcttcaaatgtggtaagattggtcatttcattgctaactgtcccgataatgaaagtgaccaggaaaaggggaacaaaagggagaagaagaagcattacaagaaggccaagggcgaggcacatatcggaaaggagtgggattcagattgctcctcctccgactccgacaatgaaggactcgccgccaccgccttcaacaagtcatccctcttccccaacgagcgtcacacttgcctcatggcaagggagaagaaagtaagcactcatgatactagtacttatgcttcttcaaaacatgttacaatctgtaggaggtgtaaagatttcgatgttgatgcttgtagtgatcatttagtttcaatttccaaattaaatgaggaattggctagtcttaatgcccaacttaagactagcaagaatgaatttgataagctgaaatttgcaagggatgcctacacgattggtagacacccctcaattaaggatggacttggctacaagagggaagccaaggacttgacaagccataaggctcctatctccgccaaggagaaagggaaggctcctatggctagtagtactaaaaggaaccatgcttttatgtatcatgataagagacaaactagaaatgcttataggagttataatgcttatgatgattttgactctcatgccatgtttgcttctagttcttcctatatgcatggtagaaatatgtctaggagaaatgctattcatcatgtgcctagaaagaatattattcatgctcctaggaaagtagtgaatgaaccttctacaatttattgtgctttaaatgcttcctttgctatttgtagaaaggataggaaaatagttgctaggaagttaggggcaaaatgcaagggagacaaaacttgcatttgggtccctaaggatatttgcactaaccttgtaggacccaacaagagttgggtttatgcatccgggggctcaagctggattatcgacagcggatgcacaaaccatatgacgggggagaagaagatgttcacctcctacgtcaagaataaggattcccaagattcaataatattcggtgatgggaaccaaggcaaggataagtctgaaacccaagggaccctcaagcgcttcctcaggagagctcaaaatgagtttgagctcaaggtgaagaagataaggagcgacaacgggtccgagttcaagaaccttcaagtggaggagttccttgaggaggaagggatcaagcacgagttctccgctccctacacaccacaacaaaatggtgtggtagagaggaagaacagggcgctaatcgatatggcgaggacgatgcttggagaattcaagacccccgagcgtttttggtcggaagccgtaaacacggcttgccacgccatcaacagggtctaccttcatcgcctcctcaagaagacttcatatgagctgctaaccggtaacaaacccaatgtatcttacttttgtgtatttgggagcaaatgctacattctagtgaagaagggtagaaattctaagtttgctcccaaagctgtagaagggtttttattaggttatgactcaaatacaaaggcgtatagagtcttcaacaaatcatcgggtttggttgaagtctctagcgacgttgtatttgatgagactaatggctctccaagagagcaagttgttgatcttgatgatgtagatgaagaagatgttccgacggccgctatacgaaccatggcgattggagaagttcggccacaggaacaagatgaacgagatcaaccttcttcctcaactatggtgcatcccccaactcaagacgatgaacatgttcatcaacaggaggcgtgtgatcaagggggagcacaagatgatcacgtgatggaggaagaagcgcaaccggcacctccaacccaagttcgagcggtgattcaaagggatcatcccgtcgaccaaattttgggtgacattagcaagggagtaactactcgatctcgattagttaatttttgtgagcattactcctttgtctcttctattgagcctttcagggtagaggaggccttgctagatccggattgggtattggccatgcaggaggaactcaacaacttcaagcgcaatgaagtttggacactggtgcctcgtcccaagcaaaatgttgtgggaaccaagtgggtgttccgcaacaaacaggacgagcacggggtggtgacgaggaacaaggctcgacttgtggcaaaaggttatgcccaagtcgcacgtttggactttgaggagatgtttgctcctgtggctaggctagaatcaatccgtatcttgctagcatatgccgctcaccattctttcaggttgtaccaaatggatgtgaagagcgccttcctcaacgggccaatcaaggaggaggtgtacgtggagcaaccccctggctttgaggatgaacggtaccccgaccatgtgtgtaagctctctaaggcactctatggacttaagcaagccccaagagcatggtatgaatgccttagagacttcttaattgctaatgctttcaaggttgggaaggccgatccaactcttttcactaagacttgtgacggtgatctttttgtgtgccaaatttatgtcgatgacataatatttggttctactaataaaaagtcttgtgaagagtttagcagggtgatgacgcagaaattcgagatgtcaatgatgggcgagttgaactacttccttgggttccaagtgaagcaactcaaggatggcaccttcatctctcaaacgaagtacacgcaagacttgctaaagtggtttggaatgaaggacaccaagcccgcaaagactccgatgggaaccgacggacacaccgacctcaacaaaggaggtaagtccgttgatcaaaaagcataccggtcaatgataggatcgttactttacttatgtgctagtagaccggatattatgcttagcgtatgcatgtgtgctagatttcaatccgatcctaaggagtgtcactcagtggcagtgaagcgaatccttagatatttagttgctacgccttgcttcgggctctggtatccaaaggggtctacctttgacttgattggatattcagactccgactatgctggatgtaaggtcgataggaagagtacatcggggacgtgccaattcttaggaaggtccctggtgtcatggaactctaagaaacaaacttctgttgccctatccaccgctgaggccgagtatgttgtcgcaggacagtgttgcgcgcaactactttggatgaggcaaaccctcagggactttggctacaatctgagcaaagtcccactcctatgtgataatgagagtgctatccgcatggcggaaaatcctgttgagcacagccgcacaaagcacatagacatccggcatcactttctgagagaccaccagcaaaagggagatatcgaagtgtttcatgttagcaccgagaaccagctagccgatatctttaccaagcctctagacgagaagaccttttgcaggctgcgtagtgagctaaatgtcttagattcgcggaacttggattga

SEQ ID NO: 89193 - DNA, 480 bp, Zea mays
  unsure (1)..(480): unsure at all n locations
  Clone ID: MRT4577_181343C.1
gcaccacatatattgatatctgcttgttatacccaacaacggcaacttccatgaacatcggtgcctgctgcctacccctagcgatgaacatcattggacccagtggcagcatcgtactctgctggacatttacagaaggacctggtggggccattcatccagatatcatggcgcgagccctgcatcctgacagattcacccacagttgttagacgtgataccaggacgctgggcctaacgctgggactcttttacaactgcaacagttgctgccatgcaaccaacttgctttgacaaacccaccgacactctaccaacaatcccaagttggtggggctctttcataaactgctcatgagctctagctcaatagtacagcacataggctgatgtttagtggcgtcaccagaaataagaaagtacctgcccaaccgggncgccagccacgtacaagctgggctgaacatgaatggtaattgt

SEQ ID NO: 89194 - DNA, 317 bp, Zea mays
  Clone ID: MRT4577_181344C.1
ggaggggctttcatacacggtggggcgcttgattttgaattaatatgtacttagaaagcattcctaacaaatatatatggaaataacagattgtctgcggaatagcataggaacgacactggctgttgtgtaactgcctcggattccttcatccaccccacgtctattgctgctgctcgtcaaactcatggccatgatccaaaaggtggatggctgaaagcttttcttcctttttgtccgcaaaaaaaacttttagcacaagctcacaattgaaccccatttcctcgagccggtggatagcctcaccgtcctctggg

SEQ ID NO: 89195 - DNA, 385 bp, Zea mays
  Clone ID: MRT4577_181345C.1
acgttccgaaaataaaatccatctgtttagaattcctatactagtactgactctgaggctaatgtctcattcaataattaaactcctccatctctataatacaaaaatggaacttcttaactacaaaatcctgcttaaaatccatatgcacaataaactaacactactacatatgaaacacctgctgtatatgaatcaagttatactacctatgacgaataggcttacaaacctgatatcaacatccaaacaactccaccatattttcttttcccaacaacaaaccaaacaaggcattttttcacactctatattcaatatcacatgcttgtttcttcaaaatagtatgattcaccttaatgttataaatttccccaaatactat

SEQ ID NO: 89196 - DNA, 224 bp, Zea mays
  unsure (1)..(224): unsure at all n locations
  Clone ID: MRT4577_181346C.1
cgtttgcagtggtgcaggtctcttccgctcctaggcagcatccctgtgaagtgcnaccctattgcttccgatcgcctcagcatgcataccctgactaagagccaccaccacgggggcgtgagggacatgagggcgatactcagcatcattatcggggacggcaggcaactaccataggctctactagatgacagctcaagtgccttcatcagggtcaccctgct

SEQ ID NO: 89197 - DNA, 305 bp, Zea mays
  Clone ID: MRT4577_181347C.1
gatctactaagattcagcctgtgtatgtaatcgatgttgctgctgctagtgccgacatccttgacggagattatactatgcctccgacacatcagacgctctcgcatacgccaactcgaaccatcccaggctctgctgcgcttccgacaagcccgcatgccacgcactccttaaccaactgctctgattgataggtcaatcagtcatcactccgcaatacactaactcatgagctgaacgaagacactgatgcttgctgcaaggctggccagagctcatctacaccgtccggccgtcggcggttc

SEQ ID NO: 89198 - DNA, 379 bp, Zea mays
  Clone ID: MRT4577_181348C.1
cggcggtgtaactgcggcatcgcaagccggggggtcgattgtcaactatactgctgggtttgccactctcggcgcgacgggcatcgtgggtatggctctcagcaagaacaataccatcaagcctgtcaagcaacaaacatttttcagcagcatacagcatgagctcgagcagcccctatttgttgccgacttatacctcgaagcagactctcatctggactttggatacctcaatgagagcttgattgagggtccggttacctgggctgatgtcgacactgacgacagtcagcaaggctggtggtcgattactatcgatgcataccaggttggttcccacagggctgttgagggtgcgttccagtccattgttgatacc

SEQ ID NO: 89199 - DNA, 706 bp, Zea mays
  unsure (1)..(706): unsure at all n locations
  Clone ID: MRT4577_181349C.1
cgggatcatttagggcttgttaaaggctggaattagaccaaattcctttaaattgtttgggacatcagtgcatgttcaacagtaatcagagggtttggctccaattccacctgcacagcctacacaaataggcttatttctctgttattgaatacatgttagtggcaagtcttgccgagtttttgtattccattgctcaactgtaaccattaggctgtcctggtaatgaagtttgggtttcttgtcgtggaaactataacaattcagccatgatcatgtgtgctagcatgttactacagagtactttctcatactaagatcatatatttgaggaaggaaaataacgtcctttcatttctttataaaaggtttgaagaatttggcctgtcactagagctcttgaaaagataccatgtgaattgtgttattctgttctttggccttttgacggccagtcagccagcagtgcccttgtaaagatatattacatgtgaatttttgtaggagacagcagcgaccttgttgacagcatcaccttctacaagaaattctgaacctgtgaattctgctactactgttttgccagctcaaggnggctcttctactttagaaaatccttctgatttatccagtcaatcaccagatgtttctggtgccagtgaagttgctcattcaactgatctgatatcacaagttcctaatagca

SEQ ID NO: 89200 - DNA, 500 bp, Zea mays
  Clone ID: MRT4577_18134C.1
aaaataatgaaatactcgaaacatatgccgtggctgctataataagcggagcatgcgtaaacaaattctttgagagttcagacaaacagactcgcgcggatgatctcctacatccctgacataacttgctgcgaatacacatacgcacaccataagcaatccctgggaatgaaagggaaaccatgttccaaatgtggatacccaaaccaccctaactggtaatagatgggcacatcttactcatattgccactcctgatcatgagtgcgatttctgatactgctgctactcttacaccacatagtcatggtgctatcacattgagcgaactacattttatccatgccctcaccattggaccaatgcaagaaagccttcctcctgaacatattatttaactgctccatcacacgggggaacattttctgacatggacatggagttgacaatgtaatgaagacgccatcttagaggccacgctcattggatattacaaacac

SEQ ID NO: 89201 - DNA, 401 bp, Zea mays
  unsure (1)..(401): unsure at all n locations
  Clone ID: MRT4577_181350C.1
gactgagacactctgaggtcaactctcgttattacttccacctgaatacctgatggatacggttcgcagtcgaagtgatgcatggctgttgtgtttctctggcaggcacgggtgacgaacttctacatctctgacaggaactcgggcaagagattctacgttcgtgctggtgagagcgccttgatcactccttgttaatctctattaattgaaaagtaaaccatcttgctaatttttcctctattgcattcatgtcctgcaagtagtctccatcatttggagcagtggaagtttgcatatctgtcgtgacaatgagtgacgtccgtgatgaaagtttcctctctgacattttaagaattacatatgagaaacacataaattctatcngggcggacgcgggg

SEQ ID NO: 89202 - DNA, 539 bp, Zea mays
  Clone ID: MRT4577_181351C.1
accacacgccagccagcctcgaccactggtgagctctgcactctgcttagctgccgtagcttcagtcgccttctgttgttgtggcccacgcagagccacacacacacaccaggacgtacagctgcactgcaccaatggacggcgtctgaggccaggacccgactgccgcttctgtcaaggaggttggccagctggccgccggctccgtcgtcgagatcccgaacgaggagaccgctgctccggcggcggagaccggagtcgctgtcgctaacgagacggggcctgccgaggccgtgactgaacccaaggaggccgaagtcgaggctgacgccgaggccgaggccggagctgaggctgagccgaccgaagcatatgccaacgccgccttgacggtagtacagacgggggccagggaagcagagccggaggccgtcttgccggtagcaaagacgggggctgatgctgccccggatcgggctggtgatccggattagccgactagaccaaagaggttgtgggtgcagaggctagccaggagg

SEQ ID NO: 89203 - DNA, 249 bp, Zea mays
  unsure (1)..(249): unsure at all n locations
  Clone ID: MRT4577_181352C.1
aaaaaaattattattttnttttttaaaaaaaaaaataatggggntttttttttttttaacgtataattcccaaaaaaaaccggccccgtaaaaaaacttatatagaggggttccaaaaccctggcccaagaataaaacccccccccaaacccaaattttctaccaaccaaacattatctaacaagggtttttggtcaaaacaaccccggtttaaaacccaaattttataaagggcccccctcacaaaaa

SEQ ID NO: 89204 - DNA, 533 bp, Zea mays
  Clone ID: MRT4577_181353C.1
gaacgacaggagcctcgggggtatcgtcatccgcctcagcatctatgcccacctcgtcctccgttgtagagcgatagatgtatcacgtagttctagccgagcgtgtctcagcaacgcctcctgtctgctctggctagaagaactcccttggaaaagggaacatgcaccagggagtatatcctgctagccgcattaagaaaccccctagcagtgcgctttggtttcctaccactcatcatgttcaatagaaaaacattaaatgtattagctccataaaattaagtgaactaataaaaatcaaataatacatcacataatatgaaattttgcattacacatcaaaattcatcagaatcacgatcaaggagtcttcttcgatccaaagctcgcaatgtggcttttttgttccttggatttcgttttcgtttcggtgcaacacactcatcagtagtgacatcgttatggtctccgactagtgagttcagtgcaacaccctcatcgatagtaaaagtagttggcaattcttcttcttg

SEQ ID NO: 89205 - DNA, 350 bp, Zea mays
  Clone ID: MRT4577_181354C.1
cgactctagatactgtcctcgatgcgcaccactggcaggttgcgaaccggacgggatcgccgggaacggagggagggtagtgatactgctgactgtggacactgaccaccaccacgcgtgcggctcgtggcgttcggagcgtgcatcaacggaatgagtggccaggcacgccagcccctgctgcacctgctgctttacgtgacttacgactggtgcgactggactggacccgtcagctgtgtacgtactagagatggcactgggtacacgaaatccggcggattttgatctataagagcatgacccagtctacccatagtgttgttaatgggatcaaaggaaacccatcg

SEQ ID NO: 89206 - DNA, 586 bp, Zea mays
  Clone ID: MRT4577_181355C.1
aaaaaaaaaaacaaaaaaaaaaaaaaaaaaaaaaaaaatttaaaaaaaaaaaaaaaaaaaaaaaaaaaaaaaaaaaaaaaaaaaaaaaaaaaaaaaaaaaaaaaatccaaaaaggaaagggctggggggggacccctagccccccaaaaccagggaggggcgaacaaggcaaaaaaaggcttgggggggttaaaaaaaaccaaaaacccggaaatcccaaaaggggaaaaccttttgcctcgtttgcggaacccaggaccgggaaaaaaacacccggggaaactaaacctttttattccccggggaaaaaaaaagcaaagccattccccgaattacgggcaaccaaaagggaaccacccaaacccgaaaaaacggggttggggaaaaaaaaaaaaagctttgggcttttaggaaaagcgtttaagccccccccccaaaagggtaaaagcccagagcccaaaagcataattagttaaccctttgccccaattaacaggggccccgggaaaccccggggaaataagcagggccccccttgcagggttaaaacccccggggggcccaaaagcaaataatccccgggggg

SEQ ID NO: 89207 - DNA, 1596 bp, Zea mays
  Clone ID: MRT4577_181356C.1
atggtgcatcccccaactcaagacgttcatcaagaggaggcgtgtgatcaagggggagcacaagatgatcatgtaatggaggaagaagcgcaaccggcacctccaacccaagttcgagcgatgattcaaagggatcatcccgtcgaccagattttgggtgacattagcaagggagtaactactcggtctcgattagttaatttttgtgagcattactcctttgtctcttctattgagcctttcagggtagaggaggccttgctagatccggactgggtgttggccatgcaagaggagctcaataacttcaaaagaaatgaagtttggacactggtgcctcgtcccaagcaaaatgttgtgagaacaaagtgggtgttctgcaacaaacaagacgagcatggggtggtgacaaggaacaaggcacgacttgtggcaaaaggttatgcccaagtcgcaggtttggactttgaggagacttttgctcctgtggctaggctagagtccattcgtattttgctagcatatgccgctcaccattctttcaggttgttccaaatggatgtgaagagcgctttcctcaacgggccaatcaaggaggaggtgtacgtggagcaaccccctggcttcgaggatgaacggtacctcgaccacgtgtgtaagctctctaaggcgctctatggacttaagcaagccccaagagcatggtatgaatgccttagagactttttaatcgctaatgctttcaaggttgggaaagccgatccaactctttttactaagacatgtgatggtgatctttttgtgtgccaaatatatgtcgatgacataatatttggttcgactaaccaaaagtcttgtgaagagtttagcagggtgatgactcaaaagtttgagatgtcgatgatgggcgagttaagctatttccttgggttccaagtgaggcaactcaaggatgggaccttcatctcccaaatgaagtacacgcaagacttgatcaagaggtttaggatgaaggacgccaagcccgcaaagactccaatgggaaccgacggacacaccgacctcaacaaaggaggtaagtccgttgatcaaaaggcataccggtctatgatagggtctttactttatttatgtgctactagattggatattatgcttagcgtatgcatgtgtgctagatttcaatccgatccaagggagtgtcacttagtggctgtgaagcgaattcttagatatttagtcgctacgccttgcttcgggatctggtatccaaaggggtctacctttgacttaattggatattcggacttcgactatgctggatgtaaggtcgataggaagagtacatcggggacgtgccaattcttaggaaggtccctggtgtcatggagttctaagaaacaaacttccattgccctatccatcgctgaggccgagtacgttgtcgcaggacagtgttgcgcgcaactgctttggatgaggcaaaccctcagggactttggctaccatttgagcaaagtcccctcctatgtgataatgagagtgctatccgcatggcggataatcctgttgaacacagccgcacaaagcacatag

SEQ ID NO: 89208 - DNA, 2304 bp, Zea mays
  Clone ID: MRT4577_181357C.1
gataaatctgaaacccaagggaccctcaagcgcttcctaaggaaagctcaaaacaagtttgagctcaaggtgaaaaagataaggagcgacaatgggtccgagttcaagaaccttcaagtggaggagtaccttgaggaggtctaccttcatcgcctcctcaagaagacgtcatacgagctactaaccggtaacaaaaccaatgtttcgtattaccgagtttttgggagtaaatgctacattctagtgaagaagggtagaaattctaaatttgctcccaaagctgtagaagggtttttgttaggttatgattcaaatacaaaggcgtatagggtcttcaacaaatcatcgggtttggttgaagtctctagcgacgttgtatttgatgagactaatggctctccaagagagcaagttgttgatcttgatgaagtagatgaagaagatgttccaacggccgcaatacgaaccatggcgattggtgatgtacgaccccaggaacaaaaggagcaagatcaagcttcttcctcaataatggtgcattccccatatcaagactgtgaacaggttcaagaagaggcgtgtgatcaagggggagcacaagatgttcatgtaatagaggaagaagcgcaaccggcacctccaacccaagttcgagcgacgattcaaagggatcatcccgtcgaccaaattttgggcgacattagcaagggagtaactactcggtctcgattagttaatttttgtgagcattactcctttgtatcttctattgagcctttcagggtagaagaggccttgctagatccggactgggtgttggccatgcaagaggagctcaacaacttcaagaggaatgaagtttggacattggtgcctcgtcccaagccaaatgttgtgggaaccaagtgggtgttccgcaacaaacaagacgagcacggggtggtgacaaggaacaaggctcgacttgtggcaaaaggttatgcccaagtcacatgtttggactttgaggagacttttgctcctgtggctaggctagagtccattcgtatcttgctagcatatgccactcaccattccttcaggttgttccaaatggatgtgaagagcgctttcctcaacgggccaatcaaagaggaggtgtatgtggagcaaccccctggcttcgaggatgaacggtaccccgaccacgtgtgtaagctctctaaggcgctctatggacttaagcaagccccaagagcatggtatgaatgccttagagactttttaattgctaatgctttcaaggttgggaaagctgatccaactctttttactaagacttgtgatggtgatctttttgtgtgccaaatttatgtcgatgacataatatttggttccactaaccaaaagtcttgtgaagagtttagcagggtgatgactcagaaattcgagatgtcgatgatgggcgagttaagctacttccttgggttccaagtgaggcaactcaaggatgggaccttcatctcccaaacgaagtacacgcaagacttgatcaagcgttttgggatgaaggatgccaagcccgcaaagactccaaagggaaccgacggacacaccgatctcaacaaaggaggtaagtccgttgatcaaaaagcataccgttctatgatagggtctttactttatttatgtgctagtagaccggatattatgcttagtgtatgcatgtgtgctagatttcaatctgatccaagggagtgtcacttagtggctgtgaagcgaattcttagatatttagtcgctacgccttgtttcgggatctggtatccaaaggggtctacctttgacttaattggatattcagactccgactatgctggatgtaaggttgataggaagagtacatcggggacgtgccaattcttaggaaggtccctggtgtcatggatttctaagaaacaaacttctgttgccctatccaccgctgaggccgagtacgttgccacagggcagtgttgcgcgcaactagtttggatgaggcaaaccctcagggactttggctacaatttgagcaaagtccctctcctatgtgataatgagagtgctatccgcatggcggataatcctgttgaacacagtcgcacaaagcacattgacatccggcatcactttttaagagacccccagcaaaagggggatatcgaagtgtttcatgttagctccgagaaccagctagccgatatctttaccaaacctttagatgagcagaccttttgcaagttgcgtagtgagctaaatgtcttagattcgcggaacctggattga

SEQ ID NO: 89209 - DNA, 357 bp, Zea mays
  Clone ID: MRT4577_181358C.1
gctaaggcaatcttacatcgtccacaggcatctcagatgctgaccgtcgcgcgaagagggggctctaacgccgaggggtgacccgctcgactgcacaccttctcgcgaggcgactgcttgcacttgctgtgtagtatctacatggtcgccgggctagcacagcctgctgctcgtggtgacacctccttactggggtgaacgtactgcatgatttactaaacgtgctggtgcgcgtatatgcctgggaagagcacacactaaacggaggggcctaatcggactacatggttgtcctcacagggcggatcgattagaacctgctacatatggaacactcactattgtacaagattaatg

SEQ ID NO: 89210 - DNA, 2737 bp, Zea mays
  Clone ID: MRT4577_181359C.1
aaaggataggaagatagttgctaggaaattaggggcaaaatgcaagggtgataaaacttgcatttgggtccctaagacaattgtgactaaccttgtaggacccaacaagagttgggtttatgcatccgggggttcaagctggattatcgacagcggatgcacaaaccatatgacgggggagaagaagatgttcacctcctacgtcaaaaacaaggattcccaagattcaataatattcggtgatgggaatcaaggcaaggataagtctgaaacccaaggaaccctcaagcgcttcctaaggagagctcaaaatgagtttgagctcaaggtgaagaagataaggagcgacaacgggtccgaattcaagaaccttcaagtggaggagtttcttgaggaggaagggatcaagcacgagttctccgctccctacacaccacaacaaaatggtgtggtagagaggaagaacaggacgctcatcgatatggcaaggacgatgcttggagagttcaagacccccgaatgcttttggtcgaaagccgtgaacacggcttgccacgccatcaacagggtctaccttcatcgcctcctcaagaaaacgtcatatgagctactaaccggtaacaaacccaatgtatcgtactttcgtgtatttgggagtaaatgctacattttagtgaagaagggtaggaattccaaatttgctcccaaagccgtagaagggtttttgttaggttatgactcaaatacaaaggcgtatagagtcttcaacaaatcatcgggtttggttgaagtctctagcgacgttgtatttgatgagactaatggctctccaagagagcaagttgttgatcttgatgatgtagatgaagaagatgttccgacggccgctatacgaaccatggcgattggtgatgtacgaccacaggaacaaaaggagcaagatcaaccttcttcctcaactatggtgcattccccaactcaagacgatgaacaggttcatcaacaggaggcgtatgatcaagggggagcacaagatgatcaagtaatggaggaagaaggacaaccggcacctccaacccaagttcgagcaatgattcaaagggatcatcccgtcgaccaaattctgggtgatattagcaagagagtaactactcgatctcgattagttaatttttgtgagcattactcctttgtctcttctattgagcctttcagggtagaagaggccttgctagatccagactgggtgttggccatgcaagaggagctcaacaacttcaagaggaatgaagtttggacgccggtgcctcgttctaagcaaaatgttgtgggaaccaagtgggtgttccgcaacaaacaagacgagcacggagtagtgataaggaacaaggctcgacttgtggcaaaatgttatgcccaagtcgcaggtttggactttgaggagacttttgctcctgtggctaggctagagtccatttgtattttgctagcatatgccgctcaccactctttcaggttgttccaaatggatgtgaagagcgctttcctcaacgggccaatcaaggaggatgtgtacgtggagcaaccccctggcttcgaggatgaacggtaccccgaccacgtgtgtaagctctctaaggcgctctatggacttaagcaagccccaagagcatggtatgaatgccttagagatttcttaattgctaatgctttcaaggttgggaaagccgatccaactctttttactaagacttgtgacggtgatctttttgtgtgccaaatttatgtcgatgacataatatttggttctactaataaaaagtcttgtgaagagtttagcagggtgatgacgcagaaattcgagatgtcaatgatgggcgagttgaactacttccttgggttccaagtgaagcaactcaaggacggcaccttcatctctcaaacgaagtacacgcaagacttgctgaagcggtttgggatgaaggatgccaagcccgcaaagactccgatggggaccgacggacacactgatctcaacaaaggaggtaagtccgttgatcaaaaggcataccggtcaatgatagggtcattactttacttatgtgctagtagaccggatattatgcttagcgtatgcatgtgtgctagatttcaatccgatcctaaggagtgtcacttagtggcagtgaagcgaatccttagatatttagttgctacgccttgctttgggctctggtatccaaaggggtctacctttgacttgattggatattcagattccgactatgctggatgtaaggtcgataggaagagtacatcggggacgtgccaattcttaggaaggtccctggtgtcatggaactctaagaaacaaacctccgttgccctatccaccgctgaggccgagtatgttgccgcaggaaagtgttgcgcacaactactttggatgaggcaaaccctcagggactttggctacaatctgagcaaagtcccactcctatgtgataatgagagtgctatccgcatggcggaaaatcctgttgaacacaaccgcacaaagcacatagacatccgacatcactttttgagagaccaccagcaaaagggagatatcgaagtgtttcatgttagcaccgagaaccagctagccgatatctttaccaagcctctagatgagaagaccttttgtaggttgcgtagtgagctaaatgtcttagattcgcggaacttggattga

SEQ ID NO: 89211 - DNA, 203 bp, Zea mays
  Clone ID: MRT4577_18135C.1
ggccaaaacaagatacaagttccatccaacatgcaacacgatttttttacgggggggtgctggatttaaggaaaacagcccatcgttttttggttttaaaaggggcattttggggggggaacttttttttttacaagagggtcccggcatgggggtcacggggggaatcgttttttaagccctcacaataggaccggccccgg

SEQ ID NO: 89212 - DNA, 2376 bp, Zea mays
  Clone ID: MRT4577_181360C.1
atgacgggggagaagaagatgttcacctcctacgtcaaaaacaaggattcccaagattcaatcatatttggtgatgggaaccaaggcaaggataagtctgaaacccaagggaccctcaagcgcttcctaaggagagctcaaaatgagtttgagctcaaggtgaagaggataaggagcgacaacgggtccgagttcaagaaccttcaagtggaggagtttcttgaggaggaagggatcaagcacgagttctccgctccctacacaccacaacaaaatggtgtggtagagaggaagaacaggacactcatcgatatggcgaggacgatgcttggagagttcaagacccccgagtgcttttggtcggaagccgtaaacacggcgtgccacgccatcaacagggtctacctacatcgcctcctcaagaagacgtcgtatgagcttctaaccggtaacaaacccaatatatcttactttcgtgtatttgggagcaaatgctacattctagtgaagaagggtagaaattccaagtttgctcccaaagctatagaagggtttttgttaggttatgattcaaatacaaaggcgtatagggtcttcaacaaatcatcgggtttggttgaagtctctagcgacgttgtatttgatgagactaatggctctccaagagagcaagttgttgatcttgatgatgtagatgaagaagacgttccaacggccgcaatacgcaccatggcgattggacaggtgcgaccacaggaacaaaatgagcgagatcaaccttcttcctcaactatggtgcatcccccaactcaagacgatgaacaggttcatcaacaggaggcgtgtgatcaagggggagcacaagatgatcatgtgatggaggaagaagcgcaaccggcacctccaacccaagttcgagcgatgattcaaagggatcatcccgtcgaccaaattctgggtgatattagcaatggagtaactactcgatatcgattagttaatttttgtgagcattactcctttgtctcttctattgagcctttcagggtagaagaggccttgctaaattcggactgggtgttggccatgcaagaggagctcaacaacttcaagcgcaatgaagtttggacactggtgcctcgtcccaagcaaaacgttgtgggaaccaagtgggtgttccgcaacaaacaggacgagcacggggtggtgatgaggaacaaggctcgacttgtggcaaaaggttatgcccaagtcgcaggtttggactttgaggagacttttgctcctgtggctaggctagaatccattcgtatcttgctagcatatgtcgctcaccattctttcaggttgttccaaatggatgtgaagagcgccttcctcaacgggccaatcaaggaggaggtgtacgtggagcaaccccctggcttcgaggatgaacggtaccccgaccacgtgtgtaagctctctaaggcgctctatggacttaagcaagccccaagagcatggtatgaatgccttagagatttcttaattgctaatgctttcaaggttgggaaagccgatccaactcttttcactaagacttgtgacggtgatctttttgtgtgccaaatttatgtcgatgacataatatttggttctactaataaaaagtcttgtgaagagtttagcagggtgatgacgcagaaattcgagatgtcgatgatgggcgagttgaactacttccttgggttccaagtgaagcaactcaaggacgacactttcatctcccaaacgaagtacacgcaagacttgctaaagcggtttgggatgaaggacgccaagcccgcaaagacaccgatgggaattgacggacacaccgacctcaacaaaggaggtaagtccgttgatcaaaaagcataccggtctatgatagggtctttactttatttgtgtgctagtagaccggatattatgcttagcgtatgcatgtgtgctagatttcaatccaatcctaaggagtgtcacttagtggcagtgaagcgaatccttagatatttagttgctacgccttgcttcgggctctggtatccaaaggggtctacctttgacctgattggatattcagattccgactatgctggatgtaaggtcgataggaaaagtacatcggggacgtgccaattcttaggaaggtccctggtgtcatggaattctaagaaacaaacctccgttgccctatccaccgctgaggccgagtatgttgccgcaggacagtgttgcgcgcaactactttggatgaggcaaaccctcagggactttggctacaatctgagcaaagtcccactcctatgtgataatgagagtgctatccgcttggcggaaaatcctgtttag

SEQ ID NO: 89213 - DNA, 530 bp, Zea mays
  unsure (1)..(530): unsure at all n locations
  Clone ID: MRT4577_181361C.1
ggggggggggggggtttttttaaaattttttttgtggggtttttttttttttttttttttttttttttttttttttttttaaattcctaacaaaacccaaaaaaaccagaacctaatgaattcctttcaagaccgggccccataaatttaactcggaaganaggggggtccaaaaccaacatggatcccccctccaagggcccccgtcacatttattttcaacctaaacaaaccccaaaaatgggtttccaccaaaagcccttgggggccaccccccatagggaggcaaaaaaaactctctctactgggtcttaaacatttggcggatcaaggccaccaccccttttctttacccccaccccttttcctccccaaaaaccaaccttataaaatggtccttcaaggcaatccccgccttggcctcaaaaatactcaaccccctttcacccgtgaaatccggggaaaccaaaacctcccccacctaacccaaaatacccttcaaagggcccccaaaaacaaccctaaaaacc

SEQ ID NO: 89214 - DNA, 122 bp, Zea mays
  Clone ID: MRT4577_181362C.1
cagcggacgtaagtcggcacgaggaacgactgtgtcccacagcaataacagcgggatgcttcccccagggtcacttctcaggtgaggcttcagactaaaggagagagggaaggtcctggccc

SEQ ID NO: 89215 - DNA, 4971 bp, Zea mays
  Clone ID: MRT4577_181363C.1
atggatcctaagggcaaggggatcgtgatcaatgataaggataaggagtccttcgtcaacgagccaaaagatgacaagcctaccgactcaggctcgggccacaaacgaagagatgggaagaagaagaagacaaggcgcatcaaagagatcgtctactacgacgatagcgatgagtcctcttcttcccaaaaggacaacgacgacaacgactacgacaaaagaaagacggttaattcaaacttttctttcgattattcttgtattccgcatagctcaaatgcacatttgctttccattcctattggcaaacctccacactttgatggggaggactacggattttggagtcagaaaatgcgtagtcacttgttctctctccatccaagcatatgggagattgtagagagtggaatgaaatttgatagctcggatagtcccatgtttataaatgaacaaatccataaaaatgcacaaactactactgtcctgttagcatctttgtgcagggaagagtacaataaggtgagcggcttggacaatgccaagcagatctgggacaccctcgggatctcacatgaggggaacgacgtcaccatgctcaccaagatggagttggtcgagggcgagcttgggagatttgcaatgataaggggagaggatccaacccaaacatacaaccggctcaagaccctcatcaacaagataaggagctatggaagcacgcgatggacggaccacgacatcgttcgtctaatgctaaggtcctttactgttcttgatccacatcttgtgaacaatattcgtgaaaatcctaggtacacaaagatgtcgcccgaagaagttcttgggaagttcgtgagcgggcgaatgatgataaaggaggcgagatacatggacgatgcaatgaacggtccaatccatgagcctcaacccattgctctcaaggcatcaaggagcaaggaggcactacctagcaaggtagcgcaagttgaggcggccgggctcaatgatgaagagatggccctcatcatcaagcgcttcaagacggtgctaaagggacgcaaggagcatcccaaaaagaccaagacgaaggggaagcggtcatgcttcaaatgtggtaagattggtcattttatcgctaactgtcccgataatgatagtgaccaggaacaagggaacaagagggaaaagaagaattacaaaaaggccaagggcgaggcacatcttggaaaggagtgggattcggattgctcctcttctgactccgacaatgaaggactcgccgccaccgccttcaacaagtcatccctcttccccaacaagcatcacacatgcctcatggcaaaggagaagaagggcctagatagaaccaaggttgataaaattaatgaattaattgatgccttgaatgataagaataggtgtaaagattttgatgttgatgcttgtagcaaacacctagcttcaatttctaaattaaatgatgaagtggctagtcttaatgcacaacttaagactagcaaaagtgattttgataagttaaaatttgcaagggatgcctacacgattggtagacacccctcaattaaggatggacttggcttcaagagggaagccaagaacttaacaagccataaggctcccatctccgccaaggagaaagggaaggcccctatggctagtagtactaaaaagaaccatgctttcatgtatcatgataggagatattctagaaatgcctatagaagttatgatacttatgattcatatgctatgactgcttctagttcccatgttgtgcatgatagagatatgcctaggagaaatgttgttcctaggaaaattaatgaaccttctacaatatatcatgcttgcaatgcttcctttgctatttgtagaaaggataagaaggtttatgcatccgggggttcaagctggattatcgacagcggatgcacaaaccacatgacgggggagaagaagatgttcacctcctacgtcaagaacaaggatccccaagattcaatcatattcggtgatgggaaccaaggcaaggtgaaaggctttggcaagattgcaatctcaaatgagcactctatttctaatgtgtttttagttgagtcacttggatataatttgttatctgttagtcaattatgcaatatgggatataattgtttattcacaaatatagatgtgtctgtctttagaaggtgtgatggttcattagcttttaagggtgtactagacgacaaactttatttagttgattttgcaaaagaggaggccggtctagatgcatgcttaattgctaagacttgcatgggctggctgtggcatcgccgtttagcacatgtgggaatgaagaaccttcacaagcttctaaagggagaacacgtgataggtttaactaacgtgcatttcgaaaaagatagaccttatgcagcttgtcaagcaggtaaacaagtgggaggagcgcatcacagcaaaaatgtgatgaccacatcaagacccctggagctgctacatatggacctcttcggaaccgtcgcctatctgagcataggaggaagtaagtatggtctagttattgttgatgacttttcccgcttcacttgggtattctttttgcaggataaatctaaaacccaagggaccctcaagcgcttcctaaggagagctcaaaacgagtttgagctcaagaggaagaacaggatgctaatcgacatggcgaggacgatgcttggagagtttaagacccccgagcacttttggtcggaagccgggaacacggcttgccacgccatcaaccgggtctaccttcatcgcctcctcaagaagacttcgtatgagctactaaccggtaacaaacccaatgtttcgtatttccgagtttttgggagtaaatgctatattctagtgaagaaaggtagaaattctaaatttgctcccaaagctgtagaagggtttttgttaggttatgactcaaatacaaaggcgtatagagtcttcaacaaatcatcgggtttggttgaagtctctagcgacgttgtatttgatgagactaatggctctccaacagagcaagttgttgattttgatgatgtagatgaagaagaagttccaacggccgcaatacgcaccatggcgattggagatgtgcggccacaggaacaagatgaacgagatcaaccttcttcctcaacaatggtgcatcccccaactcaagatgatgaacaggaggcgtgtgatcaagggggagcacaagatgatcatgtaatggaggaagaagcacaactggcacctccaacccaagttcgagcgatgattcaaagggatcatctcgtcgaccaaattttgggtgacattagcaagggagtaactactcgatctcgattagttaatttttgtgagcattactcttttgtctcttttattgagcctttcagggtagaagaggccctgctagatccggactgggtgttggccatgcaggaggagctcaacaacttcaagagaaatgaagtttggacacttgtgcctcgtcccaagcaaaatgttgtgggaaccaagtgggtgttccgcaacaaacaagacgagcacggggtggtgacaaggaacaaggctagacttgtggcaaaaggttatgcccaagtcgcaggtttggactttgaggagacttttgctcctgtggctaggctagagtccattcgcattttgctagcatatgccgctcaccattctttcaggttgttccaaatggatgtaaagagcgctttcctcaacgagccaatcaaggaggaggtgtacgtggagcaaccccctggcttcgaggatgaacggtaccccgaccacgtgtgtaagctctctaaggcgctctatggacttaagcaagccccaagagcatggtatgaatgccttagagactttttaattgctaatgctttcaaggttgggaaagccgatccaactctttttactaagacttgcgatggtgatctttttgtgtgccaaatttatgtcgatgacataatatttggttccactaaccaaaagtcctgtgaagagtttagcagggtgatgacgcagaaattcgagatgtcgatgatgggcgagttgaactacttccttgggttccaagtgaagcaactcaaggacggcaccttcatctcccaaactaagtacatgcaagacttgctaaagcggtttgagatgaaggacgccaagcccgcaaagactctgatgaggaccgacagacacaccgacctcaacaaaggaggtaagtccgttgatcaaaaggcataccggtcaatgatagggtctttactttatttatgtgctagtagaccggatattatgctcagcgtatgcatgtgtgctagatttcaatccgatcctaaggagtgtcacttagtggcggtgaagcgaatctttagatatttagtcgctacgccttgcttcgggatcaggtatccaaaggggtctacttttgacttgattggatattcagattccgactatgtcggatgtaaggtcgataggaagagtacattggggacgtgccaattcttaggaaggtccctagtgtcatggaattctaagaaacaaacttttgttgccctatccaccgctgaggccgagtacgttgccgcaggacagtgttgcgcgcaactactttggatgaggcaaaccctccgggactttcgctacaatctgagcaaagtcccactcctatgtgataatgagagtgctatccgcatggcggaaaatcctgttgaacacagtcgcacaaagcacatagacatccggcatcactttttaagagaccaccagcaaaagggagatatcgaagtgtttcatgttagcaccgagaaccagctagccgatatctttaccaagcctctagatgagaagaccttttgcaggctgcgtagtgagctcaatgtcttagattcgcggaacctggattga

SEQ ID NO: 89216 - DNA, 4827 bp, Zea mays
  Clone ID: MRT4577_181364C.1
atggatcctaaggggaagggaatcgtgatcaacgataaggagaaggagtccttcgtcaacgagcccaaagatgacaagcctaccgactctggctcgggccatagacggaaggaagggaagaagaagaagataagacgcatcaaggagatcgtctactacgacgacagcgacgaatcttcctcttcccaaaaggacaacgacgacaacgactatgacaaacaaaagacggttaactcaaacttttcttttgattattcgcgcattccgcatagctcaaatgctcatttgctccccattccacttggcaagcctcctcactttgatggagaggactacggattttggagtcacaaaatgcgtactcacctattttctctccatccaagcatttgggagattgtggaaagtggaatgaaatttgatagctcggatagcccttcgtttattaatgaacagatccataaaaatgcacaagctactactgtgttgctagcctctttgtgcagggacgagtatcacaaggtgagcggcttggacaatgccaagcagatttgggacaccctcaagatctctcatgaggggaatgatgtcaccttactcaccaagatggagttggtggagggcgagctcggacgattcgcgatgataaggggcgaggagccgacacaaacatacaaccggctcaagatccttatcaacaaaataaggagctacggaagcacgcgatggacggatcacgacgtcgtccgcctaatgctaaggtcatttaccgttcttgatcctcacttggtgaacaatattcgtgaaaatcctaggtacatcaagatgtcgcccgaagaaattcttggaaaatttgtaagcgggcgaatgatgatcaaggaggcgaggagcaaggaggcgctacctagcaaggtggcgaaaattgaggcggccggtcttaatgatgaagagatggccctcatcatcaaaagattcaagacggcactaaagggtcgcaagggacagccaagcaagactaagaccaagggaaagcgatcatgcttcaaatgcggtaagcttggtcattttattgctaactgtcccgacaatgatagtgaccaggaacacaggagcaagagggaaaagaagaagcattacaagaaggccaagggcgaggcacacatcggaaaggagtgggattcggactgctcctcctccgactccgacaatgaagggcttgccgccaccgccttcaacaaatcaaccctcttccccaacgagcgtcacacatgccttatggcaagggagaagaagatgagtactcgagacaccacttatgtctcttctagtgatgatgagtctagtgatgaggaaatagattactctaacttgttcaagggattggatagaaataagattgataaaatcaataaattgattgatgccttgaatgagaaggatagactcttagagaaacaagaggatttattgtatgaagaacatgataaatttatagaagcacaaaaatcctatgctttagaagttaaaagaaatgaaatgctttcttttgaactatctacttgtcatgaaaccatttctactttaaaaggtgtcaacaatgatttaaatgctaaattagaagtagcaaataaatccaattcttgtgtagaacatgttgtaatttgtactaggtgtaaagattttgatattgatgcttgtagtgaacacctagtttcaatttccaagcttaatggtgaattggctagtctcaatgctcaacttaagactagcaagaatgatttcgataaactaaaatttgcaagggatgcctacacaattggtagacacccctcaattaaggatggacttggcttcaagagagaagccaagaacttaacaagccataaggctcccattcccgccaaggagaaagggaaggcccctatggctagtaatgtgcaaaagaaccatgcgtttatataccatgacaggagacaatctagaaatgcttataggaattataatgcttatgatgattttgactctcatgccatgtttgcttccagttcttcctatatgcatggtagaaatatgtctaggagaaatgctattcatcatgtgcctagaaagaatattattcatgctcctaggaaagtagtgaatgaaccttctacaatatatcatgctttgaatgcttcctttgcaatttgtagaaaggatagaaaggtttatgcatccgggggttcaagctggattattgacagcggatgcacaaaccatatgacgagggagaagaagatgttcacctcctatgtcaagaataaggattcccaagattcaatcatattcggtgatgggaatcaaggcaaggataagtctgaaactcaagggaccctcaagcgcttcctcaggagagctcaaaatgagtttgagcttaaggtgaagaagataaggagcgacaacgggtccgagttcaagaaccttcaagtggaggagtttcttgaagaggaagggatcaagcacgagttctccgctccctacacaccacagcaaaatggtgtggtagagaggaagaacaggacgctcattgacatggcgaggacgatgctaggagagttcaagacccccgagtgcttttggacggaagccgtgaacacggcttgccacgccatcaacagggtctaccttcatcgcctcctcaagaagacgtcgtatgagctactaaccggtaacaaacccaatgtatcttattttcgtgtatttgggagcaagtgctacattctagtgaagaagggtagaaattctaagtttgctcccaaagcagtagaagggtttctattaggttatgactcaaatacaaaggcgtatagagtcttcaacaaatcatcgggtttggttgaagtctctagcgacgttgtatttgatgagactaatggctctccaagagagcaagttgttgatcttgatgatgtagatgaagaagatgttccaacggccgctatgcgcaccatggctattggtgatgtgcgaccacaggaacacttggagcaagatcaaccttcttcctcaacaatggtgcatcccccaactcaagacgatgaacaggttcatcaacaggaggcgtgtgatcaagggggagcacaagatgatcatgtgatggaggaagaagcgcaaccggcacctccaacccaagttcgagcgatgattcaaagggatcatcccgtcgaccaaattctgggtgacattagcaagggagtaactactcggtctcgattagttaatttttgtgagcattactcctttatctcttctattgagcctttcagggtagaagaggccttgctagatccggactgggtgttggccatgcaagaggagctcaacaacttcaagaggaatgaagtttggacactggtgcctcgtccgaagcaaaatgttgtgggaaccaagtgggtgttccgcaacaaacaggacgagcacggggtggtgacaaggaacaaggctcgacttgtggcaaaaggttatgcccaagtcgcaggtttggactttgaggagacttttgctccggtggctaggctagagtccattcgtatcttgctagcatatgccgctcaccattctttcaggttgttccaaatggatgtgaagagcgctttcctcaacgggccaataaaggaggaggtgtacgtggagcaaccccctggcttcgaggatgaacggtaccccgaccacgtgtgtaagctctctaaggcgctctatggacttaagcaagccccaagagcatggtatgaatgccttagagatttcttaattgctaatgctttcaaggttgggaaagtcgatccaactcttttcactaagacatgtgatggtgatctgtttgtgtgccaaatttatgtcgatgacataatatttggttctactaataaaaagtcttgtgaagagtttagcagggtaatgacgcagaaattcgagatgtcaatgatgggcgagttgaactacttccttgggttccaagtgaagcaactcaaggacggcaccttcatctctcaaacgaagtacacgcaagatctgctgaagcggtttgggatgaaggacgccaagcccgcaaagactccgatgggaaccgacggacacaccgacctcaacaaaggaggtaagtccgttgatcaaaaagcataccggtcaatgatagggtctttactttacttatgtgctagtagaccggatattatgcttagcgtatgcatgtgtgctagatttcaatccgatcctaaggagtgtcacttagtggcggtgaagcgaattcttagatatttagttgctacgccttgcttcgggctctggtatccaaaggggtctacctttgacttgattggatattcagactccgattatgctggatgtaaggtcgataggaagagtacatcggggacgtgccaattcttaggaaggtccctggtgtcatggaattctaagaaacaaacctctgttgccctatccaccgctgaggccgagtatgttgccgcaggacagtgttgcgcgcaactactttggatgaggcaaaccctcagggactttggctacaatctgagcaaagtcccactcctatgcgataatgagagtgctatccgcatggcggaaaatcctgttgaacacagccgcacaaagcacatagacatccggcatcactttttgagagaccaccagcaaaagggggatatcgaagtgtttcatgttagcaccgagaaccagctagccgatatctttaccaagcctctagatgagaagaccttttgcaggctgcgtaatgagctaaatgtcttagatttgcggaacttggattga

SEQ ID NO: 89217 - DNA, 5118 bp, Zea mays
  Clone ID: MRT4577_181365C.1
atggatcctaaggggaagggaatcgtgatcaacgacaaagagaaggaatccttcgtcaacgagccgaaggacgacaagcctaccgactccggctcgggcaatagacggaaggaagggaagaagaagaagacgaggcgcatcaaggagatcgtctactacgacgacaacgatgagtctacttcttcccaaaaggatgacgaccacaacgactacgagagagggaaaccggttaattcgaacttttcttttgactactcttgtattccgcaaagttcaaattcacatttgctctccattccactcggcaagcccccacactttgatggggaggactacggattttggagccacaaaatgcgtagtcacctattctctctccatcctagtatatgggagattgtagagagtggaatgcactttgatagttcggatagtcccatgttcattaatgagcaaatccataagaatgcacaagctactactgttcttctagcttcattgtgcagggatgaatatcacaaagtgagcggcttggataacgccaagcagatctgggacaccctcaagatttcacatgaggggaacgacgtcaccttgctcaccaaaatggagttggtggaaggcgagcttggacggtttgcgatgataaggggcgaggagccaactcaaacatacaaccggctcaagatccttatcaacaaaataaggagctacagaagcacgcgatggacggaccacgacgtcgtccgactgatgctaaggtcctttacagttcttgatcctcatttggtgaataatattcgtaagaatcccaggtacgtggacgacgcattgaatggtccaatcaacgagcctcaaccccttgctctcaaggcaacaagaagcaaggaggcgctacctagcaaggtggcacaatttgaggcagccggacttaatgatgaagagatggccctcatcatcaagagattcaagacggcgctaaagggtcacaaggggcagccaagcaagaccaagacaaaggggaagcgctcatgcttcaaatgtggtaagcttggtcattttattgctaactgtcccgacaatgatagtgaccaagaaaaaggaaacaagagggagaagaagaaaaattacaagaaggccaagggcgaggcacatatcggaaaggagtgggattcggattgctcctcctccgactctgacaatgaaggactcgctgccactgccttcaacaagtcatccctcttccccaacgagcatcacacatgcctcatggcgaaagagaagaaggtatgtactcgagacagtactacttatgattcctcaagtgatgatgattctagcgatgaggaaatagattactctagcttgttcaagggattggatagaaataaaattgataaaatcaatgaattgattgatgccttgaatgaaaaagataggcttttagaaaagcaagaggatttgttgtatgatgaacatgataaatttgtagaggcacaaaaatcctatgctttagaagttaaaagaaatgaaatgctttcttatgaactatctacttgtcatgaaaccatttctactttacaaggtgttaacaatgatttaaatgctaaattagaagcagctaataaatctaattcttgtgtagaacatgttatgatttgcattaggtgtaaggattttgatattgatgcttgtagtgaacacctagtttcaatttctagattaaatgatgaaatagctagtcttaatgaccaacttaagactagcaaaagtgattttgataagctaaaatttgcaagggatgcctacacgattggtagacacccctcaattaaggatggacttggcttcaagagggaagtcaaggacttaacaagtcataaggctcccatctccaccaaggagaaagggaaggcccctatggctattagtgctaaaaagaaccatgcttttatgtatcatgataggagacatgctagaaatgcaaatagaagttatgatgcttttgattcacatgtttatgattcatatgctatgtttgcttctagttcttcctgtttatgcatccgggggatcaaactggattatcgacagtggatgcacaaaccatatgacgggggagaagaagatgttcacctcctacgtcaaaaacaaggattccaagattcaataatattcggtgatgggaatcaaggcaaggtaaaagggttagatgtgtctgtcgttagaagaagtgatggttcactagcttttaagggtgtattagacgacaaactttacttagttgattttgcaaaagaggaggccggtctagatgcatgcttaattgctaagactagcatgggctggttgtggcatcgccgcttagcacatgtggggatgaagaaccttcacaagcttctaaagggagaacatgtgatatgtttaactaatgtgcaattcgaaaaagatagaccttgtgcagcttgtcaagcaggcaaactggtgggaagctctcatcacatcaaaaatgtgatgaccacatcaagacctttggagatgcttcacatggacctattcggacccgtcgcctatctaagtataggaggaagtaagtatggtcttgttatagttgatgacttttcccgcttcacttgggtattctttttgcaggataaatctgaaacccaagggaccctcaagcgcttcctaaggagagctcaaaacgagtttgagctcaaggtgaaaaagataaggagcgacaatgggtccgagttcaagaaccttcaagtggaggagtaccttgaggaggaagggatcaagcacgagttctccgctccctacacaccacagcaaaatggtgtggtagagaggaagaacatgacgcttatagacatggcgaggacgatgctaggagagttcaagaccctcgagcgcttttggtcggaagccgtgaacacggcttgccacgccatcaacagggtctacctgcatcgcctcctcaagaagatgtcgtatgagctactaaccggtaacaaacccaatttttcgtattttcgagtttttgggagtaaatgctacattctagtgaagaagggtaggaattccaaatttgctcccaaagccgtagaagggtttttgttaggttatgactcaaatacaaaggcgtatagagtcttcaacaaatcatcgggtttggttgaagtctctagcgacgttgtatttgatgagactaatggctctccaagagagcaagttgttgattttgatgatgcagatgaagaagaagttccaacgaccgcaatatgcaccatggcaattggagatgtgcggccacaggaacaagatgagcaagatcaaccttcttcctcaacaatggtgcaacccccatctcaagatgatgaacaggaggtgtgtgatcaagggggagcacaagatgatcttgcaatggaggaagaagcacaatcggcacctccaacccaagttcgagcaatgattcaaagggatcatccagtcgaccaaattttgggtgatattagcaagggagtaactactcgatctcgattagttaatttttgtgagcattactcctttgtctcttctattgagcctttcagggtagaagaggccttgctagatccggactgggtgttggccatgcaggaggagctcaacaacttcaaaagaaatgaagtttggacactggtgcctcgtcccaagcaaaatgttgtgggaaccaagtgggtgttccgcaagaaacaagacgagcacggagtggtaacgaggaacaaggctcgacttgtggcaaaaggttatgcccaagtcgcaggtttggactttgaggagacttttgctcctgtggctaggctagagtccattcgtattttgttagcatatgccgctcaccattctttcaggttgttccaaatggatgtgaagagcgctttcctcaacgggccaatcaaggaggaggtgtacgtggagcaaccccctggcttcgaggatgaacgataccccgaccacgtgtgtaagctctctaaggcgctctatggacttaagcaagccccaagagcatggtatgaatgccttagagactttttaattgcaaatgctttcaaggttgggaaagccgatccaactctttttactaagacttgtgatggtgatctttttgtgtgccaaatctatgtcgatgacataatatttggttctactaaccaaaagtcttgtgaagagtttagcaaggtgatgactcagaaattcgagatgtcgatgatgggcgagttaagctacttccttgggttccaagtgaggcaactcaaggatggaaccttcatctcccaaacgaagtacacacaagatttgatcaagaggtttgggatgaaggacgccaagcccgcaaagactccgatgggaaccgacggacacaccgacctcaacaaaggaggtaagtctgttgatcaaaaagcataccggtctatgatagggtctttactttatttatgtgctagtaggccggatattatgcttagcgtatgcatgtgtgctagatttgaatccgatcctaaggagtgtcacttagtggctgtgaagcgaattcttagatatttagtcgctacgccttgtttcaggatctggtatccaaaggggtctacctttgacttgattggatattcagactccgactatgctgggtgtaaggtcgataggaagagtacatcggggatgtgccaattcttaggaaggtccctggtgtcatggagttctaagaaacaaacctccgttgccctatccaccgctgaggccgagtacgttgccgcaggacagtgctgcgcgcaactactttggatgaggcaaaccctcagggactttggctacaatctgagcaaagtcccactcctatgtgataatgagagtgctatccacaaggcggataatcctgttgaacacagccgcacaaagcacattgacatccggcatcactttttgagagaccaccagcaaaagggagatatcgaagtgtttcatgttagctccgagaaccagctagctgatatctttaccaagcctttagatgagcagaccttttgcaagttgcgtagtgagctaaatgtcttagattcgcggaacttggattga

SEQ ID NO: 89218 - DNA, 4785 bp, Zea mays
  Clone ID: MRT4577_181366C.1
atggatcctaagggaaaggggatggtggtcgacaacaacgagaaggagtctatcttcaacgagccgaagaatgacaagtctaccgacttgggctcaagccacaagcgcaaagatgggaagaagaagaagacaaggcgcatcaaggagatcgtctactacgacagcgacgaatcctcttcttcccaaaaggacgacgacaacgactacaggaagactgtcaattcgaacttttcgtttgattattctcgtattccacataattcgaattcgcatttgctttccattcctcttggcaaacctccacactttgatggggaggactacggattttggagtcacaaaatgcgtagtcatttattctctctccatccaagcatatgggaaattgtagagaatggaatgaaatttgatagctcggatagccctatgtttgttaatgaacagattcataaaaatgcacaagctactactgtgttgctagcctctttgtgcagggacaagtacaataaggtgagcggcttggacaatgccaagcagatatgggacaccctcaagatttctcatgaggggaacgacatcaccatgctcactaaaatggagttggtggagggcgagcttggaaggtttgcgacgataaggggcgaggagccaacccaaacatacaaccggctcaagacccttatcaacaaaataatgagctatggaagcacgcgatggacggaccatgacgtcgtccgactattactaaggtcctttaccattcttgatcctcatttggtgaataatattcgtgagaatcccaggtacaccaaaatgtcgcccgaagaagtcctaggaaatttcgtcagcgggcgaatgatgattaaggaagcaagatacgtggacgacgccttgaatggaccgatcaacgagccgcaacctcttgctctcaaagcaacaagaagcaaggaggcgctacctagcaaggtggcacaaattgaggcggccggacttaatgatgaagagatggctctcatcatcaaacgcttcaagacggtgctaaagggtcacaaggggcagccaagcaagaccaagacaaaggggaagcgctcatgcttcaagtgcggtaagattggtcattttatcgctaactgccccgataatgatagtaaccaggaacaggaaaacaagagggaaaagaagaagaattacaagaaggcaaagggcgaggcgcatctaggcaaggagtgggactcggactgctcctcttccgactccgacaatgaaggactcgccgccaccgccttcaacaagtcatccctcttccccaacgagcgtcacacatgccttatggcaagggagaagaaggtgagtactcgagactccacttatgcttcttctagtgataatgagtctagtgatgatgatgacatagactattcatgcttattcaagggcttagatagatctaagatagataaaattaatgaattaatcgatgccttgaatgataagaataggcttttagaaaagcaagaggatttgttgtatgaagaacatgacaaatttgtagaagcacaaaaatcacttgcattagagattaaaagaaatgaaatgctttcttgtgaggtgtctacatgtcatgattcaatttctagtttaaagagcataaatgatgatttaaatgctaaactagaaagatctagtaaatcaacatcttgtgtagagcatgttgtgatttgcactaggtgtaaagattttgacattgatgcttgtagtgaacacctagtttcaatttcaaaacttaatgatgaattggctagtcttaatgcccaacttaagactagcaaaagtgaatttgacaagttaaaatttgcaagggatgcctatacaattggaagacatccctcaattaaggatgggcttggcttcaagagggaagccaagaacttaacaagccataagactcccatctccgccaaggagaaagggaaggcccctatggctagtagagacaaactagaaatgcttatagaagttataataaatgttgctaggagaaatgctattcatcatgtgcctagaaagaatgttctttatgctcctaggaaagtagtgaatgaaccttctacagtttattgtgctttaaatgcctcctttgcaatctgtagaaaggatagaaaggtttatgcatccgggggttcaagctggattatcgacagcggatgcacaaaccatatgacgggggagaagaagatgttcacctcctacgtcaagaataaggattcccaagattcaattatatttggtgatgggaatcaaggcaaggataagtctgaaacccaagggaccctcaagcgcttcctcaggagagctcaaaatgagtttgagctcaaggtgaagaagataaggagcgacaacgggtccgaattcaagaaccttcaagtggaggagttccttgaggaagaaggaatcaagcacgagttctccgctccctacacaccacaacaaaatggtgtggtagaaaggaagaacaggacgctcatcgatatggtgaggacgatgctaggagagttcaagacccccgagtgcttttggacggaagccgtgaacacggcttgccacgccatcaacagggtctaccttcatcgcctcctcaagaagacctcatatgagctactaaccggtaacaaacccaatgtatcttactttcgtgtatttgggagcaagtgctacattctagtaaagaagggtagaaattctaagtttgctcccaaagctgtagaagggtttttattaggttatgactcaaatacaaaggcgtatagagtcttcaacaaatcatcgggtttggttgaagtctctagcgacgttgtatttgatgagactaatggctctccaagagagcaagttgttgatcttgatgatgtagatgaagaagatgtttcgacggccgctatacgaaccatggcgattggtgatgtgcgaccacaggaacaagatgagcaagatcaaccttcttcctcaactatggtgcatcccccaactcaagacgatgaacaggttcatcaacaggaggcgtgtgatcaagggggagcacaagatgatcatgtgatggaggaagaagcggaaccagcacctccaacccaagttcgagcggtgattcaaagggatcatcccgtcgaccaaattctgggggatattagcaagggagtaactactcggtctcgattagttaatttttgtgaacattactcctttgtctcttctattgagcctttcagggtagaggaggccttgctagatccggattgggtattggccatgcaggaggaactcaacaacttcaagcgcaatgaagtttggacactggtgcctcgtcctaagcaaaatgttgtgggaaccaagtgggtgttccgcaacaaacaagacgagcacggagtggtgacaaggaacaaggctcgacttgtggcaaaaggttatgcccaagtcgcaggtttggactttcaggagacttttgctcctgtggctagactagagtccattcgtattttgctagcatatgtcgctcaccattctttcaggttgttccaaatggatgtgaagagcgctttcctcaacgggccaatcaaggaggaggtgtacgtggagcaaccccctggcttcgaggatgaacggtaccccgaccacgtgtgtaagctctctaaggcgctctatggacttaagcaagccccaagagcatggtatgaatgccttagagatttcttaattgctaatgctttcaaggttgggaaagccgatccaactcttttcactaagacttgtgacggtgatctttttgtgtgccaaatttatgttgatgacataatatttggttctactaataaaaagtcttgtgaagagtttagcagggcgatgacgcagaaattcgagatgtcgatgatgggcgagttgaactacttccttgggttccaagtgaagcaactcaaggacgacaccttcatcacccaaacgaagtacacgcaagacttgctaaagcggtttgggatgaaggacgccaagcccgcaaagactccgatgggaaccgacggacacaccgacctcaacaaaggaggtaagtccgttgatcaaaaagcataccggtcaatgataggatcgttactttacttatgtgctagtagaccggatattatgctcagcgtatgcatgcgtgctagatttcaatccgatcctaaggagtgtcacttagtggcagtgaagcgaatccttacatatttagttgctacgcgttgcttcgggatctggtatcctaaggggtctacctttgacttgattggatattcagattccgaatatgctggatgtaaggtcgataggaagagtacatcagggacgtgccaattcttaggaaggtccctagtgtcgtggaactctaagaaacaaacttctgttgccctatccaccgctgaggccgagtacgttgccgcaggacagtgttgcgcgcaactactttggatgaggcaaaccctcagggactttggctacaatctgagcaaagtcccactcctatgtgataatgagagtgctatccgcatggcggaaaatcctattgagcacagccgcacaaagcacatagacatctggcatcactttttgagagatcaccagcaaaagggggatatcgaggtgttccatgttagctccgagaaccagctagccaatatctttaccaagcctctagatgagaagaccttttgcaggttgcgtagtgagctaaatgtcttagattcgcggaacctggattga

SEQ ID NO: 89219 - DNA, 116 bp, Zea mays
  Clone ID: MRT4577_181367C.1
ctttgtaaaggggtgtaaacagaagtatatgatatggttaggttcgcaaacgtccattccgtatgcgaccctaaccatcccatatactactgatgacaccctttacaaagaagtat

SEQ ID NO: 89220 - DNA, 550 bp, Zea mays
  Clone ID: MRT4577_181368C.1
atcaaaaagatatttaaacggtaatgaaatattgaacattttgtttcccaatagtaaaaacttttttcaatctccaaagaaattttacataatagggtttcataaggggggttattactacaaggtttcccccattttatcataaactccaaagaccaaatttccaaactgcagagcatcacggttcttcttcttcatcatcatcatcaatgacagttcttcttctaaaacgacgtctccgagttccaaacacttgttcatcaaaagattgattattctcctcatctctaggggatgttcctgtattaccttcatagctctctccccaaagacttgcaggtcttgaaaatcttcttctcccacttggatgggtcctagctctagatgtaccaaaccagctactactccttgagccactcgattctggtctaaacacgcggatgagaaagtacactgtaagcaagcgagtatcagcaaatagaaacccatcatcggtacttatttcatctcctccaaaagaagattggagtgggctaagtaaatcccctaa

SEQ ID NO: 89221 - DNA, 409 bp, Zea mays
  Clone ID: MRT4577_181369C.1
ctcagcgcctcagcggcgttcccgtctcctcgttctctcgctcacccggccccgtcggccatgaacacacgagccagcgcgccaagcaccggccaccgtctccggccttacctgatctgacctgacctgaccggctgcatcgatggttccgcaaatacccgacccctgcgaggacgatggccaagatcaccggtgcccgcctgctgcggctctacctcccccgtggccttaccctcctcttcctccccccgcctcccacggccgcagcaccttcgtcaccgctctcatcatcgccacctcggtgcttgtcttcctcgccctctgcctctccatacttgtcttcgtccggcgcaggcggctgcggcgtcgtcgagaggcgctccttgaagccgccttggcaccggcccgg

SEQ ID NO: 89222 - DNA, 497 bp, Zea mays
  Clone ID: MRT4577_18136C.1
cccacgcgtgcggttctagtatcagcagcagccgctcttgtagatgaaccatgactacctcctccttcctgcgacatattttttctattatggcgcctactaaaaataaactactcgccgttgtacaacaacgtgactactaaaacaacgctgtcaccacacatattaatcttgtagcacatcatccttttttcagctggtgtcataataaagaggagggcaccaatcatcgttcttaacaacagctgagcatgcttgatgaataatacgacccgtgctgcagcgcatcattcaccgcggctgttgtggttactaccagcatgaccactactatagtcagcagcctactacccgctgcttctgctgctttccctcccttctttgtcacgacggtcggcttttctccccaagatgttattaatgggctgcttcctggagggctactaagtgctgctctacagctcctccaccacaaactagttgagggggatgatgga

SEQ ID NO: 89223 - DNA, 216 bp, Zea mays
  unsure (1)..(216): unsure at all n locations
  Clone ID: MRT4577_181370C.1
gcgctctctacccctattcctctttacctttncccggggaaagggcgcataggcccaccaggaggaaatttttttttccctacctttttactaccctcaataaaaactccaccccctttgctcattacttatacatccattctggagtcaatttccttttaaattaacaacttaaatattgaacttcttttatcccaactgatctgtaaggacatt

SEQ ID NO: 89224 - DNA, 619 bp, Zea mays
  Clone ID: MRT4577_181371C.1
ttttttttttttttttccttttctcttctttattgatatttttgttcaagcacgttctaaatataatactttcgtattttaaatatatttatgatatggctacgacgtttaggggaatggagagtggagattagcagagcctcggactaagggagagatcggattggatagggagatcgacgaggacagctactgtcacctacggccgaggaagccacggtgaccgaagcagttcctcccaataggaagcaacttctataaatttcctggtacaaactcctgtctccttaatagatgaggagtcctaagtccttgtttcaatcaaccgactgcctagcaaataaaagtgataaaaactgtctgcctaacagatagaggggataagccccttaatctctctaacaaccttatctagcaatagcaactgacacttgtctaaatacggcgcctgcactggtactgctggcccaaaaaaaacatcgataaccatttaaggcgtcacctcgccttacgctttaccgcttaaaaggtaaaaaggggatcggtcgccttaccgccttaaaaactatgatcaatagccaagcactcaagctgatgcaatggctaagtgatctggttc

SEQ ID NO: 89225 - DNA, 661 bp, Zea mays
  Clone ID: MRT4577_181372C.1
ggtaccggcgcccccctctcgagtttttttttttttttttttttttttttttttttttttttttttttttttttttttttttttttttttttggtttttttatttaaaaggggaagggtgctttttttcaacaacaacaataaaaaaactggggaagcttattggtgtttatttcatccaatttttggaggcaaggaaacccatgccgggaaacaaaaatgcaatccaaaagctaccccgggggaaaccttccaagggggacggggttaaccaaacccctggggctgggcaaaccaaagccgggcacaaacaggccgggggggcggaaaaaaaaaaaaaagggccccttcggggaatccttgcccttcttggcccaaaaaaagggccccttgaaaagggccccccacccgttgccgaacatggacaaaaggtacctgggggcaaaaaaatttttgttggggccctccccccccttgggaaattccgggcccttttaccaaccggtaaaaaaaaaaccaagggccccccggcccaaaattgggaaaggggggggcgttaaaaggcacccccggaaccaccttttagagggaaccccacccggaggggttccacgggcaccttggggcccacgtaaccccgaaacaccttttgcccccccccg

SEQ ID NO: 89226 - DNA, 324 bp, Zea mays
  Clone ID: MRT4577_181373C.1
ttttctgctttaggccgtttgaaaaaaaagacaagtacatggatatgtacttgctttgccattttggatcctagatgatgttgttcaggttgagaattgagataatcagaaggaatgtatagcttctgctagtatttttccaagtcaggaggttgtctataactttgatttctgcaactgaatcccaagtgtggaactgcaaattgctgaaaagtttagactgtttaaggtggttatataaattgctgccctgcaagtttctgcaaagcaattaaggctttgttcatccttcgaaatatgggaattttatgttttgtgaaaaat

SEQ ID NO: 89227 - DNA, 302 bp, Zea mays
  Clone ID: MRT4577_181374C.1
aaggaggacatgaaagtacactaaacatgaaacgggggttctgagatggttatgcttatgctcaagaccagattttaccaacattcaatgcgtcgcgcccaacatattgagtttttatacacactggcgaaaaaaagctcgaggcgtgccccgttgttaactactccttagacgcccacgctgaactggctccttgacaatcttgtcggaaaatgaactagatgacctatggtcagtccaggggaacatcttccacatacctccatatagcagacacagcgtcattccaaggaagatctgct

SEQ ID NO: 89228 - DNA, 400 bp, Zea mays
  Clone ID: MRT4577_181375C.1
aggggagaggcaagcaaggggaaaaaaaggcacacggagccaaaaacgacaaggcagagcaggagcaaaaggcaggacaggaaggagcgggcgcaacgccaaaaaggaggaacacccacgaaacgcagaagaaacggaaaaagagcaccaggagcacacggaccagcaaccagacgagggacaaaccacaccccaacaggaaaagccccaacgaagacggcaaccaaccccggacaaacaacaacacgaaaaggagaaagcaaacaaaaggaacgaccgcccgaaacaggaagaaaccgaagaaacccggcaggaccgaaaaaaccaaaggccaagaaaagacgaaggcccaggcaaaaggcgcacaaacgccccggaaaggcggaaaaacagaaaagga

SEQ ID NO: 89229 - DNA, 850 bp, Zea mays
  Clone ID: MRT4577_181376C.1
attgggtacctcgaggccggccgggctcacttccatgccgctgatgcttcgcgtctcctactccttcctgcttccacctattaatccaccccactctcttccctccccgttccacccgcctctaccgccgcgagatccggctccgcttccagaagcttctggaacgcccgttccatgagcgtctgatcggccgccgccatgggctgcgctggatccacccccaaagtcgacgagaacagcaagaaactgaaaaggcctaaggcttggaagcatacccaaccaattacaccggcacggctcaaacagatgcgtgatgagttctgggacacggctccgcactacggaggccaaaaagagatctgggatgctctgagggttgctgcagagtccgatctagcccttgcgcaaaccatcgtggacagtgctggaatcatcgtctcgaaccctgacatgacgctctgctacgacgagagaggcgccaagtacgagctgcccaagtatgtcttgagcgagccagcgaacctgatccgcgacgggtgattctggaccccagaaggttttgcagcacgagacagggccacgtgaatttatgtggatgggttctggatttgtagctttcagggacagtgaaagcttgtttcagcgctggatgttgtatagtgatgttattggacacgatgtgtagtctctagacctgctactgctgaactcggtcattcagggacagtgaatgcagtgtcgtttaggctatatgctgcagacttattcgttcctctcctatttcagactccactatatctatataaacagtgcagtttgcaatacaaaaaaatgtataaaaaaagcggcc

SEQ ID NO: 89230 - DNA, 1060 bp, Zea mays
  Clone ID: MRT4577_181377C.1
agtgacgtggctgggcaactcacctgcgcggtgacagcacctcgccggcttttcttccctccgtcgagcccggcggggagcgccgcacctcacatgccgctgatgcttcgcgtctcctactccttcctgcttccacctattaatccaccccactctcttccctccccgttccacccgcctctaccgccgcgagatccggctccgcttccagaagcttctggaacgcccgttccatgagcgtctgatcggccgccgccatgggctgcgctggatccacccccaaagtcgacgagaacagcaagaaactgaaaaggcctaaggcttggaagcatacccaaccaattacaccggcacggctgaaacagatgcgtgatgagttctgggacacggctccgcactacggaggccaaaaagagatctgggatgctctgagggttgccgcggagtccgatctagcccttgcacagaccatcgtggacagtgctggaatcatcgtgtcgaaccctgacatgacgctctgctacgacgagagaggcgccaagtacgagctgcccaagtatgtcttgagcgagccagcgaacctgatccgcgacgggtgattctggacccccaaaaggttttgcagcagcacgaaacagggccacgtgaatttatgtggatggttgattcggtcgctggttctggattgtaactttcagggacgctgaaagcttgtttcagcgctgtatgttgtatagtgatgttattggacacgatgtgtagtctctagacctgctactgctgaactcggtcattcagggacagtgaatgcagtgtcgtttaggctaatatgctgcagccttattcatccctcctcctatcctatttcagactccgctatatctatataaatagtgcagtttgcactatatctatataaatagtgcagtttgtaatgcaaaacaatgtatgctcagagtctgagagctcagcttgcaaagaaagagacatgtcacagaatcactgaagtgaaaatgtctggcaaagaacccaaaaaaaaaataaacaagtttcacaaaaa

SEQ ID NO: 89231 - DNA, 262 bp, Zea mays
  Clone ID: MRT4577_181378C.1
ggggggttttccatttccacctcttgaccactaatacttgacctcttggggataattatagataagccttcctcggaaggaaacggaacattacaaatcggtgcgacgcgacccgatagatagtatgcacgcgcttaacaaaaaaacataatgaactgactgccgcttaccggcatggtgaatttgggggggtcctacccggtccgggggctgggaaagcttttgcacatcgcgcgccacatgttctgccctcgagaggacc

SEQ ID NO: 89232 - DNA, 248 bp, Zea mays
  Clone ID: MRT4577_181379C.1
aggtcatggaagcctcctgtttattgtgaggatctctctcggcgcttatctcctgctgctataccttagtatgatcactcctatcatccatgacttcgagaactacgatatggagatggcataatttgcaagcctcttagcgaaattcacccaggatttgacgctgatcggagttctgtcttctatctgggcatgaagaactccatcccgaagcggcatggcggcaagaagaaggcacccaatgcgaa

SEQ ID NO: 89233 - DNA, 281 bp, Zea mays
  Clone ID: MRT4577_18137C.1
cgggcgcagaaaccctaatcattcttgttgctagaaaacggcatacagccatatgtaacaattttccactgggatgtacctcaggcacaaaaaaaaaaaaccgcggctttcctggttagaatccttagggacttggtgaaaaatacccaacctccgcttatgggcgcgctgaaaacactagcgacactggggaaaaatgggttgacctttaatgagccccagacatttacttccttttcgacagaacaggggcctcttgccccccgtcgggctcaacagga

SEQ ID NO: 89234 - DNA, 328 bp, Zea mays
  unsure (1)..(328): unsure at all n locations
  Clone ID: MRT4577_181380C.1
gccggncgggctcagaccggggaccaccatcacagtacttcacgcacgcacacgctcacgctcacgctcacgctcaagcttctctctcgccgccgtctcccccgccgccgccaagtggttcgccgccgccgccgccgccgccgtgaccgccgccgccttctactgagagaagggagatctgcactgccccgtgctgtaatttatttgttatccgtgttgagccgttgattccttctttttttttcttttcaccattttttttcttccatccgaatatccatattccattcggcattcgatccaaaaaaaaaaaaaaaaaaggccccta

SEQ ID NO: 89235 - DNA, 588 bp, Zea mays
  Clone ID: MRT4577_181381C.1
tcaattcgatccgggcacacaccatcacagtatcacacgcacgcacacgctcacgctcacgctcacgctcaagcttctctctcgcctactcgcggctccaatggcgcgcttccagctcgcggccctggccatggcaatgctcttcgccgccgccgtctcccccggccgccgccaagtggttcgccgccgccgccgccgccgccgtgaccgccgccgccttctactgagagaagggagatctgcactgccccgtgctgtaatttatttgttatccgtgttgagccgttgattccttcttttttttttcttttcaccattttttttcttccatccgaatatccatattccattcggcattcgattcagtaggactggcggcatatctgttcgttcgtgttgctacagtgtaggaccgtggctcggacagattggttgggctggctggcctggctcggtggtgttgtgctccgttcatccatttgtataataccctgttgattctatttcgcagctaaaaaaaaaaaaaaaaaaaaaaaaaaaaaaaaaaaaaaaaaaaaaaaaaaaaaaaaaaaaaaaaaaaaaaaaaaa

SEQ ID NO: 89236 - DNA, 340 bp, Zea mays
  Clone ID: MRT4577_181382C.1
tttatttttttttttttttgtattttttttaattttatattattaatttaattattttttattttttttaaaaaagattaaccatacataaattaaaatataatatgttaacaacatttaatgtttttacaagttcactggaaaaagattaaaaagggcagcattaattaccgtattaaaaaaaaaaaaaactttattattacaaaatggagagattttggcggtgtatatgtctaagaaacaaaaacaacagttcttatggctcaattaaatgcaatcatacatgggctaattatttttttaaaaggaaaaaaaaaaaaatcagcataggctaatattg

SEQ ID NO: 89237 - DNA, 255 bp, Zea mays
  Clone ID: MRT4577_181383C.1
tattttttttgttatttggtttttttttttgttttttgtttttttctcatggaaaacaactggtattctgaacatattgacaaaagtcaggatcggacaacagacgcaaaagttcgaacaccacaaaaataaattgaaaaaatggaaaacttgcataccccaatgattggtcacaagtttggtgtaccaataaacttttaatttaatattgtttaaccacttccaataagactttacttttgccttgggttgtct

SEQ ID NO: 89238 - DNA, 449 bp, Zea mays
  Clone ID: MRT4577_181384C.1
acacaattacagtgggggaaggtgcgccggcaggagccgccgcggaagaattggcgggacgaaccacgcgttttttcacacttctggccattacagcaaaccagagaaagcagaagcaaaccaaaggcgggcagcaccatggaccgctgtctcatagagaacaggcggaagggaacagaagcgcgccggaggctatttgaggcaaggcgcgcgtgacgaagcacaagacggaggagaagggaaagtcggaggtgagctccgagagtccgggggacagtcccgatagcgtgctctacctgggcccggtgacgggggcgccccccagctacatgacgggcgagataccgggcgactacggttgggacaccgcggggctgttggcggacccggagacgtagctaagaacccgggagctggaggatattcactcccgatggggcaagctggga

SEQ ID NO: 89239 - DNA, 426 bp, Zea mays
  Clone ID: MRT4577_181385C.1
aatcaccttattgttattattatgagcatattttcttgttttcctttcaggaaaacaagaaacaggagcacagatcacgaggtcaaaacccgcaccttacatgttacagggttacaggtgaaccacaaaataaaacagaaacacctaatgatccatgaataggcaggaggaaaggaaccaaaacaatacaagaaacagaatgaactgtaccttcagggcacccaacagataatccatgccccgatggactacgtacaccaaggaaaaaacaacgcctgaaaaaacacagcatgttggggggcacacaaggattttttgctagcaatggagccatctttaaatgaattccgccacctagagcttgaagacaagggcccacagcttaatgatctcggcctaggagccggtcctgacctagatggggcc

SEQ ID NO: 89240 - DNA, 253 bp, Zea mays
  Clone ID: MRT4577_181386C.1
aggacaactgccgaagatgccgcttgttttggacaggcgaatagctgatgtcacttttcactcttggttgatcttctggtagagtgacgaaggcgtgatggtgaatatgaactgatctgctgttgtcgattgcgagtgaggcatattacatgagatcgttagtttttacatcccatagtacaatctggaggctggatcgtgtagccctaacgtcgatggatcggttttcgcatctacggcatgaacgtgcgga

SEQ ID NO: 89241 - DNA, 746 bp, Zea mays
  unsure (1)..(746): unsure at all n locations
  Clone ID: MRT4577_181387C.1
aacttctcctctcagcctcttgccgattgctcccatcccattccattccatcccaccgctcgatccagctactactactgtacttcgcattcagcagctagctagcaggacagaccaccgcatctggttcttggaccgacgaccgagttgtttggatcagcacagagccacacaggacgagatgaagatgaggactcctgctgtggccttcgctgctcttctgctgctgctgcttcagattacgacaagagcacatggaatcaggatggacaggcagttacacgaagcaatcaacagcaagaagatgatggccgatcccaagagcggcggcggtggggaagcagcatccattgctgccgccggcgactcggtgaggaagcactgcgctcccgatgggcggcggcgttgctcaggtacaacgaagcagatgacccctactactgttgttggcagcaggtatagcgaagtggcgatgatcatcagcgcgcatgcggcgccgaggttccatgaggattactatgggccaagtggccatgagccgaatcaccactgaccaagctgtccgcgagcaaacccatttgcacatttttcttcatcccctagcgtactactagctgactacccggcccgnagtttttcttcttctcttcatgcttcttcttcgtcatctcttggcttggagaatatgtaaagggagaagctaagctagttagctagtttgtagcactgttattcatattatgttc

SEQ ID NO: 89242 - DNA, 403 bp, Zea mays
  Clone ID: MRT4577_181388C.1
ccttaaagagttgcctgaaaaagccaggggtcttatcatcttctatgtgcgcaccaaccttttccctctcatctggcttttgatgcccttcatctttcttctcctcattcttatctttgaaaattttgccgaagaaaccttctatgccatcattgcccacactcttgcccagtctttcctcattcccatgtcttgcatgattactatctctcctctcctcgttcttatccttgaacatcctgcgaaaaaatccttccttctcatcatcctcaccttgcctgtcctccttatcacgaaaaagtcgcttcaacaaaccatctgagcttggtgtcagttccatgtcctcctctttgctatccctgagtaatctgcggaagaaaccatctctatcactttcttcctc

SEQ ID NO: 89243 - DNA, 180 bp, Zea mays
  unsure (1)..(180): unsure at all n locations
  Clone ID: MRT4577_181389C.1
caaaccgagagggggcccacccgggccgccacggcgcgcacgggggagaagaccccgnccggacgggagaacaagggcaaggaccccgcgcaggcggacngcggccgacaggagagagagcaggccgaggacgaaaggcccggccaganggcgagccgcgccgggggggggggggggaag

SEQ ID NO: 89244 - DNA, 674 bp, Zea mays
  Clone ID: MRT4577_18138C.1
aaacagaaaaattgttccaactatgatcatagtgtcatcctcttgatgagtgttatagtccttctacttacatacaacacaacatcacaagcgcctactcctgagattatgattggcaaccaccatcctaaaccgatttgagaagtccattcattgctatccttctcctatccctggtggtcatgcgctcaccataggctgacaaaatgtctgcaagatcaattactccaacttcccttaatctcttgctgacctcttcaaacattacggctccctcatcattcgagaaatagtacagaaacttgttatagtcaaatctcggcacatctaccccaccccacattgtcctctctacaaacttggtcgcctccaatgtcctcccggctttcaccaagccaccaacaaatatgctctcaaaattcaccaatggatccctccccttccgacccctcttcccaaggtgcccctgaagcaacatgatgtaagtgtgcatgttcggttcacatcccctggtgatcatctccctgaacacctcagtggcctcccctgctcgtttgatcctcagcaaccccttcatcaatccatgatagagagcaatctccttctccttaacgccatggaacaccctgtatgcttccctcacccttctcctcgacatcagcccatacaccaaa

SEQ ID NO: 89245 - DNA, 445 bp, Zea mays
  Clone ID: MRT4577_181390C.1
ggcccccaaaagaatagccaacaattacaaacgaccaattgcaagagagcccagcaggggaaattaaaaaaaagactggattacaagagagagaaaatcgggggggggacggaaaagggaataaaaataacaatgaccttggatgaacatgcatggggttgggtaccctagcatgaccttgggactaattagccgatcttttcgagggtgggggaaacggccttaatccgggggcggagctccggggcgctttccgggcactggagcgcgacggggaacccccccaccaccttctttttggggaggggggggcctcgtaaaaacgccgggtccaccatttccgccagggggggaacgtcctccttgaagccacggggaacccaccggaccaccttcgggaccgggccacccccggggtccccgttcccggaccggtccgttgccg

SEQ ID NO: 89246 - DNA, 435 bp, Zea mays
  Clone ID: MRT4577_181391C.1
gtcttcttcatgcccgacttagcgcacgctaagttcggcgcggccaccgccaccgccgctggcgctgctgggagcaacagcgcccaggccaagggggccgtcaccaccaccgatgttgcacagaagattgttaagcaggttgagtatcagttcagtgacatcaacctggtggcaaacgagttcttgctcaagattatgaacaaggacacagaaggctatgttccgttgtcagtcattgcatcctggaagaagatcaagtctcttggggcaaccaaccagatgctggtgaaggctcttcgcacctccacaaagctcaatgtgagtgacgacggcaagaaagtccggcggaggcaggcattcacggagaagcacaaggaagagcttcagtcccgcatgatcatagcggagaatttgccagaggactcgtctcggaac

SEQ ID NO: 89247 - DNA, 623 bp, Zea mays
  unsure (1)..(623): unsure at all n locations
  Clone ID: MRT4577_181392C.1
attgggtacctcgaggccggccagagaaacagctcccttctgctctgcagcacgcaccagattgcacgagcatgtctgcccgccgctcctccgccggcagcgacgacagagaccaatcccggctgcagcagctgggatacaagcaggagctgaagcgcggtctctccgtcgtctccaacttcgccttctccttctccatgatctccgtgctggcgggcgtgacgacgacctacaacaccgggctgcgctacggcgggccggcgtccatgacgctgggctggctcgtcgtggcgctcttcaacggctgcgtggcgctgtccatggcggagatctgctcggcttacccgaccaccggcgtctttctcntctggagcgccaagctcgccggcaaggactggggtccactcgcctgctggatcaccggatgtgggcttgcaccacgagcgtggacttctcgctggcgcagttcgtccaagtgatcgtcctgctcgccaccgggggagacaacggcggcggatatctgggctccaaatacggcgagatcgacatctactgtgacatcatcgaaaatgaacgggagtcatcaatagaactgcatataacattgaatggaactaactaac

SEQ ID NO: 89248 - DNA, 1785 bp, Zea mays
  Clone ID: MRT4577_181393C.1
cattgggtacctcgaggccggccgagctcggctgagagaggacgtctcctcgttcaccctgtcggactgtagcgcgcacgccccggccggatcagagagatgggcaccgtcggcggcggcgagcttcccgtcgccgacccggccgccgccgacgcagaccgggcgcggctgcagcagctggggtacaagcaggagctcaagcgcggcctctccgttgtttccaacttcgccttctccttcgccatcatctccgtgctgacgggcgtgacgacgacctacaacaccgggctgcgctacggcgggccggcgtccatgacgctgggctggctcgtcgtggcgaccttcaacggctgcgtggcgctgtccatggcggagatctgctccgcctacccgacctccggcggcctctactactggagcgccaagctcgccggcaacgaatgggctccacttgcctcctgggtcaccggatggttcaacatcgtggggcagtgggcgtgcaccacgagcgtggacttctcgctggcgcagctgatccaggtgatcatcctgctgagcaccggcggggccaacggcggcggctacctcgcctccaagtacgtcgtgcttgccatctacaccgccatcctcgtcgtgcacggcctcatcaacagcctgcacatccagtggctctcctggttcggacagctcggagccttgtggaacgtcgcgggcgtgttcgtcctcgtcatcctggtcccgtcggttgccaaggagagggcgagcgccgagttcgtcttcacccacctcaacaccgacaacggcatgggcatccacagcaaggcctacatcctcgccgtcgggctgctcatgagccagtactccagcattggctacgacacgtcggctcacatgacggaggagacgaagaaggcggactggagcgggccgatggggatcgtgtactcggtcgctctttccagcgtgttcggttgggtttacctgctggctctcacgtcggtggtcaccgacatcccgtacctgctggacaccagcaacggcgccggcgggtacgccattgctcaggccctgtacgacacattccgccggagatacggcaccggcgccggcggcatcgcctgcttagtcatcatcgccgtcgccgtcttcctctgcggcaccgcctgcgtcaccagcaactccaggatgggctacgccttctcctgggacggggcgatgccgttctcgcacctttggtaccgggtgaacaagcaggaggtgcccttcaacgtcgtctggctctctgtgtccgtggcgttcgtcatggcactcacgtcgctggggagccaggtggcgttccaggccatggtgtccatcgcgacgctgggtctctacatcgcctacgcgctgcccatcttcttccgcgtgacgacggcgaggaagtcgttcgtcccagggccatttcacctcgggagatgcggcatcgctgtcggctcggtggccgtgctatgggtggccctcgtcaccgtgctcttctgcctgccggtggcgtaccccgtcgccaaggacaccttcaactacacgccggtggccgtcggcggcgtgctggtgctcagcctcgtcgcgtgggtgctccacgcccggttctggtttcgtgggcctatcacaaacgtctgacgttgtttgcaggctttcggtagttactttcgatgcattttatgtagtgtcaatctgttttaatatgtcattgaacataaacatgaatatgaatatactcctatacacaggtattgtggttggaactgg

SEQ ID NO: 89249 - DNA, 469 bp, Zea mays
  Clone ID: MRT4577_181394C.1
tttgttttgtacttagtaactaccaaaaaccaccaccaaaagggttgctcgttacatactcacgtttatttcccacgtgcgccatttttttaatctgaacatcatgactatgttcaataaatgttgtggcaaataagaagagcataatatttgtcatggatgaaatgaatgattgaaataaaccatgtatcttctttgctttcttgctaacctttcttaatctcgaggaccatattcttttatggggtatatcttgaaacaccctataatatatcaattaaaaacaatctagtttgaattattagtcttcaggagaaaggaaaatatttatattttcaaataatgaaatggtgatataagaaaattaaacaatttcttaagtagtaaaatcttatcaagtgtttgatgcattcatgccgaggcttgaattttgtttgaagcatctaatttttttatataattatgtgag

SEQ ID NO: 89250 - DNA, 1717 bp, Zea mays
  Clone ID: MRT4577_181395C.1
ccggccggcatcaacaagtatctctatcctgtcagacaagtaggccccgagagcaaacagccctcttctgctctgcagcacgcaccagaccgcacgagcatgtctgcccgccgctcctccgccggcagcgacgacagagaccaagcccggctgcagcagctgggatacaagcaggagctgaagcgcggtctctccgtcgtctccaacttcgccttctccttctccatgatctccgtgctggcgggcgtgacgacgacctacaacaccgggctgcgctacggcgggccggcgtccatgacgctgggctggctcgtcgtggcgctcttcaacggctgcgtggcgctgtccatggcggagatctgctcggcttacccgaccaccggcggcctctactactggagcgccaagctcgccggcaaggactggggtccactcgcctgctgggtcaccggatggtttaacatcgtgggccagtgggcttgcaccacgagcgtggacttctcgctggcgcagttcgtccaagtcatcgtcctgctcgccaccgggggagccaacggcggcggttatctggcctccaaatacgtcgtgctcgccatctactgtgccatcctcgtcctgcacgggctcatcaatagcctccctatccattggctggccttcttcggccagcttggagctttctggaatcttggaggtgtgtttgtcctgacggtgttgattccggttgtcgctaaggagagggcgagcatggagttcatgttcacccactgctacacagacgatgccgtggggatccacagcaaggtctacgtactcgccattggtttgctgacgagccaatactccctcctgggatacgacacttccgcccacatgtcagaggagacgaagaacgcggagtggagtggcccgatggggatcgtcgtctcggtcgcgctgtcgagcgtcttcggatggatctacctagtggccctgacatcggcggtgaccgccgacgacgtcccgtccctcctggaccctaccaacgacgccggcgggtacgccatcgctcaggccctgtacgacacattccgccggagatacggcaccggcgccggcggcatcgcctgcttagtcatcatcgccgtcgccgtcttcctctgcggcaccgcctgcgtcaccagcaactccaggatgggctacgccttctccagggacggggcgatgccgttctcgcacctttggtaccgggtgaacaagcaggaggtgcccttcaacgtcgtctggctctctgtgtccgtggcgttcgtcatggcactcacggtgtgcatgcatgcgatgcgaaagctctttcatctcctcagcttctcaactgctcgcactactcacatctgtgcacatgcagtcgctggggagccaggtggcgttccaggccatggtgtccatcgcgacgctgggtctctacatcgcctacgcgctgcccatcttcttccgcgtgacgacggcgaggaagtcgttcgtcccagggccatttcacctcgggagatgcggcatcgctgtcggctcggtggccgtgctatgggtggccctcgtcaccgtgctcttctgcctgccggtggcgtaccccgtcgccaaggacaccttcaactacacgccggtggccgtcggcggtgtgctggtgctcagcctcgtcgcgtgggtgctccacgcccggttctggtttcgtgggcctatcaca

SEQ ID NO: 89251 - DNA, 676 bp, Zea mays
  Clone ID: MRT4577_181396C.1
ttgggtacctcgaggccggccggggtcaaggattaacctcacgacaaccaccccactgctgacttttagataacacatcttcaaatcagccgcaaacatggtcaagaagcgcgcgtccaacggtcgtaacaagaagggccgcggccacgtcaagcccatccgctgctccaactgctcgcgatgcacacccaaggacaaggcaatcaagagattcaccatccgcaacatggtcgagtccgccgccatccgtgatatctccgatgcctccgtcttccccgagtacgctgtccccaagatgtacctgaagctccagtactgcgtctcctgcgctatccacggcaagatcgtccgtgtccgctcccgtgaaggccgccgcaaccgtgctcctcccccacgtgtcaggtacaacaaggacggaaagaagatcaaccccaaccaggccgctgctaagactactactgcttaagtagcgtgtggttcgaaaagggaatgatcatggcgcttggtgtggggtcttagggttctttcggaatgtcatactggaaaatgcatgaatccagaagaagggacaggccaaatgacgaaatcatggttgaagcttgctcgggaaagcctgcataagcagcaccgagagctagctatgaacttgtagacgaatatccaagtcgacttgcac

SEQ ID NO: 89252 - DNA, 534 bp, Zea mays
  Clone ID: MRT4577_181397C.1
ccctcgaggccttccgggacacgaacaagtaaaggcaggcgcgggcgcgcggcacaccgacagccgaccgagcagactagacacttggagaaaggagaagagagcaggggcacatgggcaccatccccgtcatcacctgcgactatgctcgtcgtcgctctccttgtctctactgtctgccttcggcgccaccgacaccgacaccgacagcgacgagggccattcgactccccagcagatctggtgctgctggccgaccgagggagtgctgagactatggcaccaaggacacctagtatcactaggccgacccggtggcgctgcaaccacgcggcgaacacgtgctcctgcgactgccaagagtgctaggacgtccattgccaccgaccagtccatgcctgcatactgaaccgtgagcactgatatagtggcgaggctgaacacccaggccgtgcgactgctgcgacttcgccgggtgcacaaggtaatacatacccaactgccagtgcggctacgagacagagtcgagcccca

SEQ ID NO: 89253 - DNA, 360 bp, Zea mays
  Clone ID: MRT4577_181398C.1
agggccgcttttttttttttttttttgggggggagggcccctcatgcacaatgttctaggcttgtcactccgcgaaggcaaagcaccacttacacaagccaatagcttgttcccaggagccacccaaaggagcacgcctagatcacatgagaactctcgctcgatacagggaacttcgaacattgggggggggggggacgcacccgccggccagcaggcagctcgcgaccttaggcccgccctacctggacgcgtcttgaaagacctccgctgctgatacggagccccccgcttccgccacctttggacccagaagacccccctgggagggccgccgcgcctggcagccagcggcacaga

SEQ ID NO: 89254 - DNA, 711 bp, Zea mays
  Clone ID: MRT4577_181399C.1
cggacgcgtggcagaccgccgccatcagcgctgttttgctatctagcccgtcgttggccgctccgactccactcggcagtcgcctcgcggctggtgtttcggacccttccccgacaggtgcgcagtcccgcccttccccgccatgccactggcactccatcgctcggcccactcggccgtgcatccggcgctccaccccgccctggccctcctctgattgctccggccctgctagcttctcgccgccacgctgcccgcacccgccgttccgcccacgaccgtcggtagctagcaccacgatccacaccattgcgacctagcacgagaggtaattttttacgtttttaattatttattttcgacaaccattttttattagccgccaaaattagtgggtaatagtttatgcaatcaatgtttgtgtgaaattgtttgtttgattaggtcgtttttcattacttttgattagttacatgtttatgcatttgaaagtataattaatcacatgtttagttatgtttatttaatgtttcgttgaaatttcagtgtcattctattaattaatataacattaacttcaattcaaaattagcatgtatttttgtttgtttcgattttattaataagacatgtttttgtattttgtggttcgaggtatattaatttcatattggtatgcattattatgtagtttgagaagcgtgttatagt

SEQ ID NO: 89255 - DNA, 461 bp, Zea mays
  Clone ID: MRT4577_18139C.1
actggcgaaaaagaactaggcgttaaagagcttcaccgcataatcactaatgcacttacagcataaatgcagaggcagtacgaggcgcaacacatgtatcatatatatgcaacggcatggaactaaagctaacattaaaaaacaaatacgggttctaacaaaacgccatagactctaactggaagccatatatgacaaggagacccccttctaatgcattgcttatgataatgaaaacaccactgttagtggccaagaggggtatcagattaccaaccttaagggcatataaggaacactcgaacggaatctgaatgagactgctaaaaaatgtacctaaatgaccacatggttatgaagacgagcagtctaagtgaacagagcgtaggaacaaaaacttagcctagacggaaagaatctagacggataaacccaatatatactctgatttatgacctcac

SEQ ID NO: 89256 - DNA, 210 bp, Zea mays
  Clone ID: MRT4577_1813C.1
agccggccgggccgggactgcaccgagctcgctagccctcgcgccgacgccggcgggcccagcgttcgagctcctctcctgccgacgagatcgacgacgcaacgacaccatgaaggttcatacttgtcaagccggctaccgggtgccagaagaagctggaaatcggtgacgaccagaacctacgtgacctgttatgaccgaacggtctcc

SEQ ID NO: 89257 - DNA, 764 bp, Zea mays
  Clone ID: MRT4577_181400C.1
ccggccgggaagtagaagcatcaccaccggggcgagtggtgaacgaacggagatgctggtgatcgacctgggcatatggctcatcccgctggcgctcgtcctcgtcccgtgccgccggatcgcgctcctcctgtcgaggctcgaggagctcggccggagcgtgacggggccgaggctccccacggcggacatgtgggcccgcttcgccaccctcaactccatggctttcatggcgtgaggtgacggtagcgctgctgcctctgagccatcttccttcctcctttgggtccgttgaagtgaatttcctgatatgatacgtatatattgcttcgatttcaagatgaggattttccggaacgtgatgcagtatatatatgtatatatgcgtcttcttctcaccaccagatagcaacatcaggttgtcgtagaacagatcactctgctgatgttagatggagccaacctactggtgataaatgaagagaaggatgcagcagatcggaagctttggtgttggaattcctcatcatatttgcatggcgcagaagaaataggttgaggcttgattctttttgcttgttgtgtttgccctatagtttggatattgccctaactgcctaaggttgtctccgtcagtttttcaaccacacctcgtgttctatattttatttcaaactctactctgtaaatacggtaaatagtgcactctatattataaaaataaattttgtatgaccataaaaaaaaaaaaaaaaggggcggcc

SEQ ID NO: 89258 - DNA, 693 bp, Zea mays
  unsure (1)..(693): unsure at all n locations
  Clone ID: MRT4577_181401C.1
cttgnagggcccggccgggnaaaaaaaaaaagcaccagtggccgcaagatccaaaagctatggtctcgatttaattatggccagattccaccacacccgctcgatcgaggatccatggccaggagtcgatcgaagcaaaggggtacgtggcttctaacctcggccacacaagtcacgtcaaacggcgacgggttcgtcatcgtcaccctgaggcctgagcatgagcgcgacggcgtcgcctgcctccgcggtggagggatggccgaaatccggctactccacgcaacagatccccaaattctaatctgaggtgtgatatatgtaaggaaggacatggcgaagacaggggattctcacctgcgatcgtgttgttcagtgctctgaccacggagaatcgtggtccgtggcggactccttcgctccggtgaacgattccctggactccgatgacttatgtgcccaagggaatgatcacacgtgaccttcgcacgctggagaaccttcgcgacctctccccagcaccgtacgtcggcggatgcgttcaccgagcgcggcggctccctcttctttctcccttctactttctgtcaacggtggccctctctattcgggggtcatgagctgggaccagatttatgggggaatttcaataaccggatccaggtgggtacaaaaaaaaaaaaaaaagcggcc

SEQ ID NO: 89259 - DNA, 460 bp, Zea mays
  Clone ID: MRT4577_181402C.1
gttacgctggcattcttccgcgccctaggcgccgacgcgcgcctcccggcctcggccgaccagcccgacgcctactccgctctcgtccgcgcaatcctctcctctgttgccgtctccgcctccccgaccccgcggatctcttgcaccatcaccgtctcgcacgccgtgacttctgaagtggacgttgaagcgcagatactgaggaagggcagatcagtcgtggttaccacaatcgatttcagacttaaggacaccaaaaagctctgctacacatctcgagccaccttttacatcatgcccgtggcaagcctataagcccaagtttttatatgttattattccttctgtttacaggaccggagtttgtgttgtgtatatttaacttggaataccatatatcagcaatctgttgtattgataatgaagcagaagtcatattgattgagccatgatgcccacc

SEQ ID NO: 89260 - DNA, 171 bp, Zea mays
  Clone ID: MRT4577_181403C.1
agctggatagggagccctactgtccgattgagaagctgaggatttttataacctgggctggtggtattattggatcccacatggctggccgtatgaagaacgagggccattacatctttgcctctttgattggaagaagaacgagcacattaatcgaggacatgtgtctgc

SEQ ID NO: 89261 - DNA, 879 bp, Zea mays
  Clone ID: MRT4577_181404C.1
gtgcggcgctcgaggcgcccattgggaccctcgcggccgcgacgaagaagagcataagcaaacataaacgggcttgtgctttgtggaaaacatgccgccgccgccgccggtgaatccacagcggctttcgccggcagagtcccgagagcggacgctgtacttcttccatggtctgggcgtggacgtgcccctcccggtctcggccgagcggcccgacgcctacacctcgctcgtccgcgccatcgtctcctccgccgcagtcacctcctcgcgcgtctcctgcaccctcaccgtctctcccgccgtcgcgaaccagtacaacacgctccacggcggcgcggtggcggccgtggctgaggccgtcgggatggcgtgcgcgcgcgccgcggctggggacaaggagatgttcctcggcgagctcagcaccgcgtacctcgctgctgcgcgactcaactctgaagtggacgttgaagcgcagatactgaggaagggcagatcagtcgtggttaccacaatcgatttcagacttaaggacaccaaaaagctctgctacacatctcgagccaccttttacatcatgcccgtggcaagcctataagcccaagtttttatatggacaattccttctgtttacaggaccggagtttgtgttgtgtatatttaacttagaataccatatatcagcaatctgttgtattgataatgaagcagaagtcatattgattgagccatgatgcccaccactgcatctgtcccagactcaacctgtccacccacatacgtactaatttgttatggtttataaagggagagtggaagatcacgatcatgtgatgcttataaagttttaaatcagaaaatttctgctgtgtttatctg

SEQ ID NO: 89262 - DNA, 298 bp, Zea mays
  Clone ID: MRT4577_181405C.1
aacaaaaaaaacttcccaaaaatttttttcatatttaaccgtttaaaaaaccccatccaacaatgcgggggttacaaaaaacctaccttgggccttacaaaaaactgaaaaatttatttttaaaaaccggctaagggctacccagggaaattatttttcaccggcctttttttggcacctttatcttttgaacaaaaaaccctttcccatacaccatattcccaccccctttttgcaaccccttacaaaattccacttgttcacaaccacaaaatttgcattatttttatggggggac

SEQ ID NO: 89263 - DNA, 838 bp, Zea mays
  Clone ID: MRT4577_181406C.1
attactccccgccccaaccccatcccgaactcactcacggtgccgcggaacagcgaagcaaacgaccagacgtaggaggagatggcggacggagagccagggcataagctgtcgccggctgactcccgggcggtgacgctggcattcttccgcgccctaggcgccgacgcgcgcctcccggcctcggccgaccagcccgacgcctactccgctctcgtccgcgcaatcctctcctctgttgccgtctccgcctccccgaccccgcggatctcttgcaccatcaccgtctcgcacgccgtgactaacacgtacaacacgctccacggcggcgcggtggcggccgtagccgaggccgtcgggatggcgtgcgcgcgggcagccgccggggatcgagagatgttcctcggcgagcttagcatcgcgtacctcgctgcagcgcgatgcgattctgaagtggacgttgaagcgcagatactgaggaagggcagatcagtcgtggttaccacaatcgatttcagacttaaggacaccaaaaagctctgctacacatctcgagccaccttttacatcatgcccgtggcaagcctataagcccaagtttttatatggacaattccttctgtttacaggaccggagtttgtgttgtgtatatttaacttggaataccatatatcagcaatctgttgtattgataatgaagcagaagtcatattgattgagccatgatgcccaccaaaaaatcagtcaaagactcaacctgtccaccgccatacgtcctaatttggtatgggttataaagggagagtgggagaaacaaaaaaaaaaaaaagggcccta

SEQ ID NO: 89264 - DNA, 136 bp, Zea mays
  unsure (1)..(136): unsure at all n locations
  Clone ID: MRT4577_181407C.1
gggggttgggttttttttttgcactanaaggatgggcgggaacactattttcttttatttggcacattgaaacttgaaagcatgatctctaatctggtagccttgcaaataatgctaacacctcatcgtttaccaa

SEQ ID NO: 89265 - DNA, 661 bp, Zea mays
  Clone ID: MRT4577_181408C.1
aattcggcacgaggccttcgcttcgtttattccccacttccacacggccacaccgccacagccgccgccgccggacggcgctgtccttccctgggaggcgctccactaggctcggctcagctcacgcgcggcggcggtgtccgtggctgctgggcttgcgcgcgcacctgattccgtgctgggcttcgcgaggtgctcctcgtgcgagacacacgcccgtctccaccggttgctgcatccgcctctggcccgtcggaacatgcccgccgccgccgccgccgccggcggcgaggtccaaggtcgacacctccaccagcagcgccagcacgcacggcggtaaacgtctctctctcatgtcacccgcatactcgctccgcattgtgctttgctgccttgctcgcgcggtggatgggatttgctcgtctagtgaccataattgcgacgccgtactgtaagccctcatttcgttatgggtaatgatgtaacatacacatgtcgcactttgtcacctcatgttgagcttgcagctgatcgattgtaaatggtcctgaggacgtgtgcagttttcggtagttctacgccggggtttgagggagatatgtgaggctgcagctgggatcgacactctttcattatatccttctattgagcattgaatttg

SEQ ID NO: 89266 - DNA, 397 bp, Zea mays
  Clone ID: MRT4577_181409C.1
cgtaagcttggatcctctatactggccgcccttgttttttcttattagacttttttttttttttttttttttttttttttttttttttttccgaaaaaaaaccacggctcaaactccagagagaacatcccccccaccccccaacatcacaattgagcgggggagcctgcctttggtcccttttttggaggggggtgtctgaccggatttgaaccattgggcctttcttatcccttggcgaggttgaccaaagtgggttcttcctggctcaggctgggttttggaaatttaaaggcttcggaaacatgtccttgaaccagaaagccgacccctttggggggggtcccgaacggttgaaccccctgtagacctatgccaactttgacgagtcccctgc

SEQ ID NO: 89267 - DNA, 469 bp, Zea mays
  unsure (1)..(469): unsure at all n locations
  Clone ID: MRT4577_18140C.1
acgcaccggcgcgggcggcggcacgagagggccccgacagccggncaccgcgggagagagagagagaggcgcangccgngaggggggccaagacggggaagccgggggccggccagaagcngcccaagcaggaggagcgagaagnnacagngcaccagcacaagaccccgaagcaggccaggggccccggagcaccccagaaacagcacgaccggaagaaacgagcgggagcgggaccaaanccgcagggacccccgcaccacagaacccgcaccgacggaagaccgaagaaaacaacaccgcngggcggggggggggaccccaaggcngacaagaaaaagaacaaggcngcagncaagaagnnggaggacacccaagcaaagaagggcaacacccngancaggccccgcgggaagaagaaggcccaggggaaaccgacacccgaccacgaagccccccgacgcggcca

SEQ ID NO: 89268 - DNA, 418 bp, Zea mays
  Clone ID: MRT4577_181410C.1
ggaaaaaaaaaaaaaaaaaaaaaaaaaaaaaaaaaaaaaaaataaaaaaaaaaatttttgggttgggtccgaatttggggtggcaacgctaatccaattcatttacttaccctccggccggcccccctgttccttgaccagggcttggcttacaggggccctcctcgtgtgggggatgatgaggtgtgcttcccccacatgctttgcgttgtgctataatatggtgccgaacccactgctctggattatattttgatgtctgggttgggattctctgttgtgacggggcattgattaattgaggcgagggatttcaattttgttcaaaaaaaaaaaaaaaaaaggggccctggccttcaactttttgttcctttaaataagggtaaattgccccctgcgctaaatcttggccttacca

SEQ ID NO: 89269 - DNA, 252 bp, Zea mays
  unsure (1)..(252): unsure at all n locations
  Clone ID: MRT4577_181411C.1
cacccccgccacccgaacctcagcactcaactcgaccaaaactccttcctanggaaacctcnacaaccgtacctgttaaacatatctcgctccgcaaaacaaaaccnnnnnaataccccccacaaacaaaccaacccaaacccccaataccccagacacccccccaacatactaaaactccccaaaaacaaccaaccccccgcggccaacgcacaacatgaccccaaaccctgcctcaccaacaaaacaccc

SEQ ID NO: 89270 - DNA, 588 bp, Zea mays
  Clone ID: MRT4577_181412C.1
ctctgcttctgtgcacgcaggtggacatcatctccagtctcttgagcggcaggctggtccgggagaagtggggccggctgttcagagcgccgtgcagagccaggtagccaccccccacccaacctcactcatctgatgaaataaactgagcgtgatctgatcagactttttttatatttctgacgctctgatcctccttctggtgccgattgcttatgcttaatgcactgcaaaatcctaaatttggtctcggttggtccattggctggctctatcgatcaacaacaagtttaggtagcagcagcatcataaacaaacaaaggatatacatatggagatgcttgtgcgcataatctgactgagtggtggttagtccatgtcctccatgcattgccctgccctgaagccaacgcgtcgatttcttcctagatggagtaacaccagcaattcaaaggcgcgcgcgccctctttttagacctttaatacccttgttagttatagaagggagcaagaattgttaccttaaaaaatggggctgtgctggtgcctgccttctagatcactttcagagaggccatcaggctcaag

SEQ ID NO: 89271 - DNA, 315 bp, Zea mays
  Clone ID: MRT4577_181413C.1
caaggaaaaaaaaacccttcccttttgtgagaaaaaatattaagactctacctcccccacaaagtgtttttgggaccaggggaacatggtccgaacctcaaaaaactacaattcccaacttgttggaaaggggaaacagggggaaaacaaatacgcaaatcctttcctaaaggttcccaacgaaaaacccatcttttgggggggaagggcttacccaccggtttagcccctatcttttgcgggggttgtgtttggccccaatttgccggatagtaccctcaaaaaaaaatttgcccgaacccaaaacaagaaggg

SEQ ID NO: 89272 - DNA, 594 bp, Zea mays
  unsure (1)..(594): unsure at all n locations
  Clone ID: MRT4577_181414C.1
atcatgttngagcgaaccgggacgtaaccagnaatggagaattcctatcgcttgtgcgcttattggagccaaattgtgacggcagtggagcggcggacaacactaacaacatgaacatgcatcttggtttggtgcaccaacctgtcatcccagcaacaggtctcatccaatgagattaagactaagaggaaactctcaagcatcttccaagtgctaagagcaggaggagctcagctaactcctgccatgactagcatcaccaatacgtcatgcagtgcaccacctgcttttcccgagacaccttaatctgtgcaaaagtgacgtccttcttgagaccaggtcgcagaaatggaagaaggaaaacaacgcaacagtgatcatcagacatcaggcagtgttttgttcgtatgatctttagattgtttagttagcgctgtttggtcgtatattagtggttttttttgggtactgttattcagaatggaagttcttgggttggtttatttcacacacacagaaagatggaatgccacctttgttataagtctcttcacattagaaccagtgagcatagctagtgaaaaattgtttgag

SEQ ID NO: 89273 - DNA, 255 bp, Zea mays
  Clone ID: MRT4577_181415C.1
ggcttcctccccctctgctcccaaggccgcgcctcccccgcccccggctactgccgtcgagacagcgccaccgggctcccatgctccagctgggggtccggcagcagcggtgccaacatcaagcggcgtagcggcggagggggttccaactgctctgaaggctaccacagcctcaacgacggcgatgtcatcgagtacatcgtcggcagcggtggaggaggtcccaactgcgcccacctccgccatcgagggtga

SEQ ID NO: 89274 - DNA, 3345 bp, Zea mays
  unsure (1)..(3345): unsure at all n locations
  Clone ID: MRT4577_181416C.1
ggcggcgaagggaggtgtaggtgctccggaggcggcggcgtggagtggcagtggtctccgcgcgaaccaggccgggcgcgccagctgccgcggcgcctagagcgagcgcctggacgtggtctctctcgcagtccgagttggagcttgggttttggcgcggagggacgccggggttctggttctggcaacgcggctggaggaaggggggaaacggagatggcggtcggggacgcgctgcgacggctgtgcgaggagatcgggtggtcctacgccgtcttctggaaggccatcggcgccgccgaccccgtgcatttggtgcgggaggacggttactgtggccacacttcatgccctgtcggatctgagccttctgaatctctgcctctgcccagcgacgctgggtgctctgttcctgcagctgacaccatctgctggcttgttaacaacgatatggcgtcgcaggttcatgtcgtcggacaagggatcgtgggccgtgccgcgttcagtggcaatcaccaatggatcgtccacggtactgccaatggtcacgggctctcctccgaggttgctgctgaggtgaacaatcagttcagagttggtattaagactattgcgatcattcctgtgctgccacggggtgtcctacagttaggctctactggtttggttatggaaaacacaaattttgttatgtttgcaaagaagttgtgttctcagctaaacaaccgttcaagcatggctgcatctgcttcggttaagaacacttctagtcagcatggtcagtcacgtcctgatactgcaactgtgtcaactagtacaccaccaaatgcattgctgagtgcatctttgcttaaggttgcgcaacagaatggtcaccctgttagagagcacagtgtctatgctgagcgtgatcttaggtttatacaacaagcatccatctgtgagagtcaatttggaagtaatttacagagtggtgttatgaactcatgtttgacctccccaagcttcgcatcagttaaaaagcagtcacttttgatgaacagcattgggcagttacagttcagtaataatgtgcattcatcagcagatttggcaagggagatcatattaaaatcccttgggcgccaggactcttctatctgcgaaaatacaaacatgaatatgcatcgtggaagatatgtagtatcccttgggcgccaggactcttctgtctgcgaaaatacaaacatgaatatgcatcgtggaagatatgtagtatccaatgatataaatggttctaggaattttgattttcttcctattggtgcgaaagaaagcagagccaacttatcaatccctgcgtcgagtcaaattttggaccacatgccaggaacattgcagcagaaacagtctctagtcccattcagggttacccaatcttctgaattttctaagaaagtggagaaccctgaaagtggatcatttcaaattccttcagttacaacttctgattctggtggtcaggtttctaacagtttcaacatggtccaagagaatcgattgagtatgtcaaacaatgtccgacaagtccaaaagattgacagatttagtgatccaagtgctaatgtaagcactcagagaatgaagaacagggatgtatgtgagtcggcaatgcccattgagagaggttcctcgttgctagtggagcctggtgcagataatgacttgtttgatatgcttggttctgaatttcatcagttctcccacaacgttgggtctgatttggtcacctggagtggtacagagtctcagaattcagatagagatggccctgaatcatcaatatatctcaatagctcaccccttttcagttcgttagacaacgagcttcactattctggtatcttatcactaactgatactgatcaactattggatgctgtcatctcaaatgtccatccaagtagtaaacagtgtcctgatgatagtgcttcttgcaagactgcattgacggatgttcctagcacatctcatcttggttcaatagacttgaagagatgtgagtcctccggcgttccttcagtgctaattaagcacgaattggcacagcttgttaagcaaccatgtatttttgacaaatctgagaactgtctttcccaaaataatggaatgcacaagtctcagatacgcctttggattgagagtggtcagaacatgaaatgtgaaagtacttcagcttctaacagcaaaggtcttgatacgccaagcaaggcgaatcgcaagagatctcgacccggtgaaagtgctaagccacgacctaaggaccggcagctgatacaggaccgtattaaagagcttcgtgagcttgtaccgaatggggcaaagtgtagcattgatggtttgttggagaagacggttaagcacatgcttttcttacaaagtgtgacgaagaatgcagacaagctcaaggactctaccgagtctaagatacttggtagtgaaaatggccccctttggaaagactacttncgaaggtggggctacctgggcttttgatgtcggctctcagtctatgacatgtccaatcattgttgaggatcttgaccgacctcgtcagatgcttgtggagatgctttgcgaggatagaggaatcttcttggagatagctgatttcatcaaaggactaggactgactatcttgaggggtgtgatggaaatgcgcaaaagtaaaatctgggcacggttcactgttgaggcgaaccgggacgtaaccagaatggagatctttctatcgcttgtgcgcttattggagccaaactgtgacggcagtgcagcggcggagaacgctagcaacatgaacatgcctcttggcttggtgcaccaacctgtcatcccagcaacaggcagcatccaatgagactagagaaaaccctgaagcatcttcccaagtgctaagagcaggagctcagctaacttctgcagtgactagcatcgccaatatgccagtgcatcgcctgcttttcctgagacatcttaatccgtgcaaatgtgacatccttcatgagaccaggtcgcagaaatggaagaaggaaaacaacgccaagagtgattgttaggcagtgttttgtttgtatgatcttagtttgtttgttagttagcgctgtttggtcgtatattagcggatttttttgggtactgttatccagaatggaagttcttgggttggtttatttcacacacacaaaaagatggaatgccacctttgttataagtctcttcacattagaaccagtgagcatagctagtgaaaaattgtttgagaagactcttgagtcattgctctgatcagattatttgttattactc

SEQ ID NO: 89275 - DNA, 724 bp, Zea mays
  unsure (1)..(724): unsure at all n locations
  Clone ID: MRT4577_181417C.1
aattcggcacgagggtagctggcaacgccatcttaatcttcttacatggcctgagatattaagacagtttgctttatctgctggttttggacctcaattaaagaaaaggaccgtagaagattcttactatcgtaatgataatgagggtcatgatggtgagaatgttatattgacgattcgaaatggtacagcagcagtgaatgctgctgctaagatgaaagaaagaggttacaccaatcgccgtagatcccgccaccgtctcactcctggaactgtaaaatttgccgctttccacgtgctttcgcttgaagggagcaatggtctcacaatattggaagtagcagaaaaaattcagaaatctggattgagagacctcacaacaagcaagacacctgaggcatccatagctgctgccttgtctagggatacaaagctttttgagagaactgctccttcaacatattgtgtgaagtcgccttatagaaaagatccggctgattctgaggctgtgttgtcagcagcgcgtgaaagaattagggcttttcagaatgtgctttctgactctgaagctgaaaaggaggtagatgaagctgagagggatgatgattctgactgcgatgatggtgatgatgaccctgatggtgatgatgtgaatactgaggtggagacgacaaggatcctcttcttgctgtncagtcacaagatgaagtaccgagtacaacta

SEQ ID NO: 89276 - DNA, 531 bp, Zea mays
  Clone ID: MRT4577_181418C.1
atggtacgcgttcgaagagaagtcgtcaccgtcaccgtcaccgggcacgagtgtctgtgtgaactggagggaagctcatcctagcgctgatacatgtctgtcgacggagctgctgaacaggcagattcagtcggtaccggccaagatccccgtactgccgatcggcccgccgatgacggagaccagacgaggctcagcgacggaaggtacctggactatctggaaaccggcgttccgagggagaaggccagacacaggctcgggtctgtacatgggttcgactactgcagacacgacgcgctagcgatctccacggagctagcgcacgagctggacgcttacatgttcgacttagatcgccccttgtacgccgagagcgagccgaaccctgtcagggcacgaggagagcatagtcctggacatcgacgagctcgacgacaacctgcagtatgggacgcaagatctaccttgctggattcttcatgggcggagagatcatgtggagctgactcaagtacatcctacacaggc

SEQ ID NO: 89277 - DNA, 407 bp, Zea mays
  Clone ID: MRT4577_181419C.1
ctaattaataagggggaaaaaaaactgaaacatatcaaagcagagagctatgtaacaggtttaagagctttttttttggggtgcatcacagagtgaggatggagcgaccaaggtgttttggtgcctttctttgcgggaaggccaagaaccaacccttcacgtccggtcaccaccgtccgttgggatctactagtcctaggcaggaacagaacagaacagaacgcaggacaaaccaatgcaccaaccaacttttcgtcagtaatcgcattgcatgctagtctcttgctacttcgatgccctttagatgagagccaaacgctagcatcaccatcatcggactggcagcacatccagctgggaggggggaaaggagctacgagtcttacgcgtgcacggcagcaccactg

SEQ ID NO: 89278 - DNA, 217 bp, Zea mays
  Clone ID: MRT4577_18141C.1
tcatcctggaactcttcttgtatgtggccagatttttgctgtggggtattttagatctggctatgcaccaaaggatggtccttcacactcagtattaatacatcgtcctttgcctttcgttgaactctttctcctcagctatgaacactaattgcccaaatataaacttctttcacacatttcacacttctctttaacatattcctacatgttctac

SEQ ID NO: 89279 - DNA, 594 bp, Zea mays
  unsure (1)..(594): unsure at all n locations
  Clone ID: MRT4577_181420C.1
cggttaggggacacctgcccagaacaaacacttttttagacattgcgtgggcggacgcgtgggcgtgcccgtgcggtggttcgaccagatccatctcacacccttatcctctttacgcctcaccactacagagaaaaagagaaacctgcgagcgacggggactatggccgccacccgcaccgccctggccctgctagggcacgagggcatggaatctgggcccaggccggcggcgccgcgccgcagcaggctacgcgtcgtcgccgtcgcgctgcggaccaggcccaccagcctcgcggccccgggtctcccgcccgcggcgccggagcccgtgctgccgtcgccgcccgtggccgcgggcgccgcggcggtgctgctcgaggcgggcgtgccgcccgccgacctcccgcgcgcggcggggatgtgcccggagctgctgtccgtgtccgctgaggccgtcaaggccgcgcttcggttcctnacggtagatgcggtcgttggcaaggtcaacctancgcgcgtgctccagcggaaaccgctcccgcataactataccgtaaaggcacagctgaagaccaaactctactaactaaa

SEQ ID NO: 89280 - DNA, 235 bp, Zea mays
  Clone ID: MRT4577_181421C.1
cccacgcgtccgggggcgaagccagaggtaactctgttggaggctcgaatcgatacttacgtgggaatcggtcgtctgacttgggtatagggactaaagactaatcgatccatatagtagctgtcaccctaataaggtttacttaggatagctggagcctacacgagtactatcgggtataagccaatgattagaggtatttggggcgcatcgccctcgacctattctcaaactg

SEQ ID NO: 89281 - DNA, 374 bp, Zea mays
  Clone ID: MRT4577_181422C.1
tctcttttgttttttttttattaataattttgggtcgtgttactagtctattgtgggaggccccacaggagcggagccgcggcacgcaccaaagccaagaacgatgaccctgcgcaaacagccaaccaccagacatacagtaaggcacccaacgtaagcaaaaaaagggcgagaaagccggccggcgggaaaatgacatagccctggcgaggaagaaataactgcgcccggggacataaacagaacaggcggggatgaccaataaaagcctgaactcgcgcaccacgaagcacggcgccaccgcggagaccaagggggtgaacccggccggccccttcgagtgagaaaacggccaaccccccgaaaaaaaccaa

SEQ ID NO: 89282 - DNA, 272 bp, Zea mays
  Clone ID: MRT4577_181423C.1
gccgcggcggacccggtgggacccacgcggccgttgtcttctgccacaaccccgctcccggaggggtgggtttatatcgatcgacggagctgaggcgccggcagctgctgcaaagacgtccggtgaggcaatcccagcccaggacgaccagagagaacaagactgacaccgagatgcaaccattgtgcaggtcagatctgaagaacggtagggggcattacgtgacacgaggaaagctctcaaggaccaggaccctgcatgcacaaaaggaa

SEQ ID NO: 89283 - DNA, 800 bp, Zea mays
  Clone ID: MRT4577_181424C.1
tatttcggcacgaggaaatttgggggaaaaactccaattgcggcgggtgggaaaaaaagagagaaagaaattctttctccgtttttttaccccaattctgaccgactcgccgccggcggctcgatcacgccggaaccctagtcgaggctggggtagtttcggccgtgctcgggagctcgtttaccgcggcgagctcgaccgccgcgggtctccggagccggtggacggcatcatcgtctagggtttgctcttaatcatctagggtttgctcttaccggagctgctcggccgcatcgtccgcgggcctacattttgtgctgccgccgagatgccgccgccgtctaagaagttggctcgcgtcgacacgctccagctcaaggatcagatcgtcaagcggctggggcccctgcgcgctgagctctacttccgcagcctcaagaagttcctcggctgtcagctcggcaaggatgagtttgagaagatctgtgttactacattggggaaggagaacatcaagctccacaatttcctcctccggtccatcctcagcaatgcttgtctatcggatgggcctccgccaagcatgcaggcggccactggaaactcgcagactagcacggtgtccaatgggacattcagcaatggcttattgccggtgaggagggtgaggccccggactaagaggttcagtgataagccgagcccgattgggaagtctcctcttggtcatccgagtgctggggggggagtttgtgtcagctggttgcaaggttttgcaggaggtcatctctgtggaggat

SEQ ID NO: 89284 - DNA, 240 bp, Zea mays
  Clone ID: MRT4577_181425C.1
cgcctacgtaagctcggaattcggctcgaggatgagcttgctaaacgcggtttattttctcctccgctcgcagaccctaataggggggtgtattacagaccggggctagcggctcaccgagacgctcatagacgcggacggccgacttgccatacatttggtgggctgctacatgatgaccgtgttcatgctcggacttgccatgcgctactaccactggaccacgccgggtaaacacat

SEQ ID NO: 89285 - DNA, 1133 bp, Zea mays
  Clone ID: MRT4577_181427C.1
ccgacagcaagatggagtatacacgactgggcaagtcaggtctgaagatctcaaaagtagttctggggggaatgtcctatggctcctccgagtggcggaaatgggttctcgacgaagaagactccctcccgctcatcaagcacgccttcgactctggcataaacacgtgggatgtagctgacacctattccgacggcgcctctgagagaatcgtaggcaaggctctcaaacaatacaacatcccccgcaaccgcgtcgtgatcctgacaaaatgcttcttcgccgtcgcggaaccaggagacgacaaggacatcaaagggaaggacaccgcgcaatgggttaacagagttgggttgagccggaaacacatcttcgatgctgttgatgctagcgtggagaggttgggaacgtacattgatgtcctccagatccaccgcctggacaaggacacgccgcgggaagagatcatgaaggcgctgaacgacgtagtcgagagcgggaaggtgcgctacatcggcgccagctccatggcagcatgggaatttcagaccctccagaacatcgccgacaagcacggctggcacaaattcatcagcatgcagaactactacaacctcatctaccgtgaggaagagcgcgagatgatcccctactgcaacgacaccggcgtcggcctaatcccctggtcccccatcgcgcgcggcgcgctcgccaggccgttcgatgcgcggtccacggtgcgcgagacgtcggatccgttcctgactagtttgatccgctcgaaggagacggagactgacaagacgattattgggcgcgtccaggaggtggcggagaagaagggcgttagtatggcgaaggtggctattgcgtgggcgctgcagaaggggactagtccgattgtggggctcagcagcaaggagaggattgatgatgcggttgaggcggtgaagtggcagagtggtggtgggttgacggaggaggactgcaagtatcttgaggaggggtatgctcctaaggctgtggcggttgtaatgtgagtaagtgagatatatcacgtcttgggaacataccacgcttcaccaaaagttcagtatcgtttagcgctatattatcagcaaagttagtggaac

SEQ ID NO: 89286 - DNA, 788 bp, Zea mays
  unsure (1)..(788): unsure at all n locations
  Clone ID: MRT4577_181428C.1
tggacgcctgcaggttccggtccggaattcccgggtcgacccacgcgtccgcactgcgaactggaatccactcggggactctgccttttacaggaagatgagctgacagcatggactgggacctgaaggaggagctcaaggattgcctggtggctgctgcaccctatgggggtcccattgctctactgaggaactgttggagaaaagagaaagctgccagcgtgcggccagtactggagatctactctgcatctggcttaccactggctagcctgctgtggaagagtgggcctgtggtggccctcggctggtcagctgaggaggagctgctctgtgtgcaagaagatggtgcagtgctagtttatggccttcatggagacttccggaggcacttcagcatgggcaatgaagtgcttcagaaccgtgtcctggatgcccggatttttcacactgagtttggttcaggggtggccatccttacaggagcctatcgctttactctgagtgccaatgtgggtgacctcaaactccgtcggatgccggaggtgccaggtatgcaaagtgcaccctcatgttggaccacactgtgccacgaccgagtaccacacattcttctggctgtaggacccgatctttaccttctggatcatgctacctgctctgcagtgacacctgctggcttagccccagnagtgagcagcttcctacagatggctgtatccctcacgtatcgntacctggcactcttcacagacacaggctacatctggatggggacagcatcactc

SEQ ID NO: 89287 - DNA, 627 bp, Zea mays
  unsure (1)..(627): unsure at all n locations
  Clone ID: MRT4577_181429C.1
tgggaccctcgaggccggccgggatcctcttcncatcagctagctagccttccctacagcaactgcttacatacaacacttccatcttcccgagctcgtcttcgatcaattcccaagtcaaataataatataacaacaatggtggttcccgtcatcgacttctccaagctggacggcgctgagagggccgaaaccctggcgcagatcgccaatggctgcgaggagtggggattcttccagctcgtgaaccacggcatccccgctggagcttctttgagcgcgtcaaggaagggggagttccgaattggttatcggcccttcccgggggaggggggcgcctttttataaggggttaaaacccggggcccccctggagggttttttcaccaaaaggagggcggggaaaaatgtttttgcccccccccggaaaccccccccccgggggggggaaatttttttttcccccccgggggggggggggggggggcgccacccccaccccccctcctaaaaaaaaaaaaactctggggggccccccccccccccttatagaaaataatatcccccccccccgcctgtgtgtgggggggctctaaaaaaaaaaaacccccccccccccccgggggg

SEQ ID NO: 89288 - DNA, 386 bp, Zea mays
  Clone ID: MRT4577_18142C.1
attcggctcgagggtctttgtcccagctttttcgtactctacgtcggctggctgcccttcagcgaggtgctggactggagcaccttttcagtggggctcggcaggagaagggcataccgtgggacctcatgaacttcctgtggcacgccgaactccacgcccatcaggtgctacttgttccacatgaccctgcactccatctggttgagtagagcgaaccaagatacgcttgactgctgaactgagcggtcaagtctctggaacacattagattgttactgacctcgacaggtgacatcaccggagcctgccctactgtgctgtgcgataggttgttcagatgcacccgcacatgtaaacaattctagatatgcaacctccatttg

SEQ ID NO: 89289 - DNA, 828 bp, Zea mays
  Clone ID: MRT4577_181430C.1
agtctatgtgcagataacccacattggggataccttagcgtgcatgtctacggagctcaaagctatggaagggagcatctgccatgagttcgagaccgggctcccagctgccgccgtgtgggaggtctatggaagcctcctcttcgggaaactgatgccccagctgctccctgaagtggtctcgaaggttgagcttgtggagggagacggtggcgctggaacggtcctgcttgttaccttccctccaggaactcctggatcagaaactttcagagagaagttcatcaaggtcgatgacgaaaactacatcaaggagacggtggtcactgaaggaggccttttggatcacggctttcggaagtacatggttcgaatcgagatcgtgggaaaaaaaaagaagacatccattgtaaggtcaacaattcaatacgaagtcgatcatgagcatgcaggttcacacgcaccccctgtgttcagtaccgatgggttagctaccattgccgaggccatccccaagtatatcaaggagaagagaggctttgagtccgtaatttttcccaagtaattgaactttgggaattgaaaaaaaaagggccatagcgtgaagatatttattttttttccggacttgttcaaatcgtgcaaataatcgtcggatgcgtggagtgagtttataaatggttgtttattactccctccgttttaatttataagtcgttgtgtaatctttagcagagattaggataaagtgtggactaaactttatcaaatgtggggtttggagaaaaaaaaaaaaaaaaaaaaaaaaaaaaaaaaaaaaaagtccac

SEQ ID NO: 89290 - DNA, 534 bp, Zea mays
  Clone ID: MRT4577_181431C.1
aaaacaaaaacccttggatagaaaaaacttggtaagcacaaaacaccccgccggaaacctttggggcccccctttagttgggccgggccctaacggaccccaaccacaatcggagtttaaacctaaaaaaacccatttggggggggggccttccgggcctttttaaaagcaggggacttcacggtcttgggtttggccttggccttgggggggggggactttttcggtttccccacaatttttttttggggcgccttgggcttggccccaaaaaaaggggtttttttagggtgggcagccgttgccttttttgacttggggggggggggcttggccggtttggaggggggggttttggttgggggggcctttgccggtttggccttggtcttgggcaaagcctttttgggggggcccgaaagtttgaacaaggccttgaccttcaaaagcttgcccttggggggggacccacggggctggagggaaagcattttcttgaaggtggccggaaaaaacccgccgggcttgtccccc

SEQ ID NO: 89291 - DNA, 346 bp, Zea mays
  unsure (1)..(346): unsure at all n locations
  Clone ID: MRT4577_181432C.1
aattcccattcgaccgcactcaaactcccactcttcctaaacttcctaacttctcttctctttatcgtantaaattttacaatctggggaaatctataacagaggctcatactccttaaccatcataagctcgatcatcaacaaaatataactactttgtacaccatcatgactctataagtatacatgatataagatcaatatatacttcttttatgataacatatcatgttccttctctatttgttatcactgataattctctcaattcatcaaaccatatatctcctttatctattatcaaactatccataaacaattctgcaaattttcaacaaattaatac

SEQ ID NO: 89292 - DNA, 595 bp, Zea mays
  Clone ID: MRT4577_181433C.1
ccggccggggtctatcatgtcggagccgtgctgtgcgttcttcgcatcgccgggaaaggcggccaagcaggaagccaagaaagcccccagtgaggcatcccgttcgccagccgggtcacgctgcacgtcgtcgaaggcgaggacttcctcgccagaaaatccgagaaagccggagcaagaggtggaagtgtccagcgcaatctgctccggtgccgagctgctgctgcgcgtgacctgcaagtgcggtgtccacaaagagtttagcttcgaccacggtgtctgatcaagtagctcctgtctatcttcatcgtcggtgttcgggttttactttgcaaatcactgaagtcttagaacaaggttaactgcaccgaattttaaatgatacatgctcacgtagaaactagtttaagccttgagaagccgcagtaacgtagaaattaaacgagtatgtttcttggttgatttgatcttgtagtcgtgtgcttgtggtacatacatgctcatttggatgattggtagtggtagagtaactgagtaagaggtatcattccgctttatttggaagcacaaaaaaaaaaaaaaaaaatttgcggcc

SEQ ID NO: 89293 - DNA, 1177 bp, Zea mays
  Clone ID: MRT4577_181434C.1
gcttatcaaatagcaatcaacaggacccattgaacttctcaggacaattttgtagtgcttctcctgcaaacccagattcccatacatgtactgatccgcattagggtctggaacttcaacacaagttccacgaggagcatttatagcgatcatagtggatctctgaaagtgaggaatcttatttatatcttccttcaaaagatataacgactttcttttatccccatctagggcgagagcttgtagtttttcttttgcttcccttatttcgtcatccaaccttaactcttcatcataaagagattcaagttcttccttcaatgaagaaatttggcgttctatatccttaggcttcgatatgtcaaatcccttccagcgaaccatattcttaagtcccttttcaattaaatgaacaccttctagaacatttgttatatcatatatcctcctcttttgcacctccaacgtctcagctgctttattcaaatcaagggctccatcttcagctccttgaagcaggttgatgaacttcttcgtcagcagacttagtgagctgtcatagcggcagtggtttaatgaggataaagaaggatcagcatctccttcaattgctccagaatttgtgttgttcaagttgtgtttagaagcctttagtttttttatcctctttgtagcttttacaggtccaggggtagtctccttatcatgcccttgtgcagtttctactacgttgttttcagattgagaatattctccactgttttgctcattcaactgtgccttgggcttgggtccccccttccccgccgggtgctggagccggaggcgggggcatcgcaccagtttgctgctggggcggctggtcggtggatgcgggcggcggccgagatggagcctccgctgtggccgccaggggagcgggagctgaagtaacagcagcaggaagatgaggaggaggaatcggggacctcacagcggcgcggggcttcgaggagaagatggggatgggcgcaggggcgctgaacggctggaccctaggagcagcctgaagcggcgggctgctcccggttcgctcgccgttactaggggaatcctcgtaagttcttctcctccgcttatttatatgcttaaactcagcgggtagtcccgaccggagcgtgggtcgacccgagggggg

SEQ ID NO: 89294 - DNA, 451 bp, Zea mays
  Clone ID: MRT4577_181435C.1
aagcaaagtaaaatgaaaatgatgtattacaataccatgtgtgcatgtctgcacatactcattaatttactatcagtaaagtaaaattaaaatgttgtgatgacaataagggtgttccttttccatttagtatggcctcctgataaaatttctatcttattcaaccattactcttggaattcagatatatacgtataatttagttgtatcaaataactaagaatccttccatgagctagaaggaagcttgaaattaaaataataaagtatcccagatgggatgcaatacaatattagtgtccaggccaaagtgatctgggaattccaaagagtagtgaaaatcatctgtacattctggtagaatatgttgtgcttgtttcacatcggagtcatgctattctgtctggtttctactagtattttgtaacttctgtctactcaacccttattt

SEQ ID NO: 89295 - DNA, 611 bp, Zea mays
  Clone ID: MRT4577_181436C.1
gggtaccgggccccctccgcgagtttttttttttttttttttttttttttttttttttttttttttttttttttttttttttttttttttttttttttttttttttttttttttttttttaaaaaaagggggccccccccttttttaaaagggttttaaaaaacatcggagcgcgggtgtataaccaaaaaaaaaaaaaaaaaaaaacccccccccgggccaattttacaaacccccccaaaaaattttttttttggggccaaaaaaaaaaaaaaaggggccccccctaaaaagggccccccccaaaagggaaggggggggggggcccccaaaaaacccccacaaaataaaaattcccgcggccaaaagggattattctcgtcccccgccggggaaaggggaggaaaaaggggccggggcaaaaatggagagaaaccccctttccgggagaaaaaaagaagcccccccgggctcccgggggaagaaagggcgaaaccccccccccccggaaaccctagaagaacaggccttcgccccaaatattttataaaacgggcaccctcaagggggcccccggggggatgaaaatttcaaaagacccgggggggcgc

SEQ ID NO: 89296 - DNA, 191 bp, Zea mays
  Clone ID: MRT4577_181437C.1
tctttttgggggggggggggccagctaaaaccatctgcgttcagctagcgcccaagtttagtctgtggcgatcattcactgcaagtagtaatggcctccgtcaacagctggaccctcgagatcgcgtcgccggtggctccgcagcgcctggggggggttttttttttttggactgacacaccctggcgccc

SEQ ID NO: 89297 - DNA, 373 bp, Zea mays
  unsure (1)..(373): unsure at all n locations
  Clone ID: MRT4577_181438C.1
gacccagcgtccgggaaaccgcaaaggctccgcccgccgcgggggggggggtggccctcgaccccagacagcgcgacccgtgggcgcccaaggcgggggaacaagcccgcggcggaagaagcccgcggccgaggaggaggcggagaaaaaaccaaatggttttatccttttgccganaagcggccgcccgcggggggggccgccgcccggggggcggcgagaacaagggnngaggggggggggagcacccccgacccacaaaaacacatcttcaagggcgggagcaggggcaccccgacgtcggggtatcccccgagggcggggccatcaggaactccttcatcaaccacctctgcgggaagctggccggcga

SEQ ID NO: 89298 - DNA, 242 bp, Zea mays
  Clone ID: MRT4577_181439C.1
tttcgcccacgcgggcgctttttttttttcggacccggcctatgacaggaccctcccgggggggtgaccctaggtgccgtggcggccggcgcctactccggcgaccggcgacggcgatctatatgggggcgacgggctacgcgctcacgctccaaacggccgccgtgttcccaccagacgacagcgtcgtcgccggggccgccgtctgcttccgctcgggtacctcctggcctttagccgcc

SEQ ID NO: 89299 - DNA, 174 bp, Zea mays
  unsure (1)..(174): unsure at all n locations
  Clone ID: MRT4577_18143C.1
cccacgcgtccgctcagacgttcacctacgagtacgctcactcataggaccttccctggaacgataagccatattgcatgacgcactgattaaccnatgatgcgcatactagggtgcatgagactccacagctactggacctaatctgaaacctagggtggaatccctccttcc

SEQ ID NO: 89300 - DNA, 356 bp, Zea mays
  Clone ID: MRT4577_181440C.1
aaaaaagctatgtcttcaccgcaatgtcatatgctccaaatgcaaaggcaagggctcgggggctggtgcctcaatgaggtgccctacttgccagggctcacgcttgaaactctctatctatcatctgggccctcccatgatacagcagatgcatcacgcttgcaatgagtgccaggggcctgggcagagcataaatgaaaaagaccgctgtccacggtgcaagggtgagaaggtcattcaagataagaaggttcttgcagtttatgttcaaaacggagagcaacacaaccggaagatcaccttgcttagtgaacctgataaatccccttatactgataatggagacattcgtttct

SEQ ID NO: 89301 - DNA, 200 bp, Zea mays
  Clone ID: MRT4577_181441C.1
ttggggggtttttataaattggggggaaaaaaagcggattggatttttacacaatttgctagcaaagaacatgataacatatttgggaccaattcccgaaacaaacaaaaaaacaaggggacacgcacaaattgggaaaggggtgaccctaaagaagggtttgtccacaaaaaacctgcagattagtatagggacctagc

SEQ ID NO: 89302 - DNA, 273 bp, Zea mays
  Clone ID: MRT4577_181442C.1
ccagagtgaccgtagcctacgaatacgatacaacaatactgcgaatctctcagcagtttaagtacacagtcgaaagggggggggggggggaaaaagaaacaaagatatcttcccaccccacttgttaagataaatgattcccccataataatgctggctgctgacaatccaaattatacccaatccctaatcccgcctgggatgggttgcacttgcaatcgccattgccaaaacccttctttatcatccttcgtctccggtaatcttttatgg

SEQ ID NO: 89303 - DNA, 1201 bp, Zea mays
  Clone ID: MRT4577_181443C.1
ccccgcgtccgcagctgcattaataaatggtattctaagttgtccaggaaagatataaaggctcgttgtccagcttgccgtggtctctgcaattgtaaaccatgcagccttggtaattccaagggttctacgcctaaggaaccgccaaaagttgaaaggaagatacttagcataaaaatttccaaccatcaattttacaagcttttacctgtaagacttgaccaggaacagctagatgagttggaactggaagctaaaatacaaggaacaaaaatatctaatgtctgcgtccaggttgctgaaactggtcagagtgagtcactctactgtaataactgtaagctctcgatgagccgattattaaggtgctgcccaacatgcccgtttaagctgtgcctaagttgctgtcagaagatacgtgaaggaaacatgtcggacaacacccctgaagataaattcaagaatcggttgattcaacaagagtctgtccatgaggatggcagtattacttgcccttcgattgagctgggtggatgtggtgacgccatgctgaacctaatatattcatctccatctagccagtccgaagagctcagttcagaatgtgagctagatgctgcaggcaatcattctggagtgaaggatgctcaggctcatgggtcacctgtacctgagagtaacggaagattattggctgctgcccaggcagaaacagtgtctgaggaatgaagatgcggctatggttggctcatcgttcaggtgggagcgcaagctgacttgttcactaccatcaagcctgaagatgtgtatgataccggtccgggttcgatagagggtaggttgcttaatttagctaggttatcggcctatatggctattgattttaggcctgtgacctggggatatgtttcgtctttgatccgggagtcattatgttaaacatcgttgtacatatggttatggctttatttttgtcattaccgagaggcgggagctgatggattggttgtattgtcgttcgtctaagggattaccttgataatttttatgtgcggtactatcagtattcagtagaccaaaaaaaaaaaaaacatgggtcgtattgttgacttgttgtcattctaggctagtttcatgttgtcattgaccattgcggctcgatggtgaaagcattacgaagaggcagtactattgtcaatgt

SEQ ID NO: 89304 - DNA, 108 bp, Zea mays
  Clone ID: MRT4577_181444C.1
catggggcggggacatttgccaaactacgggcacaaggaccatttttaatgagctctaaaccgatatataagggcggtggaaaccaatattctttctcccatacggag

SEQ ID NO: 89305 - DNA, 824 bp, Zea mays
  unsure (1)..(824): unsure at all n locations
  Clone ID: MRT4577_181445C.1
gccggccggttccggaacgtgctcgatctccctccgccactccatccatctcctcgctcccagtcccccggaagctacgaagcatgctcatcccggaggtgctgaccaaagccgggctgatcaacgcgccgcagtggtacgacgccggcaagtcggagtacttcgcgtcgtcgtccacgctgttcgtggtcgagttcatcctgttccactacgtggagatccggcggtggcaggacatcaagaaccccggcagcgtcaaccaggaccccatcttcaagagctacagcctgccgccgcacgagtgcggctacccgggcagcgtcttcaacccgctcaacttcgcgcccacgctcgaggccaaggagaaggagctcgccaacgggaggctggcgatgctggcgttcctgggcttcctgatccagcacaacgtcaccggcaaggggcccttcgacaacctgctgcagcacctgtctgacccatggcacaacaccatcatccagaccttctccggttgagtcgaggagggatacgaacgatccatcgctggtgagctgatatggactggaagtcaaacattgaaaccttaaattcctttctggatcagcttgtgtgtgttgttaatctatctggagggtacagattcgggccgtgttgtaatgcatgcatggtctgaagggagcgagggctgaagagtgactggtatgtacattagctgaaggggatgttatgnngtagagatcgtttgatcagtatcatctgtatatcactatatcccgatgcatggnngtttcgttttgtgcaaaaaaaaaaaaaaaaagccccta

SEQ ID NO: 89306 - DNA, 659 bp, Zea mays
  Clone ID: MRT4577_181446C.1
gccggccgggttgggaacgtgctcgatctccctccgccactccatccatctcctcgctcccagtcccccggaagctacgaagcatggcaggacatcaagaaccccggcagcgtcaaccaggaccccatcttcaagagctacagcctgccgccgcacgagtgcggctacccgggcagcgtcttcaacccgctcaacttcgcgcccacgctcgaggccaaggagaaggagctcgccaacgggaggctggcgatgctggcgttcctgggcttcctgatccagcacaacgtcaccggcaaggggcccttcgacaacctgctgcagcacctgtctgacccatggcacaacaccatcatccagaccttctccggttgagtcgaggagggatacgaacgatccatcgctggtgagctgatatggactggaagtcaaacattgaaaccttaaattcctttctggatcagcttgtgtgtgttgttaatctatctggagggtacagattcgggccgtgttgtaatgcatgcatggtctgaagggagcgagggctgaagagtgactggtatgtacattagctgaaggggatgttatgggtagagatcgtttgatcagtatcatctgtatatcactatatcccgatgcatggggtttcgttttgtgcgctt

SEQ ID NO: 89307 - DNA, 207 bp, Zea mays
  Clone ID: MRT4577_181447C.1
ccttctcctcggctgacctggtggtgtttgctgagctgttttggaacccaggggtgctgatccaggctgaggaccgcgtgcaccgcattcgacagaccagcttctcccgtgctcactacctcgtggcaacgggcacagctgatgactacctttggcccctgattcaagagaagattaaagttctggcagaagccgggctttctgaga

SEQ ID NO: 89308 - DNA, 833 bp, Zea mays
  Clone ID: MRT4577_181448C.1
acaacctccacgcatccccccctctcttcctcgttcgcttgctgggccccacttcccctccacgcggtacgcggacacgacgcttccgtcgcaacccccacacctttccgtcccgccggcccatcggccgccgcctccctgcgcacccagccgaggagaccgccatgatggcgggcgcctcaggctcagtcgaagaggagggaggactgagggcggaggagtccccgtccggcggcgtcgacgtctggagcgacgccgtctcctcccacgccccggaacacctcctcgtcatggtccacggcatcctcggcagtaccaatgactggcaatacgcagccaacgaatttgtaaagcagcttcctgatgatgtaattgtgcattgcagtgagaaaaacatgaacacattgactctagacggtgtcgatgttatgggagaacgcttagcagatgaggttcttgatgtaattagtcgaaagccagagctcaccaaaatttcttttcttgcacactccgttggaggcttagtagcaagatatgcaattgcaaaactttatagacatccaaatagcacatttgacagcaaagctgaaggaaccatatgcgggttggaagcggtgaactttataaccgtagcaacgcctcaccttggttctcgaggaaacaagcaggttccactcctctttggattcattacgattgagaaggttgcttctcgtgtcatccattggatatttaggagaactgggagacatctttttcttactgatagtgctgagggagaacaccactgttgcagcgtatggttgaagattatggcgatctttactttatat

SEQ ID NO: 89309 - DNA, 674 bp, Zea mays
  unsure (1)..(674): unsure at all n locations
  Clone ID: MRT4577_181449C.1
cggttgcctcgatctccattttgttcgtcgctcaccgggnaagctcgctacgacgaagcatggcgtccgtcaccgcccgcgccccggtcgcggccctgcgcccgtcggcgtctctcaagtcgtcgtcgtcgtcggcggcggccttccttggccactctagccgcctcggccgcactgctaccgcgtcgccgacgaggcgcagcctaaaggccgggatgctgatcccggaggtgctgaccaaggccgggctgatcaacgcgccgcagtggtacgacgccggcaagtcggagtacttcgcgtcgtcgtcgacgctgttcgtgatcgagttcatcctgtttcactacgtggagatccggcggtggcaggacatcaagaaccccggcagcgtcaaccaggaccccatcttcaagagctacagcctgccgccgcacgagtgcggctaccccggcagcgtcttcaacccgctcaacttcgcgcccacgctcgaggccaaggagaaggagctcgccaacgggaggctggccatgctggcgttcctggccttcctgatccagcacaacgtcaccggcaaggggcccttcgacaacctgctgcagcacctgtccgacccatggcacaacaccatcatccagaccctgtcgggtttgagtcgacggtccattcagtcatgtggt

SEQ ID NO: 89310 - DNA, 213 bp, Zea mays
  Clone ID: MRT4577_18144C.1
cggatgcgtggggcagcaggaataccctgtatttggggtctatttttattccgatgcagccactagcggaataatactgacaagagtgtgctctaagttctgatttggtgctgaaaatagagaccagagtcttggtgcccaactgattgatacctggaacttgtggatgtaaactcgtctgacctgaaacgacagaacgacatctgttgaagg

SEQ ID NO: 89311 - DNA, 592 bp, Zea mays
  Clone ID: MRT4577_181450C.1
aagcgcacaaaacgaaaccccatgcatggggatatacagatgatactgatcaaacgatctctacccttaacctccccttcagctaatgtacataccagtcactcctcagccctcgctcccttcagaccatgcatgcattgcaacacggcccgaatctgtaccctccagatagattaacacacacaaactgatccagaaaggaacttaaggtttcaatgtttgtcttccagtccatatcagctcaccagcgatggatcgtattcctcctcgacctcgactcaaccggagaaggtctggatgatggtgttgtgggcgcgaagttgagcgggttgaagacgctgcccgggtagccgcactcgtgcggcggcaggctgtagctcttgaagatggggtcctggttgacgctgccggggttcttgatgtcctgccaccgccggatctccacgtagtggaacaggatgaactcgaccacgaacagcgtggacgacgacgcgaagtactccgacttgccggcgtcgtaccactgcggcgcgttgatcagcccggctttggtcagcacctccgggatgagcatcccggccacgccaagcat

SEQ ID NO: 89312 - DNA, 1116 bp, Zea mays
  Clone ID: MRT4577_181451C.1
tttttttttttttatttacattcggcacgaggaaaaagagagggaaacaatattgcagggccgcccgcgccggaaccgaccacttcaccggcagcgagccggagactccgtggagcccctgtccccgcgccggcgtgggcggagggaggggagcagcggcagcggcaatcagcagaagaaggataacggggggctcttggagcctctgggaagaagcttctagaagctgcctgaggcgagggcgagcgcgccgttgccagagtgatctcggtggaataagccgcgcggggccggcgccgtgggggatgcgcctctgggtgccggcaccctccgggatttgaatggtagccagatctcgagggggaggggagcttctcgaagcggggtgaggcgcgcgggccggccgccctgcggttagggtttggtggaagcgggatggtggggagctcggtggagggaggagcggacggagatggaggctgctgcggcgtcggggacacctcgcccgggaccatcgtgtgggtgcggcggaggaatgggtcctggtggcccggcaggatcctgggcccccaggagctcccaccatcgcagatcatgtcgccgaggtccggtacgccggtcaagctcctcggccgggaagacgcaagcgtggattggtacaaccttgagaaatcaaaacgtgttaaagcattcaggtgtggggagtttgatgcctgtattgagaaggcagaggctactcaagggactcttgtgaagaaaagagagaaatatgcaaggagagaagatgctattctccatgcgcttgaattggagaggaagcagcttgcatcaaagtaccagactcaaggtttcagacctggaccacctggtaatatttctgcttgcacaaaacatcacaaagaccttggaagtactcgctacaagagtaagaagggcaagaagcgcaaagatgcatctgttcctcctgatgtaaaaaaagaagtgggacaatgttttctgcctgctggttcaaagagaaacttttcaggatcacttactcaaggaaatcttgtcagtaatcacatgggtgacttctcccctttgggacattctcatggaggtgccactttagaaaac

SEQ ID NO: 89313 - DNA, 604 bp, Zea mays
  Clone ID: MRT4577_181452C.1
ccggccgggaaaaaccacgtgctcgatctccctccgccactccatccatctcctcgctcccagtccccgggaagcatggcgtccgtcaccgcccgcgccccggtagcggcccttcgcccgtcgtcggcatcgctcaagtcgtcgtcggcctttcttggccactctagccgcctcggccgcaccgcgtcgcccacgaggcgcagcctcaaggcggaggccaagggcgagtggctccccggccttccctccccctcctacctcgacggcagcctggcggctgacaatggcttctacccgtcgcgcctggcggaggaccccgagaacctgctgtggctcgtgcaggcggatctggggaacggccgggggcccatgcttggccagatcggaatgctgagccggccgggccgggaagtgaagcggttaagatcatatccatcatccctggtgctgcgctgcgttgcgttgcgtgcgtgctcgccgctatcgaacctttgctgtatagggttccgatttcgtcgaatgtaatgtatgatgctacttttgagcttcaatgtaaaatctatgccgtccggccccggaaaaaaaaaaaaaaaaaaggccccta

SEQ ID NO: 89314 - DNA, 1262 bp, Zea mays
  Clone ID: MRT4577_181453C.1
ggactggaagacaaacattgaaaccttaagttcctttctggatcagtttgtgtgtgttaatctatctggagggtacagattccggccgtgttgcaatgcttggcgtggccgggatgctcatcccggaggtgctgaccaagccgggctgatcaacgcgccgcagtggtacgacgccggcaagtcggagtacttcgcgtcgtcgtccacgctgttcgtggtcgagttcatcctgttccactacgtggagatccggcggtggcaggacatcaagaaccccggcagcgtcaaccaggaccccatcttcaagagctacagcctgccgccgcacgagtgcggctacccgggcagcgtcttcaacccgctcaacttcgcgcccacgctcgaggccaaggagaaggagctcgccaacggtgagtagtagtaccgtccgatccttctctgacgacggttatgatctcatcatccggttctgcgtgcagggaggctggcgatgctggcgttcctgggcttcctgatccagcacaacgtcaccggcaaggggcccttcgacaacctgctgcagcacctgtctgacccatggcacaacaccatcatccagaccttctccggttgagtcgaggtcgaggagggatacgatccatcgctggtgagctgatatggactggaaggcaaacattgaaaccttaaattcctttctggatcagtttgtgtgtgttaatctatctggagggtacagattcgggccgtgttgcaatgcatgcatggtctgaagggagcgagggctgaggagtgactggtatgtacattagctgaaggggaggttaagggtagagatcgtttgatcagtatcatctgtatatccccatgcatggggtttcgttttgtgcgcttacttctggcttgccagcgtatggttcaatgtggaaacacatgtattagtacgagaactaatagacttataattaatataaatcaagcacgtacgacttctagctaaaaaaaaaaaaaaaaaaaaaaaaaaaaagcggccaatcaaaattactctaaggcctcgtttggtttaagagtccctctattttagttttatttagttcctaaattgtcaaacagtaggattaaaacagagactaaactgatttagtctctagtctctcaagatgtggttaaaaagactaaatcatattaattctacatttgcccttcatttagttcaattgtactaatagcaggagaatattaaagactattttagtcttcttatc

SEQ ID NO: 89315 - DNA, 363 bp, Zea mays
  unsure (1)..(363): unsure at all n locations
  Clone ID: MRT4577_181454C.1
ccgcagccagcncacggggggcctggggagccaccatgcngagggncgcgggcaggcgccncncgnccgctcncgccgggcgccccgccgccgccgccncaggcncccggggcccccncgccggnacacnacccggccgcgacgacgacgacacacgcgacggcagggcgcgnnncgccancgaancncccnacancgccgcggggggggggggncggcagagacccnngcnccaagaaaccaggaggggggcnnanccgagcncccagcaacgggggcagcggggaagaanccaagnggaaaaancgngnaggaggagnanaaccangagcgcnacccgccnggagaccccagcaagcgngc

SEQ ID NO: 89316 - DNA, 845 bp, Zea mays
  Clone ID: MRT4577_181455C.1
ggcccgctccgagccggccgggcccggggattcctcctcggcccgcgattccttctctcctcgccgcatccccgtccccgtgcccttctccaaactccgccatccccgtcccgtactccctcccttggaaaagatcaattgggaggagtaattccggcttcatccggtggtggcgatgccggaaaagatcgattttttttcgacggcaggagtaattccggcttgatccggtggtgccgatgccggatcctgcgacggcgccgacgcgagccaccaagggccgtggactccctctccggctccgattccgccaaacccagtcgtctcggcgtcccagcgaccatctccgaggcggataaaatcgtttctttcggtagcagcccgtggagaaggcccggataaatcctcggagcagtaagcccgccgctccagcacctttcctcaccgccgtcgtcatcaagatcacaagagcaggactctttggacggtgctgaagattgaccggttggagtctattgatttgtgtatccaggagtatcctactagttacacggagaattgattgtcaagaactaatttggcggattcacgagggaaataggttttctgaagtttcttggtccttactacacggttccaattaccaggagaagaaaagttggcagaatctgtggtcattatatttttattcaattggaaagagtgaaatggttgcaatagaaatctgcatttaagtcttcagctctcatattcttttttgggggtatttatttatacactcagagagaggactggttagcttaggccatcggagtatctgtttgattgatgtgatgaatttcaat

SEQ ID NO: 89317 - DNA, 1443 bp, Zea mays
  Clone ID: MRT4577_181456C.1
gaggccaaggagaaggagctcgccaacgggaggctggcaatgctggcgttcttgggcttcttgatccagcacaacgtcaccggcaaggggcctttcgacaacttgttgcagcacctgtttgacccatggcacaacaccatcatccagactttttccggttgagtcgaggtcgaggaggaatacgatccatcgctggtgagctgatatggactggaagccaaacattgaacccttaagttcctttctggatcagtttgtgtgtgttaatctatctggagggtacagattcgggccgtgttgcaatgcatgcatggtctgaagggagcgagggctgaggagtgactggtatgtacattagctgaaggggaggttaagggtagagatcgtttgatcagtatcatctgtatatccccatgcatggggtttagtggctccccggccttccctccccctcctacctcgacggcagcctggcgggtgacaatggcttcgacccgttgggcctggcggaggaccccgagaacctgcggtggttcgtgcaggcggagctggtgaacggccggtgggccatgcttggcgtggccgggatgctcatcccggaggtgctgaccaaagccgggctgatcaacgcgccgcagtggtacgacgccggcaagtcggagtacttcgcgtcgtcgtccacgctgttcgtggtcgagttcatcctgttccactacgtggagatccggcggtggcaggacatcaagaaccccggcagcgtcaaccaggaccccatcttcaagagctacagcctgccgccgcacgagtgcggctacccgggcagcgtcttcaacccgctcaacttcgcgcccacgctcgaggccaaggagaaggagctcgccaacgggaggctggcgatgctggcgttcctgggcttcctgatccagcacaacgtcaccggcaaggggcccttcgacaacctgctgcagcacctgtctgacccatggcacaacaccatcatccagaccttctccggttgagtcgaggtcgaggagggatacgatccatcgctggtgagctgatatggactggaaggcaaacattgaaacattaaattcctttctggatcagtttgtgtgtgttgttaatctatctggagggtacagattcgggccgtgttgcaatgcatgcatggtctgaagggagcgagggctgaggagtgactggtatgtacattagctgaaggggatattaagggtagagatcgtttgatcagtatcatctgtatatccccatgcatggggtttcgttttgtgcgcttacttctggcttgccagcgtatggttcaatgtggaaacacatgtattagtacgagaactagtagacttataattaatataaatcaagcacgtacgacttctagctaaaaaaaaaaaaaaaagggcggccgccaccgcggtggag

SEQ ID NO: 89318 - DNA, 1305 bp, Zea mays
  Clone ID: MRT4577_181457C.1
gccggccgtcccgggaaaaacaacgtgctcgatctccctccgccactccatccatctcctcgctcccagtcccccggaagctacgaagcatggcgtccgtcaccgcccgcgccccggtcgcggcccttcgcccgtcgtcggccttccttggccactctagccgcctcggccgcaccgcgtcgcccacgaggcgcagcctcaaggcggaggccaagggcgagtggctccccggccttccctccccctcctacctcgacggcaggtcagtgattcttttgctaactctggtctggccacactggatagcccgcccgcagcgatggctggcagatgactgacatgcccatcgcccatgtatgtacgtgtacgtaccgtgcgcgcgcgcagcctggcgggtgacaatggcttcgacccgttgggcctggcggaggaccccgagaacctgcggtggttcgtgcaggcggagctggtgaacggccggtgggccatgcttggcgtggccgggatgctcatcccggaggtgctgaccaaagccgggctgatcaacgcgccgcagtggtacgacgccggcaagtcggagtacttcgcgtcgtcgtccacgctgttcgtggtcgagttcatcctgttccactacgtggagatccggcggtggcaggacatcaagaaccccggcagcgtcaaccaggaccccatcttcaagagctacagcctgccgccgcacgagtgcggctacccgggcagcgtcttcaacccgctcaacttcgcgcccacgctcgaggccaaggagaaggagctcgccaacggtgagtagtgggaggctggcgatgctggcgttcctgggcttcctgatccagcacaacgtcaccggcaaggggcccttcgacaacctgctgcagcacctgtctgacccatggcacaacaccatcatccagaccttctccggttgagtcgaggtcgaggagggatacgatccatcgctggtgagctgatatggactggaaggcaaacattgaaaccttaaattcctttctggatcagtttgtgtgtgttgttaatctatctggagggtacagattcgggccgtgttgcaatgcatgcatggtctgaagggagcgagggctgaggagtgactggtatgtacattagctgaaggggaggttaagggtagagatcgtttgatcagtatcatctgtatatccccatgcatggggtttcgttttgtgcgcttacttctggcttgccagcgtatggttcaatgtggaaacacatgtattagtacggaaaaaaaaaaaaaaaaaagcggcc

SEQ ID NO: 89319 - DNA, 625 bp, Zea mays
  Clone ID: MRT4577_181458C.1
ggacccgccgccgcttcctctctgtcttgcacacccgccgccgcttcctctctgtcttgcgcagccgccgtcgcctcctctccctcgcgcagtcagcagaccctcccttcgcgcgccgtcagcagatccagatccctgcgccgctgaccggcccctgcccctcgcgcgccgtcagcagatccctacgccgctgaccggccgatgacaggtgcgcacacagacctagctagctgctgtctgcagaagaaagaaaaatattaggagcgccccgtatccatgatccatctgtccatatcctgtgcgtatctagccttccaagtcccgatgatgcagtagtaccaaatggcatagagtaattatgtcatacgagacaaacctatgagatatatgcttgttgtttgaaatactaacagcacaatgagttctgctccccttctgttcttcctattgagtgttgccccttctgtttgtcctcttcaaactcagatcagcaaagcttctgttttaatactaggagcatattataatatattgtatggattagtaatgctttcttatatgcttaaatttcatttcttggtatttaatttaatagggaaaataacaatcttttgacctctgctgc

SEQ ID NO: 89320 - DNA, 987 bp, Zea mays
  Clone ID: MRT4577_181459C.1
gagttgattgcaaagagaacctgttttttgtgaatgttcaagtacaacatcagcaattcgttcatctctatgtgttacttccggcctggagcagatgcaacgagcagctgctacaggcttgcaagctcctcgcagcaactgatgggtggacccttccaagcaatcactgtacagtgtacgccggtgtgctatagtatccagtccgcagtcaccagaccgggtgtggtagtatctcccgatacgtgtctcttctgtatgagaaacttcttgtcactatgtaagaccaaaactgatgactattgtcatgaaaaactgccgcggatcgctttggcaatcttctcggacagctcggtgccccgcaatatgagatacagaacaaacgaggcataaatgaggaccgccacacagagaagcgagccagataggggacctcggatttcagaagagaagaaatccatcaagaggtagccgttgatagtgatcagcagagtggctacagtccaggttacagcttgggtgttagggcctattttgaagactcccataacttgctccttggaaaccaaggtgatgagtggaatgagtgcaaaagggatctgaattgattggagcacattgagccactcatttaaaatatccagtgcagaatcagatgtgtcgaagaacaaagcaacagttatagtaggcacaattgcgaagcttctggtgatcagtgccctgacccatttttttaaccttaaattcagaaatccgcccattataaactgcccagcataagttcctgttatagtactactctgtccagctgctaaaagcccaatcccccagatgtacagtataggaaaaaatcctccaccaaacttctcttgtaaatactgtccagcattttcaagaccaatattaccggcttccttgcttccataaaatccttttgcaaaaactgttgtaacaaagagatttatcatgaaggagacagctaatgctatt

SEQ ID NO: 89321 - DNA, 420 bp, Zea mays
  Clone ID: MRT4577_18145C.1
cccacgcgtccgcttcagcacagtattcttccctctctgattctaaaagggctaagaagaaatcaggctacaaaattgggtcacttgttgaagcagagattattgatatcaaaccgcttgagcttctactgaaatttggtggcaatcttcatggaagaatccatattactgagattcttgaagaggattctgctgagcatccctttagtgaactcagaatagggcaaaagcttactgccagaattgtttcagaggctgaaccttctggaaagagtggcaaaaaattcaaatgggaattgtctattaggccatgtatagtcaatggagagtttgctcaaaaagaacaaaatcacaccacaaatgggattgtacgtgcttatgttgtcaaggtggataaggaatgggtctggttaactgtat

SEQ ID NO: 89322 - DNA, 1409 bp, Zea mays
  Clone ID: MRT4577_181460C.1
cccgcgcgtccgttccgacagcacggcgtatctacgccgtcggccgcagccggcgcctgctggccacacccgccggaccggcccggcaggtggcagtttaatagtacaaaccaggctgatcctggcgggaaggaccaacgtgctcgatctccatctcgaccgtcgctcaccgggaagctacgctacgacgaagcatggcgtccgtcaccgcccgcgccccggtcgcagccctgcgcccgtcggcgtctctcaagtcgtcgtcgtcgtcggcggcggccttccttggccactctagccgcctcggccgcactgctaccgcgtcgccgacgaggcgcagcctcaaggcggaggccaagggcgagtggctcccgggccttccctcccccgcctacctcgacggcaggtcagtagtgtttcttttcctgattaactctggccagcgacgccgactgacacgcacccatggccatgtcagcctgccgggtgacaatggcttcgacccgttgggcctggcggaggacccggagaacctgaggtggtacgtgcaggcggagctggtgaacgggcggtgggcgatgctgggcgtggccgggatgctgatcccggaggtgctgaccaaggccgggctgatcaacgcgccgcagtggtacgacgccggcaagtcggagtacttcgcgtcgtcgtcgacgctgttcgtgatcgagttcatcctgtttcactacgtggagatccggcggtggcaggacatcaagaaccccggcagcgtcaaccaggaccccatcttcaagagctacagcctgccgccgcacgagtgcggctaccccggcagcgtcttcaacccgctcaacttcgcgcccacgctcgaggccaaggagaaggagctcgccaacggtgagttgcattgcattgcaccatctcatctcaccgccgcccgccggtcgtcgtcggccacttccgatccttctctgacgttattaattctgcagggaggctggccatgctggcgttcctggccttcctgatccagcacaacgtcaccggcaaggggcccttcgacaacctgctgcagcacctgtccgacccatggcacaacaccatcatccagaccctgtcgggttgagtcgacggtccatcaggtcatgtggtccgagctgaaaggccgagactcgaagacagttcgtgtgatgcgttcttaatcgactgagggctaaggaatgtgacgtactggtatatgtacattagttgaagcggaggctataaagggtgtagagattgtttcatcagtatatatcatctgtcccgatgggttttgttttgtgcttttcacggttcatcattgtggaagcacatgtattattagtacaagaactgctagtagatatataggcttataattaagcacgacttct

SEQ ID NO: 89323 - DNA, 464 bp, Zea mays
  Clone ID: MRT4577_181461C.1
ccggccgggaatatccccaatatatccccactcttctgcctctctattttgcagtaccttgcgttctcgtacatctatccgatccgccgagtgacacaccaccattgccccgctgcaatcgaatcgatagtcgcccagggagagaagaagatgataaccgtcataagctccgatggacaggaggtcgaggagcaaggaggcggtggcgaatcgagtctcagaccatccgccacatgatcgaggatgactgcgccgacgacgatatccctcttcctaacgtcaactctcagatcctatcccaggtaatcgagtactgcaacaagcacgtacatgccgccgccgcctacgccggcgactcaaagatcgcttccaacgaggtgtttgccatctcagtcaacaggaccgccttctccggtgaggacctcaaaaactgggatgcgaactttcgcaaggtcaaccaggcc

SEQ ID NO: 89324 - DNA, 377 bp, Zea mays
  Clone ID: MRT4577_181462C.1
gaacgacccacgcgtggggaacagacatatgctgacgccttggccaaagttccggaccccgaagacagcactacccaggaggccgatggtccgcatgcgggggtgatactgattccgatatccgtacctcttatcagcactcatgatgctgcgctccaaccccatctgactcctcatcctacgatgcatctcatccagctctcactatctctgctattaacctaacgagcaggagccgacgataccacaagcccttagtcgaccaatacaacaacgcgcgcaacgctccatccttgtacaaggacgacactgacatcgtaacgaggatcatcggcgcaccttcttgccataacgtcatgaacctgcagatccgcgtc

SEQ ID NO: 89325 - DNA, 482 bp, Zea mays
  Clone ID: MRT4577_181463C.1
atcaggatcctagcgaccattcggacacagagagacaaaccgaacaggagtatgcagggacaaccatgcgacaaccgcgtctggtgtgcacggcagcggctccggtgtcctatgcgggaccagaagggtcggcctacagcccagacgcaagctgataatcgtgggccgcctgccaacggagatcctctggccggtgttctactgggagaactgctggggccgggggtagagagccgccacttcaggcatccctgctgaacatcctatggcggcgggcgagctcgcacctgcccataatggacatgtcgtccatggctgagtgcgaacgacacctagcgcaaggccaacgagataccatgagggcgagctaatgatcctgtctaatgagacggtgcagagcggtgcttcctagatccgcgaagacgctagtgcgacgaatgactcggcagggcgacggcaccacagctgcccctgccctcgct

SEQ ID NO: 89326 - DNA, 1912 bp, Zea mays
  Clone ID: MRT4577_181464C.1
gggtaccctcgggctggccgggacttcgtctccctgcaccgctcctcctcatcgtcgtctccccacctgacctgacccgaccgaaccgacccgaccactcctcccctgctcttccgccccaagcaagacccattaaaccccctcgccctctcctttcggggcggatctcgcctctcccccgtcccctgcctggaccctcccgatccgcctctcctcggattccgggtggttcccattccatcgacgtaccccctagtattcactgcttcggtgttgtgggctccgtagatcgacgtggcaccagaactatccgcgctagctgttgatttatgtcgcctgctctgctgccgctccatggttctgagctcacgtcgtcagcatcctcttcttgctcctttctccagcctgggcaggggggcgccagagactgcgggtttcgcttcaggatctcaggatttggatttggggtgaagtactctgggtttctacatttaggccctcgcttcctactttgccgcacctgagatagtaaaagagttcaagaatcccccccaaatcacagtcagtcttgggtctggtttgggtggatttcattacgtttcctccaagttcaaacagccagcaggatttccgagttgagtctgaagatcttcgcttttccggtttccatcagaagttagagagaacccctattctgatttgccagattccatctgtgctgcagttcttgcgcagttcaagagactgccccaactttatccaaaaagtttcctccgtctcatttgtggtcaatctggaagcggtgtgtcaagatgcggccctcggtgcagaaggtccgcattttctgttctgatcctgatgctactgactcatctgatgatgaagatggccagatcatcgcagtgaagaaaatggttatggagatactagtcccagtgacaaactcgaagacatctaatagtctgaagacccttgtgccgtgtggagcaaaggacctggaggtttcagagaagaagggtgaatcaagcaggttccgtggcgtgcgcaagcgacgctggggtcgatcggaagccgagattcgtgatcctgtagagaaaaaccaggaagtggattggctcgtatgactctgaggaggctgctgctggggcatatcaggcgtatgcaaaacagatccgtgaagagttgctagccatcaagaaccaacggtctgtatcagaacgtgcagctctatcaagttcatcctcggtttcttgcgtatcttcgtctcccccatgtgagcagacagggcatgaaccgcagactagagtgctcgtggagaaagatcctgagcctgtagatgaagtctttctgaacttctctctcacacccaaggggatttcaatggacgatttgttaggacggatagatgagattcctgtttgtgacgaccctgtcagcccaactgatgagcttccacttgacaatttcacgagcctggaagatgcattcccgatcagcgatttcatcggttcaagagatgagcatctgtatgagcactatattggcctggctgacattagccacctgcctcttccaatggatgatccagctttcaatctggatgcagagcttgattggagtgggtttgacttcgctgcgattgaaggtgaacttgatgtcctttgaggctgcaatcagtgatgtgttatactgaaacctgcacttgcttatgttgtattcagctgaaagctcctctctatgttttttatatttgtcagaatacaacaatgaatacggattcaggtttcagtccatctatgtcagaatacatgagcacagtttccttcattttgttcttagaaaaactgatgcacatatgggtgcagtctatctctaacaaggagttcgcatttttaatacattttcagtagat

SEQ ID NO: 89327 - DNA, 171 bp, Zea mays
  Clone ID: MRT4577_181465C.1
gcgagacctgttatcagcgttaacgacctgtatgaaggcgtgggcgaacctaccccggaacaagcacgtgaagttcctcgcccgatctggcgcaccagcgctcgactcgactcgtctcacggacaagggctgggcgtgcgctcgaagggttcgctctcctgccgacgacct

SEQ ID NO: 89328 - DNA, 193 bp, Zea mays
  Clone ID: MRT4577_181466C.1
atcthagackgtagcaaaamrggcaatacatctagraaaaawcaaaaamaattttataattcaagaactgaacggargtaactaggaaatgtgttttctaaggaaaaatgtacggtagaaacsggtagcaacggtactaatcracavccttkgsgggagggrsgagacacacgwtcawtctgaagcctcgtgc

SEQ ID NO: 89329 - DNA, 379 bp, Zea mays
  Clone ID: MRT4577_181467C.1
atcgtgatccccaatgtcgacatggtaatgtgaatcggctgaccatatgccaagctagttgccctccgcatccacgcctctcctggagactaacgggccctgtcgaagaagtcgcccatacatcaagaacgctgataaggtcaaccatgtttccgcaccgaaggaggccgcggaacaacccccctacactacgacgatatgcagatggaatccttgacctcaacaacagaaagtgacccaactctgggtccctccaccagtagcaccatatgaagaattgcgccaaactccccaacatcttgcccaagtagatcactgtgcggatacagaacctcacatgccgcggcaagcatgaaaaaggagtaaacctctttaaaaa

SEQ ID NO: 89330 - DNA, 192 bp, Zea mays
  Clone ID: MRT4577_181468C.1
cttttattttttttttttttttgaggacacatttaaaggtttctgggttattccccgaccaaaaaagttttttcacaggagtacattacaaatgctccttttctgcattctcactcccatctccaatctatccctccagcgcgtttcttacagcagatcccctaatcacaatataataccaactaccttctc

SEQ ID NO: 89331 - DNA, 467 bp, Zea mays
  Clone ID: MRT4577_181469C.1
ttggatctttaaaggccgccctttttttttttttttttttttttttttttttttttttttttttttttttttttggggtgacaggttttgttggtccaaaacaggtgatgggaatacaaagggtcataaaaagggttgttggaacttttagggcagctttttacagttcattcttgggggacaaatggtcaaggaacaacattccagacttcccattttgggcccgaacgctcgactttcttttaagcgggttttaccattccaaggtttcacgatccattgttgcaataccattgtaggttcttgttttgttgacgcaaacccagccgattttttttacagacccatcgttgatgggtgctttttttagggtcaccaccatttcagaccttttgttgtacccttttttcgggtgatcagccttttgggttccctttactgttttgtggtcaccaccttttttccaa

SEQ ID NO: 89332 - DNA, 354 bp, Zea mays
  unsure (1)..(354): unsure at all n locations
  Clone ID: MRT4577_18146C.1
gcccgacggcgnccagaggggccagaaagggagacaccacacgcaaagaagaaggcaacaaccgaaggcccgaagcgagagcacggcaaagaaagncncacaggggggggggcagancaanccagcaagcccnncnaccaggccccgnggacaacaacanacccggccaacggccaggccanggaacggggacggcaagaccgagggcacaacaggccgcaaaaacaagggcgccaccaaccccaacaacagngagcccgggaccaaacgcgaggaccccgcggacaacacggggaggaacggcaacaaagacaagngacagccaagaaaagagaaaaaaaggagagcgacccg

SEQ ID NO: 89333 - DNA, 595 bp, Zea mays
  Clone ID: MRT4577_181470C.1
aatatgtaaacactatttttgatagttttacatacacattatatgttgttgtttttcttgtttaagggcgaaaaacaagggaaagaagaaaaagaaaaacctgcaaaattcgcaagatagcaaacgcggaccacaaggggcgcagggaaaaagggccggccgcacacagaaaagaaagaaccaaaaccgaaaactccggaaaagaaatcgggggcccaaaaagggggagagaaaaaaggagcaccagggccccaaaaaaaaaagagacaaccgccgcaaacccagaaaagaaacagggggggcaccgggaggggagccagaggaaaaaaccgagggaaggaaaaagccagtaacgggggggaaaaacaaagaaagcgagggggggcaaacccccccccccccaaaaaaggaatccagggggccaccgggccaacacaaagaggggggggaggcgctgagcaagaaaaaaaagaaacccccggcccggagggagaggacagccaagccacccccggaaaccaaaaaaaggggggaggggccgggggtagcaaaaaaacaagaagggctgaaagagggcactcccccgccccccccc

SEQ ID NO: 89334 - DNA, 329 bp, Zea mays
  unsure (1)..(329): unsure at all n locations
  Clone ID: MRT4577_181471C.1
tgaacaaccaacccaccagagacgggattgactgtatgtattacacanctaaagcaatcaacaaacggagcccacaagccgtgcgttattaccggcagaaggagtagcccatctctgaaccccaacagatagaatagccactcagcacagtcagagggatacaactgatcacctgacctaccatggggactgtgctaaaacacccattctgctggtccaataccaccatgcctacgtgaagcaaactactgcgctctactatgtttttcaggagaatctcgtaggcagctttcaacatgcactcctggcttttcagtgcttggatctct

SEQ ID NO: 89335 - DNA, 418 bp, Zea mays
  Clone ID: MRT4577_181472C.1
cctgaagctcccctgcgtgccgtcccatcttttctttgttgccgctcggcgcccagctccacgctgcttctagtaccgagctcgcccctctccctagctcctccctgcgcgcgccggctccagcttggccaccctcctgttgctcgccatggccgccaagctcggcctttgctccttccctgctcgcgccaccggccatctccagctctcccatgctgcccggctgtccttctctctctgctccagcgggtgacgacacctaccgctcctctccctggacgcctccatgggtttcgctggtagccgccccgtcgtgctcgtctctggtgcttgctccggctgcgggcgccgtcgagccgcgaccccaccgaggtttttcccatggccgtcgcaccttgccgagctcctcccctacgac

SEQ ID NO: 89336 - DNA, 560 bp, Zea mays
  Clone ID: MRT4577_181473C.1
ccggccggggccggctactctcagcggggccacttggagcaggcggcattcgctccgtactgctgctgatttggtgagcgcggggagccgcgggatgggagatctggtggaggcggcggctgtggcgtgatggtgagcccgggcggcccgtcgcgcgtagcggtgtggggcggcgttgccgggcccgggagcccgcgcgtctcttctgccgcgaccgctttcgcggcgctacggcgcgggtggcggtgggcgcactcgggcgcgccgacgctggagcgcgcggcccgcacgttcctcctggcctccgcggcgctcgtgctcgcctgcgcgctctacctctacgtgctccgctacgtcggccggggaggtcgcgccttcgccgccgcgggcttcgtcggtggctccggcctgggccttggcggcgaggcgtgcgatgtgttcgactgcgcatgagtaccccatgactccggacgacacccggtatacatcatatgccagtgcccgctctggtagcgcttacacaactgcctaaacatcgtactatacatactctgacaccc

SEQ ID NO: 89337 - DNA, 885 bp, Zea mays
  Clone ID: MRT4577_181474C.1
atggcggcggcgaacggagctgccggtgcggtgctgttcagcgaggaggacctgagggaggtgagtggggtgcgctggggagaggacttcgtggaggtgacgtgcggatgcaccagccaccgctacggcgacgccgtcggccgcctccgcgtctttgcgtcaggcgacctggagatcaactgcgagtgcacgcccggctgccgcgaagtgtctatcttgcaatatccgtgtatcagtgtgtgcctagagtactactgtaggaattttaatagtataatttggaaagcttgggcgccaccaaagtgcaaattcttcagttggcttgctgttcaaaatagagtttggacagcagacagcatccgcagtgagaagcgtgaagggattgcgaaccctcatcatcctcgtgtcttggacaatttgctaattattagatctagtgcattcaaacatggccttaacaccgcggacaagatgacacctgctgcctttgagaagcactccggaaaggagacagctggaaagtggaggaacaccgtctgggtaatggtccagggggaaaaagtgccactgtcaaagacggctctgctcaaatactactacctggcgcacaagtcaggcaacggttctcacaagggccgtaacggacgtccgtcccaccgcgacgagttcatctgctgcgcaggatgtggcaaggagaggaggtttcggctccggtcaaaggaagagtgccgtgtttaccatgacgctcttgccaaagctagctggacgtgtgcggatttgacaactgataggcaagaattctggctcagtcgtccagaattcggcgcctgggagcaacgtgggtgcaggcacctcctgcctggcgataaagcatacaggccctaa

SEQ ID NO: 89338 - DNA, 580 bp, Zea mays
  Clone ID: MRT4577_181475C.1
ttcgacggcctcgagtcgaccagatcagtttacatttgctcactctctcctccagctcaccgtactggaggagcaccttcatcatgatgtacaccgacgaggaacaagatccacatcattgatgaccttgtcacctgctaggataaggacgccttcgaccacactgtctttgatctggagaacgtgaacaagtagctcgctaacaaccactacgaccagcacgtctccaatgctttcctcaaggatgtcacggacaacatcaacgctggtgctgtgcacgtcatgtacctgctaggcaagactgtcaggaaaatctgtgcgcaactcattagggacatggacaacatgtcttctgagcacgcatgacgcatccgtgttgcaacttgctggatagagaggccacactgtaatgcatgaaatggactgcgccctcagagctaaactctaaatggtgctgaggatgccctagtgcactgttgattgtaacagcatgcaatagcgctgaatctacgaaaagaacgcatggatggtttcacagtactatccttgatagcttgaacccgcatgacaccatctgcgc

SEQ ID NO: 89339 - DNA, 4277 bp, Zea mays
  Clone ID: MRT4577_181476C.1
tagaccggaagaaatgtattttactcgcctagttttgcatgctttagattcatctcagctatcgtgggcctctgttgttttcgaactgttcatttgaatcaggccacggactggtaccatttgctacagttacagggaggcttccaggtcacctgtgacgacgaggaggagcgtgcaagccgcaaggtcctgcggggctgctcccgcgcgccgtcctgcacgggctgcatgaagtgcgtgtgcttcggctgcgagacctgccgcttcggtacctcgccggggggtagaggctcagaccctcatcaccaactcccctccatctcgctcccggtcctcactctcctctccgcctcctccctcctctccctttcgaaaccccatcttcgttggcgtagggctcgggggttggagtttgggctcgggggttagagtttggaggaagcattcgtgaagactctgtggcgacttctccagatcggcagatccgtctttctgggcgatttggagcgaagcccccaagtagtttgttacagaaagcagcggcttttgcgtcgctcctgcgtcagtgtacctgttgcgttcgtcgttcctggccccggccttcggatcatatatatccagctaggaaaaggggcactttgcatttattctttggccccttcggagatcgccctcgtcaagatttggtgggaacccaattcgctgggattccctgtggaaaggcgccgctttggttcctgtttccccacagctcccaactctctatatctcaatctcttgttcatctaccgtttcttgctttgacgcaaaccagatcaatctgtggccgttgtttccatcggagctgttgaggtttgtcttcttctcggccgaagacatggcggcggcgaacggagctgccggtgcggtgctgttcagcgaggaggacctgagggaggtgagtggggtgcgctggggagaggacttcgtggaggtgacgtgcggatgcaccagccaccgctacggcgacgccgtcggccgcctccgcgtctttgcgtcaggcgacctggagatcaactgcgagtgcacgcccggctgccgcgaagacaagatgacacctgctgcctttgagaagcactccggaaaggagacagctggaaagtggaggaacaccgtctgggtaatggtccagggggaaaaagtgccactgtcaaagacggctctgctcaaatactactacctggcgcacaagtcaggcaacggttctcacaagggccgtaacggacgtccgtcccaccgcgacgagttcatctgctgcgcaggatgtggcaaggagaggaggtttcggctccggtcaaaggaagagtgccgtgtttaccatgacgctcttgccaaagctagctggacgtgtgcggatttgacaactgatagggtcacctgtgacgacgaggaggagcgtgcaagccgcaaggtcctgcggggctgctcccgcgcgccgtcctgcacgggctgcatgaagtgcgtgtgcttcggctgcgagacctgccgtaaaaaaaaaaaaaaaaaaaaaaaaaaaaaaaaaaaaaaaaaaaaaaaaaaaaaaaaaaaaaaaaaaaaaaaaaaaaaaaaaaggaggggacgggcaccgcacacggacgcctcggccgcctccgcgtttttgcgtcaggcctaaatcacttcaagggctcgcccggctgccgcaaaaacaaaatgacacctgcgttgactttgaaaagcactccgaaaaggaataatacaggtgaaaagggctaaaacaacttgttggaaacggcccaggggcaaaaagggccaatgccaaaaacggtactgcacaaatactattacccggcgcacaagtcaggaaacggttctcacaagggccgaaacggacgtccgtcccaccgcgacaagttcttctgctgcccaggatgtggaaaggaaaggaggtttcggctccggccaaaggaaaagggccgggtttaccatgacgctcttgccaaagttagttgaacttgggcggatttgacaccgccgccctcatcactgccgacctgccgtccgctcagccggccaggcggccagccgctgtcccgcctgtccgctttggttcctgtttccccacagctcccaactctctatatctcaatctcttgttcatctaccgtttcttgctttgacgcaaaccagatcaatctgtggccgttgtttccatcggagctgttgaggtttgtcttcttctcggccgaagacatggcggcggcgaacggagctgccggtgcggtgctgttcagcgaggaggacctgagggaggtgagtggggtgcgctggggagaggacttcgtggaggtgacgtgcggatgcaccagccaccgctacggcgacgccgtcggccgcctccgcgtctttgcgtcaggcgacctggagatcaactgcgagtgcacgcccggctgccgcgaaggtccgtcccaggcccagccaccacttccatccctttgcttctctcttcgctcttgatttcatgtccgtgcatcgatgtgcttatggtgtctggtctctgggtcacgatgtcttgaccccgcagatgaacatgcatgcaatgtcagtgcacgcgccacggcgcctcttgtggccggcatggcctgcttctagtgcttggcaccatgctgcatcccatgcatccctgctctggcctagcttgtgtctgttgcctgttgatttttgccaatgccttctctgcaatctgaatgtttggatgggccaaacttgttgggttggtggtcatgcgcccccccctgggagtaattaatatcacttgtatcattcattatgcataactgacctttcatgttgttgtcttggcacacccctctagcactagcacatgcaagcattttgtcctagatacctaatgcacgtcgattcattctgtgagtcctttttgcatgctggtggtcgtgggatttgcccctccctctgttcagtcgtggtgtccatccagcagtacaacaaattataacgtctctgttcatgttcaggccttcgtttgcatggattaggacctgttcccgtttagagttgcatgctgctgtcttttgtagataggtaaagcggaagtggcccttttgatcttaaacatcggatacttgtttgctacgagtgggttgtgaagacacttgtctctgctctgtaatagtacctggtagccttaatagttcatctctgatatcgtcgatgacatttttctacttctaatctgcagtgtctatcttgcaatatccgtgtatcagtgtgtgcctagagtactactgtaggtgacatactgacatagatagcataagttatctgtgagttttactgcataccatatacattggcatgcaggaattttaatagtataatttggaaagcttgggcgccaccaaagtgcaaattcttcagttggcttgctgttcaaaatagagtttggacagcagacaggttggcaagaaggggatggcctcataatccgcgctgtgtcctatgcgcctcatgcccagaatctggactacatctttttgctgaatgttgcttcaccagacatatttgggctgatttgagtatttgggctgcaattacggagatccaccattcttcttggcaacctgtagattcggtgcaccaatggtggtcgaatcttgcagcatccgcagtgagaagcgtgaagggattgcgaagcccgatcatcctcgtgtcttggacaatttggtgtgagagaaactcacgaatctttgagcacaaagagaagaccgtgacacagactatagcgatcattaaggagcaaatccgcctgtggattctaggaggagcaaaacacttagcaaggctgttgtaggttttagggaaggggaggggttggttttgaaacatttgtgtcaccatacttaatgtctccttcactagtgtgatgtacttgtatattttagtcctcgctgcttcaccttctttttaatataacagacaattctcttgccagatttttttttaaaaaagaaggcaggaacgtgatactgcccagaggggccagggactccttttagctagcctaaatgcgtgtcactctccttgctgtagctgattgcagcttccatgtgttcctgattgctaaatgctaactaacatatgcgtgcaaccaccagcaagggccagatatatacttatttttcttgactctttccctagctagtaccaataatcacgcacattgtcatattaattatacatccggcctgtggaccacg

SEQ ID NO: 89340 - DNA, 282 bp, Zea mays
  Clone ID: MRT4577_181477C.1
tatatttttttttttttttttttttttttttttttttttttataaatttttgggttaatttcatttgtttttcataatccccaatgtccacaacagccgaaagaaaaaaacacagacacatgagaaatgacacacgacctctaaattttataaagaaatacgggaaggacttttaaaaaccgaaaaaaacctttttgaccacgcttaccaacatgcaaagagcgcggcttccaaggaagaaaccgacagggggggtaccaaaggggttaaaacgaacaaaaa

SEQ ID NO: 89341 - DNA, 398 bp, Zea mays
  unsure (1)..(398): unsure at all n locations
  Clone ID: MRT4577_181478C.1
tgacttatttaagttggattatataatctatagagtaaacaaacagggccttagtctaagaaaaaggtagaatcttgacagtacatgacagcagaatcacaagctagggggggtagctatgaaaatcctattaccacatgaacagatgcaatgacatacaaaggacaaaacaatttggtgcctacatagtaaatacttttgatcgtctcactcattttacactcaagccatcaataaaatcgctatcatgctctttctaccatactcttatgccagtattgctgtaaactgcgatttcatcagcctgaaagaaattaaaaaaaactgtaattcctggcangtacctggtggtggcactgctgcacctcccatgctacggnctgttcgccctggtgctg

SEQ ID NO: 89342 - DNA, 308 bp, Zea mays
  Clone ID: MRT4577_181479C.1
aacaatatatcggtatcttgggacaacaatgggtgtgagccaaaaccacgctgattcttctcaatgccatgcgccataaacccgagcaaccaaagctaacaagtcgggtaccaacacctaaaccaaagggagaacggacactaacacggcgaccgaagcgaacgggaacaccatactatacactgataagataacaaagcccaagcctcgaaggggccacaaaatagtggctctagacgcctcccccgtgggcggaaggggcacccccacccttgcgccgcccctcgggaacaacaaggccctcctat

SEQ ID NO: 89343 - DNA, 387 bp, Zea mays
  Clone ID: MRT4577_18147C.1
tgaattccgttgctgtcggtctgtgtgaaatgaatcagctgttgacgactgtaaacagtcagtgatcatgcggtaatcaagaagaaatgaaattggatttgttgtatgtatgtaggagtgataatggaccgtgatccaaatgattctttacaaaatggtaaggctctaaataaatgttagttcaaaaatgaatagaaatatgaccgatcctaatctgatccgatccttaaatcttatagtttaaattttatagagtaaaatttagagtccattgtcacgcatatatgcatgttgaggaggaatgagactagtagcagcatgatgccttttattctgtattcatgactcacgtcatattatgtcaaaaaggaaaaagctaaaattcaa

SEQ ID NO: 89344 - DNA, 587 bp, Zea mays
  Clone ID: MRT4577_181480C.1
tttttcattggtgatcgattcttttattcacatagcagtcctttctagctgactgaaagcaccaagttcacttctcctggccactcagtgttttgtgttttgatatcatcgtgcatatgccagttggtcttccgtgatttcccgccgattctcaagaaatatgtgtcgataacatgtatacggtaagggtatttgtgtccgttcaatatgtagagcctacagtatagaccagtatagttacaagcgcatcccctgcgcacatgttatacagaaatttgctggtatatcgctgggtgtctccaagtctatgcttgtttacgtccagcgtcaaggtgtcgtggaaaagttcatgatcgcaggaagggtcgttgcttagaagagcttcgagacgtattcgacgagatgaggtgagaaataaagcacaacagcgctggctgctgtccacttgatatcggtcatagtctgtgcttcggccgcagcaagctcctgcttggatggttggggtggtgctccaaacattttcgttatgtcttgtatgatctgtgcggtgaatcacaagaagggttgtagtggtgcggacgcgtggg

SEQ ID NO: 89345 - DNA, 2232 bp, Zea mays
  Clone ID: MRT4577_181482C.1
cggccgggtgcacaaaatacctcaggcagtgtgtttgaggcacaggatggtagcgtcgaggtaactggttcaccaacagaaaaggctatcctatcttggggtcttgatcatcgtatgaaatttgctgatgagagatcacgatcttctataattcatgtctctcctttcaactccgaaaaaaagcacgctggggttgcagtggttgcgagagattcaaatgttcatgtacactggaaaggagctgctgaaattgttcttgccttgtgcacaagttggctcaatgtggatggctcaacacatgaaatgacacctgataaggctaatcaactcaagaaacttatagaagatatggctgagcaaagtcttcgatgtattgcttttgcttatcgaaatcttgatctgaaggatgttccaagtgaggagcaaagaatcaactggcaattgccagataatgaattgactcttattggaatcatagggatgaaggatccttgtcgccctgaagtaagagatgctgtcgaactgtgcaaaaaggctggtgttaaggtacgaatggtaactggagataatctgaagacagctaaagcaatagctcttgagtgtggaatactcgatgactcagaggcatctgcacaagctataatagagggaagagttttccgtgcttacgatgatactgaaagggagaatgttgctgacaagatttctgtgatggcacgatcttctcctaatgacaaacttctcctagtaaaagctcttaagaaaataggccatgttgtagctgttactggtgatggaacgaatgatgctcctgcattgcatgaggcagatattggtctttctatgggcatccaaggaacagaagtagccaaagagagctcagacataataattctggatgacaatttttcttctgttgtgaaggtggttcgctggggtcgctctgtttatgcaaatatccaaaagtttattcagttccagcttaccgtaaatgttgcagctcttgtcatcaatgttgttgctgctgtttcctcaggaaatgttcctctaaatgctgttcagcttctctgggttaatctcatcatggacacactcggtgctcttgctttggctactgaaccaccaacagatcaacttatgaggcggccaccagttggacggagagaacctcttgtgactaatatcatgtggagaaacttgtttattcaggctgtctttcaagttgctgttcttctgactctcaactttaggggtcgggatcttttgcatttgactcatgacacactaggacactctagtaaagtgaaaaatacacttatattcaacacatttgtattgtgccaggtgtttaatgaggtcaattctcgtaaaccagaagaactgaacatcttttccggagtttcaagaaatcatcttttcttggcagtagtgagcataactgttgtgatgcaggtgataattattgagttcctcgggaaatttacatcaacagtgagactcaactggaagctttggcttgtttctgtagttattgcttttctaagttggcccttggcttttgttggaaaattcattccagttccgaggactgaattgaaggatctcattgtaaggtgttggcctaaacgtggcgagagtgcagcacaacagactcaggatgacagaatggaagtaccagtgtgaagctgttcttgagcaacttctcgaaattatcaggtgttagtgttggtgcacatagatggtgttggctaattttgggtgctgatttttctaaccatcctaccttgttgcctggctatgaattctatggctgtagtcagcaatcggggaggtaaacctctgctgactcgtgatctagaatttgaacactgtaaacaaaatatgtttattgtagcctaacgaaggtcaggacctccagtggtttattgcacaagttgtgcagtcggtcccagaatcatttggggaaggcgctataaacagttttttcttggcaggagtggagtgtagctctttttcgctaatatcatttttacttttagatgcaatcaagaacattttgtcaaaccctctaatagtaattggctgattttgttaaaaaaaaaaaaaaagggcggcccacgcgtccgcttcttgatattttgccaaggccaaaagcaatattattgagggtttataatttgatttttttaacattcatctcgatgcacatttatatatataaagtgttacagt

SEQ ID NO: 89346 - DNA, 538 bp, Zea mays
  Clone ID: MRT4577_181483C.1
atcatcatcgtcgcgttgccttcttcccacctcccaaaaaccctacaccccgcgacgaccaaccggcggccgccatgctcctccggcgaccacttcagacgctcaccctccccctcctccgccggcacttctccgcctccgccgcagcggtttccgccccagatcacaacatcgacgaactcctgtcgccgccgttcgactacctccctggtcacccgcggccggacgcgaagcacgacgaggtgatcttcgccgtgccgagggactcctctggccggcacttcgcggccaaggaacgcaaggctgggcgtgtgccggccatcgtcttcgagcaggagaatggccaagagggcggtaacaagcgcctcgtctcggtgccgtccaagcagatccgcaagctcgtcgaccacctcggacggtccttcttcctctcccgcctcttccgtctccaggtttggtccgagcaggccgggcagggggacctcatcgagagcgtccgcgtcctgccgcgcaaggtgcacttgcacgcaggcactga

SEQ ID NO: 89347 - DNA, 290 bp, Zea mays
  Clone ID: MRT4577_181484C.1
cccacgcgtccgccgcagcattttataataggccgccgccgcgaccaagggtcgatggatccgattatgggggaggtgacccaaatgttctcccgctttaaggcggtctacacccgcatcgaccttgacgcctgcgtcaccctccttttacagcttaaggtccatctcaccaaattacccagcctttccgcctgatttgagcatacacctaacgctgtcgcggagcttaaacttgctagggacatttatgtgcatgcttgttgttatgatcgttaattttttcttcctag

SEQ ID NO: 89348 - DNA, 401 bp, Zea mays
  Clone ID: MRT4577_181485C.1
gcctgcaggtaccggtccggaattaattcccgggtcgacgagctcactagtcggcggccgccctttttttttttttttttttttttttttttttttttttttttttttttttttttttttttgggaaagaacccacggaaacggggcttcttgtgggttagggccgccttctcgccggggtggtccaaaaaccaaaccctccggccgagaggggggggccctcgaaactgaaaaagtttttcttgggggcctttgtggggtggccttttcaaaacacacagcagcagactgaacccttaccctacctacggggttttacctgtgcatgggggaccttggcaaccaaacctttttcagagcacacactttgtgaacaaattcggacagattagccccctggg

SEQ ID NO: 89349 - DNA, 302 bp, Zea mays
  Clone ID: MRT4577_181486C.1
taccctcggagctggccggggaaaaaaaaaaaaaaaaaaaaaaaaaagcggtactcaaatcatagagtcgtgccagtccaggtccaccagcaggctcagccggctcgcactctgagctaagagccggcctgtaagcaacagccgacaggagcgtcacatactggatgtcccttcgctccagtcaatcgcgcggaaagcacacacacacgccacatagacgcatctctcaggtaccgcaagttccacatggccacagcaggcacaagtggggagggggcactctccctgtgaggtccacaggc

SEQ ID NO: 89350 - DNA, 219 bp, Zea mays
  Clone ID: MRT4577_181487C.1
ccgacgcgtgggccgaagcctcacgagcgcagagcggagattgcagcgactcctcctccctgcgggcgatatacgctcatcgatgccgtctatcacacacctatcattaccgctcctcttcctctcctatgctatgctctctaactcattgtcaaaatagaaaaaaaaagtccttgttgagatagatgtatccggattctgcgaggtgacctggtactg

SEQ ID NO: 89351 - DNA, 216 bp, Zea mays
  unsure (1)..(216): unsure at all n locations
  Clone ID: MRT4577_181488C.1
cccacgcgttcgtcgaggagctaacacacagagagtaaaggacggcagaagccgagtacgacgagagaatttcgggtcccgacaccaaaaacatacctagaccgtgctcatatcgaatacgccaaacgcacactcacgcgatncatcatctcgccaagacaactctgccgagaaactcangcggagcgccatctggtaccacactatcaagcataa

SEQ ID NO: 89352 - DNA, 452 bp, Zea mays
  Clone ID: MRT4577_181489C.1
gcggccgggccgacgggcacaagctttatactttttttttttctgttgcttttttttatgcatattctgtttgttttctgtttctttttgactaattttgctttgcttttttattgtgatggttttgttcagttggccgtctttttccgtggaggcttggcggacgaagcacatagtcctgccggcttatttggtcgtgagggcagaccaacctaagggggatgggagcacttccggccttaatactaatgaccaactctgtgttcttttcaccaggccacttcaagaacactttgtgaccagaacttaggcatgtgccaaacttccggaattttataaatttctgttgccaagcctgcacacatagtgctgttaaatacctttggaaatgggttgggcataagcaatgactattgagtatgaatgaacatgacggacctttgatcaggatt

SEQ ID NO: 89353 - DNA, 295 bp, Zea mays
  Clone ID: MRT4577_18148C.1
acgagggcacgggttttttttttttcttttattgtatcatgtttttgtgttttttttgtattgtgttctttgaaaccgttgagcacccgttcttggcgcataataatagtgtttcgtgagagcacctatagggggtgggtgaataggtgatcccaaaaaacttggagcttaatgccacaaaatttgattaggagttagcagaggggggggaagtggctagagaggagttgttgcatggtacgataaccacaagaagatcaagcatggatagacacagtggtgtatgcggagaggg

SEQ ID NO: 89354 - DNA, 840 bp, Zea mays
  Clone ID: MRT4577_181490C.1
aaaggggccctttttccccttgaaaaggcccccaaaaaaggggggaaaaaaattggggggaattcggggaaattttccctcggggggaaaatttcccaatttccccattttcaagaaataaggaggcaaaaatgttcatatatgaattggaattatttgttttcttattaggcctatcctgaagccaaaggaaatgagataggatcccctcggggaattccaattccacattttcaagaaataaggaggcaaaaatgttcatatatgaattggaattatttgttttcttattaggcctatcctgaagccaaaggaaatgagatcggaattcctcggggaattccaattccacattttcaagaaataaggaggcaaaaatgttcatatatgaattggaattatttgttttcttattaggcctatcctgaagccaaaggaaatgagatcggaattcctcggggaattccaattccacattttcaagaaataaggaggcaaaaatgttcatatatgaattggaattatttgttttcttattaggcctatcctgaagccaaaggaaatgagatcggaattcctcggggaattccaattccacattttcaagaaataaggaggcaaaaatgttcatatatgaattggaattatttgttttcttattaggcctatcctgaagccaaaggaaaggaattccaattccacattttcaagaaataaggaggcaaaaatgttcatatatgaattggaattatttgttttcttattaggcctatcctgaagccaaaggaaatgagatcggaattcctcgggggtaccgagctcgaatccaatatagtgagt

SEQ ID NO: 89355 - DNA, 383 bp, Zea mays
  Clone ID: MRT4577_181491C.1
attcggctcgagattgacccccatactatatctatcgaaccactggtgcacgctgtgtagagcaaaagggaatgtgcaggggggagaccggactcaaaatacgcgtgtgttagggctgtaatggggcacaatcaacttatgctgggcaaacatgaggacattgacaatgacgatggggggataaaagtctaccgtgagaattacctaaaattctacaatgctataagagaggcctatgcagacattcacataatttgaaactgtgatggtctatctagaccacttgaccatgctgactatttgtatgattaccatgactatactgattataacacttcgtttaacatgacgagcacatttcacagaacataacgtcgtgtacc

SEQ ID NO: 89356 - DNA, 761 bp, Zea mays
  unsure (1)..(761): unsure at all n locations
  Clone ID: MRT4577_181492C.1
tctcggtgaatttcaatttcacattttcaagaaataagggggcggaaatgttcatatatgaattggaattatctgttttcttattaggcctatcctgaagccaaaggaaatgagatcggaattcctcggtgaatcgcaattccacattttcaagaaataaggaggcaaaaatgttcatatatgaattggaattatttgatatcttattaggcctatcctgaagccaaaggaaatgagatcggaattcctcggtgaattccaattccacattttcaagaaataaggaggcaaaaatgttcatatatgaattgtaattatttgatttcttattaggcctatcctgaagccaaaggaaatgagatcggaattcctcggcgaattccaattacacattttcaagaaataagggagcaaaaatgttcatatatgaattgcaattattcgttttcttattaggcctatcctgaagccaatggaaacgagatcggaattcctcggggaattccaattccacattttcaagaaataaggaggcaaaaatgttcatatatgaattggaattatttgttttcttattaggcctatcctgaaaccaaaagaaatgagatcggaattccctcgggggattccaattccacattttcaagaaataaggaagcaaaaatgttcatatatgaatcgcagttatttgttcacttattaagcctatcctgaagccaaatgaaatgaaatcggaattcctcggngagaccgagctcgaa

SEQ ID NO: 89357 - DNA, 268 bp, Zea mays
  Clone ID: MRT4577_181493C.1
gggttcagcttgtattcccactctgtcgcacagcgacggccgtcgtcgctgagatcgcggggaagaaatggagctttctagcaagctcttcacggccggcctcctctgcatgctgctgatgctgtccgcagatgtcccgccggcggccgatgcggaggctccgacgtgccagtcgcagaaccacaagttgcagggcccgtgactccgcactgacatatgggccatcagctgcaggaacgaggggttatcctgcggcatgtgccgcggc

SEQ ID NO: 89358 - DNA, 374 bp, Zea mays
  Clone ID: MRT4577_181494C.1
tgtctccggtcgcctgccaggaccggcgaggtctcaaggggagagcaagaactggtacttcttcagcctcgtgaagcccaagagcgcccagaatagccgcaagtctcggaccgtcggaggaggcaagggcacatggaaacaagagcgagggaatgacgtcgtcgacgccgagggccacgccgtcggccgcttcgagaagttcacctacacacccaatcccaaggaagacaagaagccgccggagtggctcatgatggagttcagcgtcggtcaggaagacggcggtcagccgaggccggttctttgcctctgcaagatctaccagagcccgcgattcctccgcgtccgcgcgcaagaggaagacgccggacgac

SEQ ID NO: 89359 - DNA, 534 bp, Zea mays
  Clone ID: MRT4577_181495C.1
tcgagtttttttttttttttttttttttttttttaaatgacgttttctaccaaaacttggtggggcggggggggggtatattttaaagagcctccgaggaaaacctttgagccaattgcacggattccgcgggagccttcccttacactactgaggttcccgctacctaatatgggccgttcaggggaggaaaaccgaatccctccacagcctgaagagagcccggggggcgggcaaaacttaatggcttccgaactgggtatcttcaccggcctgaggttgcatcccaggttcttgaacttgggggtcgtcattggggcggggagcaacgtgctccttatgccctccttgataatgcatggggaatcatcagggaacatccaatgggtcagttccacagggcccctcacactaaacaaatgttgggggcacatgtcgcctggggggggctccagggggggcaaccacgacctggacaccctaacccgtgtgcttgacaaagactatgctccaggggttggacctctttggggc

SEQ ID NO: 89360 - DNA, 336 bp, Zea mays
  Clone ID: MRT4577_181496C.1
ctttcacagagtcccccgcgcgcactctctctaccttatcgtgccgacgactggcagatctccgcgccccgttcgcaaaccccttgtctcgggccattcacctcagagtaccaggcaccgggaaccgttgcgacgagtgatgcaataactagacttgctgtatggtacggtgagattgagtcgaggccctatgctctaccgaggatcttattgggacggatcactatatctgagagttctgtgatatgcctcgcctagttcgatatttagctgagaatcctaaatgccgagaagaactaggccttgatccggaacggacgaggtttttattttttt

SEQ ID NO: 89361 - DNA, 809 bp, Zea mays
  Clone ID: MRT4577_181497C.1
ttgggtacctcgaggccggccggggcgaatgtcgcagtccccgcccgccctcccgacatcgacgccttcctccctcgcgtgccatgccccgttctcccgacatcgacgtcgggtccctgcctcgtctggtcctctcggtgtgggaaggaaccaaaccgagacggaggcagagtacgacgcctgccttccctcttccgccgagcgcccgctgcgtcattcttgtccctcctcttcatcttcatcggccaaccgattgccactgactccggccatcggcgactgtccctcgcgcatccctcctcctcgtgatgcccgctcccccaaggacctgtgcctgcggcagcgggaggagatcaggacgctcaaatatgtcgtcctgttcctgcacgtggagccggagccagagttcgaccgccgccttcggggcgatatttccatgctcaccgaccagatccagtgcctcacgcaggagctcgccgcccaggttaaggccgagaagcactcggcaaggtcgtgctttgacgaggatggatactgctcttcccctaggacgtcggggtttaacgaggataccgctttctctctggtgtgttcgattactccaccatctcactctcacagcaaaacgattggcatgtcgatacgctgtttccaaaacgattggcccccgtgtacctctccgccgttctcgagtatcgcaccgccgaggtgttggagctggccgggaacgctgctcgtgacaacaagaaccgtatcgtgctgcgccacatccagctggtggtgcggaacgacgaggagctgagggttcg

SEQ ID NO: 89362 - DNA, 577 bp, Zea mays
  Clone ID: MRT4577_181498C.1
ttcgccggatccgcccacccgcgcgccgcagtccccgccgcgtatgccgcagtccccgcccgccctcccgacatcgacgccttcctccctcgcgtgccacgccccgttctcccgacatcgacgtcgggtccctgcctcgtctggtcctctcggtgtgggaaggaaccaaaccgagacggaggcagagtacgacgcctgccttccctcttccgccgagcgcccgctgcgtcattcttgtccctcctcttcatcttcatcggccaaccgattgccactgactccggccatcggcgactgtccctcggtttttctttaacgatttccgatttgattccatggccggctggaccgattccagcgcatccctcctcctcgtgatgcccgctcccccaaggacctgtgcctgcggcagcgggaggagatcaggacgctcaaatatgtcgtcctgttcctgcacgtggagccggagtcagagctcgatcgccgccttcggggcgctttttccatgcttaccgtccagctccttcgcctcaccgctgcgcctcgcgtccagcttaagcgccgcgccgttctcggc

SEQ ID NO: 89363 - DNA, 390 bp, Zea mays
  Clone ID: MRT4577_181499C.1
atttcgggtcgaggacgcgtgcggcagcttctgcttgctctggggggaaggatttagagtgagagcgagagagagatctagtagagagggtagtatgtggtcgtcgaacgagacatgttggcggtgttcagcgggcaggtggtggaggtgccggcggagctggtggcggctgtcagccggacgccgtcgcccaagacgaatgcgtcgcatctggtggggcgcttcctggccgcgtccgaaccggtcgtgttcgtgcagcttggcgaccaccggcacctcgtctactcccacaccaaccatgcgctccttcgtcccatgtcgttcgcggtcaaggacgatgtgttctgccttgtcgagggggtgctggacaaccttggtcgtttgatccag

SEQ ID NO: 89364 - DNA, 433 bp, Zea mays
  unsure (1)..(433): unsure at all n locations
  Clone ID: MRT4577_1814C.1
acgcgtgctgctacgcgggcgcagccaacacacacagagagaggacaactcaacacacctatcccttcccacaacgaggggcaaagagggatagcgagtgacataagcagaatatacagtcggacaacacaagaaaacatgctcaacaaccactctaatgaaggcacctgcacgggtgagggggaatacttgagccccactttctatgaagataacggtagcctctagcgggagttcctgctccggacccattaaatgggtgggatgactctggaacaggggtgcgcgtttgctacctgcatactagagctacggcttagcctatcttacagctagcacgtcgacttgaaggcttccanccggctgaatgcgcggttgctcaagccagcgccacgcggtggatcttttacggactaatcaagtccaacgagag

SEQ ID NO: 89365 - DNA, 359 bp, Zea mays
  Clone ID: MRT4577_181500C.1
ttttttttttttttttttttttttttttttttttgtttttggtttttttttttttttttttaaaaattccaacgtttttgaacaggctagttttacttccgtttttaacactgccaacacggttttttggaaccaagggcccccacaaatcctcccaacctttcttatagtcctttaccccaatccactaacacaaacctttccattattccgggaggggaagcttgcaaaaaagtcaaaggaaaattccgggcccttttttgccacgagccaaaaaactcccgacaagactaagcaagcggcctttacaagggatctttggaattcccggcacaccaaaaaaacaaacttgttgtttt

SEQ ID NO: 89366 - DNA, 577 bp, Zea mays
  unsure (1)..(577): unsure at all n locations
  Clone ID: MRT4577_181501C.1
gtggctggtcgagctgcccggcgtgcgccgcgtcgtgcagccgccgtcgctccgctcgccgngagacaaggacgagtgacggtgatcgtgtacgttctgtgaccatgaatagcactagctgtatgagaccgaagttcctttagacatcgacacgattaataaaggactcaattatcttaaaaaaaaaaaaaaaaaaaaaaaaaaaaaaaaaaaaaaaaaaaaaaaaaaaaaaaaaaaaaaaaaaaaaaaaaaaaaaaaaaaaaaaaaaaaaaaaaaaaaaaaaaaaaaaaaaaaaaaaaaaaaaaaaaaaaaaaaaaaaaaaaaagggggggcccttttaaaaaaaaaaaaattttccacccccttctttgaaaagaaaatttttttttttggggccacaaaaataaaataaagggccggggttttaaaaccttgggaacggaaaaaacctggggttaccaaattaaaaacccttggaaaaaaacccttttttacccatgggggtaaaaaaaaaaaggccccacaccaatcccttttccaaaaatttcccaccccttaaggaaaatggaaccccccc

SEQ ID NO: 89367 - DNA, 535 bp, Zea mays
  Clone ID: MRT4577_181502C.1
ttaaccctctatttctactactgatgtgcgggggggggggggaacaagtacacatacatgatgagctcctgtttttacatatactgcgggctgacatcaattctggaagagcatgtaattcgtgcaaaagccttccactcactcaagcacagtactcttcatgagcctccattaggcgagcgggggggaaatgtccaacttaccggtccatagtgcaaaatcaacaatgatcaccaatcaacacgactacacacaagaaaccattcttggctatcattgcttcagcactagaaccattctccactgaagttccgggcacagactttgctcatctaccaccaccttggtgtgaacaagatcgactggaaccaccaaacctacagggtcattactccttgaaacaagctataaatctggaatcgcacaaaaagccagccttatatatatgatggcctatttctggaaataatactgatagcgaaccacttgcttccatgaccagcatgcactcaattactactctaatactactact

SEQ ID NO: 89368 - DNA, 497 bp, Zea mays
  Clone ID: MRT4577_181503C.1
gcaaacacttaagagccactgattacggtgacattactggaacacaccggagcccctggcacacattgtgggccctaaacctgtgtcacaactgaaggcgccagccatgaaacccttgttcgaatgaccttcaaggcaggaggcaatcatgcaacatgattacaacatatgctgccatctgacactgacttcgcactaccactccaaaacaaaagtggcacggacagaaatatgaccctagggtgtcagatccatgatggcagtgacaatgtccccattataagccttgtgggccttggcagccttgggccttgaaacagattcctgggtcatcaccagctcaatgctcttggccttaacaccagttccggcgaccatctcattattgtcctcctgtcccgggccaaacgtgtatggtattcaagatcatctggctcaaggcaagagccttgaactgctctgctgcctgggtatgcaattgggagctgaggacctac

SEQ ID NO: 89369 - DNA, 553 bp, Zea mays
  Clone ID: MRT4577_181504C.1
cggacgcgtgggcggacgcgtgggcggtcgcgtgggaaaaaaaaataaaaaaaaaaaaaaaaaaaaaaataaaaaaaaaaaaaaatagaaaaaaaaataaaaagatagaattaaaaaaaaaaaatgacgatccttctggaatcattaaaagaaaaaaatgatgctgcttacaaagccaccagaaatgtgtggggccgcagtttgctaacgcccaatttatacatatctgcttccgcgtgtcctgcttcttgtttctggttaccggtaaatccaccgtttggggcttcatttttggccgctggcagtgttaaaactgtgtcgcgcccccaatgagagattttggagtgtaccctttttacatgacagtgatcgttaacatagagcgcgagctgcgttcggtcctcaccagatttgcgacccttcttttggtttgtgctccacccttttcgcgtatttattaaaaccgctgcatctggggatcctgacagggatcctattaactgctccttaggcgcctgtccccgaacatttttgttggatgaatgatttcctg

SEQ ID NO: 89370 - DNA, 328 bp, Zea mays
  Clone ID: MRT4577_181505C.1
gtgggtaattacgaggggaacccacaaaaaaccccttgagaacaacatgctggcctgccgggaacccacatggctagaaaaccacaaataactggtggcgcatttttcttacacaaaggggggggcccgcacccatattgtgacctggatccctttgcgaccaacacttccaggtctttcaaggtcctgcgcataaggggggcaatcaggggggcagaccagattaaccaccaggccaccttctggcacgggcagtcctatggcggacagatgattcccaacaagaactcttaattcaccatccatgaaaattttgaaaactgttgac

SEQ ID NO: 89371 - DNA, 523 bp, Zea mays
  Clone ID: MRT4577_181506C.1
tttagaaaacagggtactaatcaggtctgaaaacatggcataacgctctgaacttgagacgactaaccaaaaaaagggtactcattaggacacacattttggggcaagacaatccatgagaatgctctaagctacagcgcttttgcccttcttcctttggagcttcttcatgtagaactcaagctctttaccctcaaggatgtacccatcagttcggccacactgtccagggcgggaagaaatgcatgccagcaaccgtccactgccaaattgctccttaatgggtgggtcaagggtacgtccctccttgcgctttttaagctttcttgggacatgggtgctttttttttggtttctcagctgttgccttaaccttttggtcctcaagattatccttttttgcaagaagggtttttttttttctaccaatgtcaactccatagtgagtggggtaccactgcttgaatggtgcagaattaactttgacaaaggcccttttaaaaggggttgggcctctaaagcc

SEQ ID NO: 89372 - DNA, 1323 bp, Zea mays
  Clone ID: MRT4577_181508C.1
gatgccttttttttttttttttttaaacaaaaatattgactgcattatgtagtttttgtgacttatttttttatgtggatagatacaaaacaaaattacaacctatatttagagaactattggagaactcacatttttttactccaaaagtcatttagcaacttcttaaatctacgatttagagagctaaaatttacacaactattggagttgctcttactgctttgctgagttacttgaaataaccgggctgcatgtttctggataagatgacatcactttgcaggcaatccaattagatatacatttgcctaactagtggcttgtaatttgcagtctgcgtgacgagcttgagcttgagcttgccaccatagatctccggcagctgggagtcgtcgatggcctcgcggagcgtcctgtccaggtccttgtccggcacgaagacgaacttcttcttggtgttgtcgtcgatgaaggggtagacgatcttccaggcggccatgaagacgtagggcacgtggacgaggaagacgcgggcgaggcgctccgggtagtagctctgcatgatgtcgagcgccgccaggtagcctcggatgtcgcagttggcgtagccccagccggcgaggtcggcgacggcggcgaacttctcctggcgagcatctcccggaggaggaggaggagggggcaggcgcgcgacggtggcgtcgaggacgtggacgacgtagcgcttgaactcgtcgaggtccctgcgcgccgggtggtggcgcgcgccgaagccgtagatgagggggcggccctcccggtcgtggccctgcaggtagagcttcccctgcgccgcctcccgcgccacctccgccgcggcgatggcgccgtggggcttggccgcgggcttccacttgaggtacttgagcagcatcgccgacgccttgccgatgttgtggtcccgcgcgcggaggaagcgccggagcgtgtagtcgtcctcatccttgcaggaagggtcctgggcctgggtgacggccctcagctccgccacctgcttccactccgccgcgtcgtcgctagccacctgctcttgctgctcccgctccgccatggccgacgacctcagctgctggtggacgggtggaaggcgggtcgtgtggttaatttataggaggagggaggactactgttcgtgcagcggtccccaggctagctgaggctgagctccagccgggtgaaaccccggccaacctcgagggctacctatttatggacggctcccctcaaccaacagagcaagcaagcaagataaacaacgacggcatgaagaatcagaattca

SEQ ID NO: 89373 - DNA, 396 bp, Zea mays
  Clone ID: MRT4577_181509C.1
attattattagttctattttctgaactacatacacctaccagaagggcagctgctttctactactagtaacatgcaggccgtagttagctgtttccgaggtcatgtgaaggcgtcacgctagcactatggctgtgaggaggagcgcgacaagggcagtgaacagcccaccctttgaaaggaggagcaagcccgccgctgggaaaatgcctgctgaacctaggccgccaaacccaaaacccatagtgcctgcagtccctatgccgcaagtgccgggtgcacctgcgcctaagaatgttcctatacacgtcaaggtgcatggggctaccgctcctcccattgggccccctgcggtaggggttatgggaaaaacgcatcttggactggtgagagggcgt

SEQ ID NO: 89374 - DNA, 540 bp, Zea mays
  Clone ID: MRT4577_18150C.1
caggaccggccgaattcttgggtcgccacgcgcctttaatccaaagctgatgatgcagatgatttgtaatttttacagcctgactgtatcacatacacctgcttgattatgcacactgtgaaaggggattcctaagagaagcaagaaaattttttaatgacatgatctcagatggtttgccaccctcagctgtgacctacactgttattattcatgcatattgtagaagaggaaacctttattcagcatatggttggtttcgaaagatgctggaggaaggaagttgaacctaatgaaataacatataatgtcctcatacatgcattatgcaggatgggcagaactcaactggcttatcgtcatttttatgagatgctagaaaggggattggtgccaaacaaatacacatatactttgttgatagatgggaactgtgaagagggcaactgggaagatgcgatgagattctatttcgaaatgcatcagaacggtattcgtccagattatgtaacacataaggccttgttcaagggatttgat

SEQ ID NO: 89375 - DNA, 177 bp, Zea mays
  Clone ID: MRT4577_181510C.1
tcgaatacacatccctacacgctctcttctgcgcagttgaacaacagttcagactgccctccctggggaaggtcatgcaatgctatgtgcccactatcgaccacttctagcggatagacgagcagtgcgcattcatagtgcggctgtatgctgtgttaccgaatggacgcatgttgt

SEQ ID NO: 89376 - DNA, 348 bp, Zea mays
  Clone ID: MRT4577_181511C.1
aacatagaaagcacaatagtgtaccaacaatggcagccaaaatattttgcttccttatgctccggggtctttctgcacgtgttgctaccgaaaccattatgccacaatgctcacaagctcctataacttcccttcttcctccatacctttcaccagcggtgtctacaatgtgtgaaaccccaattgttcaatcctacagcatccatcaggcaatcacaacaggcattttaccattataaacttcgatcctgcaacaacagtgagtcctattacagcaatgacctttggtccattcgttggcacacagaatcaggacacaccaacttcagcacttggtcatatcaaact

SEQ ID NO: 89377 - DNA, 438 bp, Zea mays
  Clone ID: MRT4577_181512C.1
ctgctcgctacgtcatcgcctccctgtgcccggtcctacgctgcggctccggcgacgactgcggcgactccgccgccgccgacacggtcgacgtgctggctttgcccaatcacacgccgactacatccagggaacgaacccgatgcgcaccagctacctggccggataccgcccggcgtaaccgcggagggggcaccacagcgcggaggcgagagcggcgtaccggcacgaccggtacttcatccgctgactgcaggggatctactggtggtacagcgggcgcacggataatccgttcgacctcatcagcgccggcgacagaaggaccaacggtaacgacgccttcacctgccgccccggccctgtcatgcagactgaggactgcccgcacgactggacctccatcggccggctcttctccagcctacatgcatctga

SEQ ID NO: 89378 - DNA, 1057 bp, Zea mays
  Clone ID: MRT4577_181513C.1
gcacgaggcgccatttcccccatataaaagcccccgcgtcggccccttcagctccaccagacgccctctactaatccagcccatttcgaactctctctagacgcttcctcggtctctctgttcaccgctgccccgtaccgtactcctcttcgcgccgtagaaatggcgctgccgaatcagcagggcgtggattaccccagcttcaagctcgtcatcgttggcgacggtggaactggtaaaaccacatttgtgaaaaggcatcttactggcgagtttgagaagaaatatgagcccaccattggtgttgaagttcaccctctggattttagcactaactgtggcaaaattcgcttctattgctgggacactgctgggcaagaaaagttcggtggcctcagggatggctactacattcatggtcagtgtgccatcattatgtttgatgtcacttcgaggctgacatacaagaatgttccaacatggcacagggacctgtgcagggtgtgtgagaacatccccatcgttctctgcggaaacaaggttgatgtaaagaacaggcaggtcaaagccaagcaagttacattccacaggaagaagaacttgcagtactatgagatttctgccaagagcaattacaactttgagaagcccttcctttacctcgcaaggaagctggcaggggatcagaaccttcactttgtcgaagccgttgctctgaagccaccggaagtgcagattgatatggccatgcagcagcagcatgaagctgagcttgcagctgccgctgcgcaacccctccctgatgacgatgatgacctgatcgaatagatgttccatggcccttgttgatgcgagggggagagcttttattacaaatccgtggtggttcagttcttgtcaggcctagccgtacgtgatttttctgttatgtaacctgctgttgacgagggtttttggtgatccttgattttggtaatacatcgctattgtcaggcagcatgtttcaaaaaaaaaaaaaaaaaaaaaaaaaaaaaaaaaaaaaaaaaaaaaaaaaaaa

SEQ ID NO: 89379 - DNA, 503 bp, Zea mays
  Clone ID: MRT4577_181514C.1
ttcgacgcaaggcagatcagagaggtcgccattggcctggaggcgagcggcaagaggttcctgtgggtcgtgcggagtccgcccaacgacgacccggccaagaagtttgaggagccgccggagccggacctcgacgctctcctcccggagggcttcctggagcggaccaagggcacgggtctcgtcgtcaagtcatgggcgccgcagcgcgacgtgctggcgcacggcgccgtgggcggtttcgtgacgcactgcgggtgaaactccgtgctcgagtcggtcatggccggcgtgcccatgctggcctggccgctgtacgcggagcagcggatgaacagagtgttcctggaagaggagctgggcctggcggtggcaatggatggatatgacaaggaggtggtggaagccgaccaagtggcgtcgaaggtgaggtggttgatcgactccgacggcgggagggtgctccgggagcggacgacggcggctatgcgacgggccaagga

SEQ ID NO: 89380 - DNA, 1114 bp, Zea mays
  Clone ID: MRT4577_181516C.1
gccgggaaaaaaaaaaaaaaaaaaaaaaaaaggaaaaaaaaaaaaaaaaaaacagcgcctccagttgcagagtccagacgccagacgccctctacttctctctagttagtgtacatttcaaactcttggccgccgcctcggtctctgttcgccgcgccccgccgcagaaatggcgctgccgaatcagcaggttgtggattaccccagcttcaagctcgtcatcgttggcgacggtggaactggcaaaaccacatttgtgaagaggcatcttactggcgagtttgagaagaaatatgagcccaccattggtgttgaagttcaccctctggattttagcactaactgtggcaaaattcgcttctattgctgggacactgctgggcaagaaaagttcggtggcctcagggatggctactacattcatggtcagtgtgccatcattatgtttgatgtcacttcgaggctgacatacaagaatgttccaacatggcacagggacctgtgcagggtgtgtgagaacatccccatcgttctctgcggaaacaaggttgatgtaaagaacaggcaggtcaaagccaagcaagttacattccacaggaagaagaacttgcagtactatgagatttctgccaagagcaattacaactttgagaagcccttcctttacctcgcaaggaagctggcaggggatcagaaccttcactttgtcgaagccgttgctctgaagccaccggaagtgcagattgatatggccatgcagcagcagcatgaagctgagcttgcagctgccgctgcgcaacccctccctgatgacgatgatgacctgatcgaatagatgttccatggcccttgttgatgcgagggggagagcttttattacaaatccgtggtggttcagttcttgtcaggcctagccgtacgtgatttttctgttatgtaacctgctgttgacgagggtttttggtgatccttgattttggtaatacatcgctattgtcaggcagcatgtttcagagcttgattgtgcatgtttattggtttaattgctatcgattgatttgaagcggggcttgttttaatggggacgattaattccccgttggcgggttgaacc

SEQ ID NO: 89381 - DNA, 1262 bp, Zea mays
  Clone ID: MRT4577_181517C.1
ttggatgcgatcattcccccactaaagcaccggatcccatcagaactccgaagttaagcgtgcttgggtgttagcaacactaggatgggtgacctcctgggaagtcctcgtgttgcattccaccagacgccctctactaatccagcccatttcgaactctctctagacgcttcctcggtctctctgttcaccgccgccccgtaccgtactcctcttcgcgccgtagaaatggcgctgccgaatcagcagggcgtggattaccccagcttcaagctcgtcatcgttggcgacggtggaactggtaaaaccacatttgtgaaaaggcatcttactggcgagtttgagaagaaatatgagcccaccattggtgttgaagttcaccctctggattttagcactaactgtggcaaaattcgcttttattgctgggacactgctgggcaagaaaagttcggtggccttagggatggctactacattcatggtcagtgtgccatcattatgtttgatgtcacttctaggctgacatacaagaatgttccgacatggcacagggatctgtgcagggtctgtgagaacatccccattgttctttgtggtaacaaggttgatgtcaagaacaggcaagtcaaggccaagcaagttacattccaccggaagaagaacttgcagtactatgagatttctgccaagagcaattacaactttgagaagcccttcctttacctcgctaggaagctggcaggggatcagaactttcactttgttgaagctgttgctctgaagccaccagaagtgcagattgatatggccctgcagcagcagcatgaagctgagcttgcagctgccgctgcgcagcccctccccgatgacgatgatgacctgatcgaatagatatgttatacatggcccttgttgatgactcttgttaaaaatctgtggtggttcaatccttgttagtgttaggcggtacctgaatgttctcttgatgtattcgaagagttgagaaggaagttaatgacatcattatcctgttggctgttgttgacttggggtttttggtgaacctgtccttgagggaatacagaggtattgtcaggcagtacgcttcagtgcttgattgttcctttctgtctattggtatcgattgaagcgtggcttgtatgaaagacgatgaggaattcgtgggccatgggcggcgtggttgaacgaagattaaatcgtttaaagcaaaaaaaaaaaaaaaaaaaaaaaaaccttag

SEQ ID NO: 89382 - DNA, 510 bp, Zea mays
  Clone ID: MRT4577_181518C.1
attaatgtaacaaatgtcagaaccctcgggggtaaaaggataggagaataaggaaaaaagatgctgtagatagtccgccgcgccacggtgctcctcgacgtgattgctgcctgctggaacagggcctccacgttctactcctccgaccccaacctcggatccgaccgctacgactacacagaagaattttcggagagattcgtatcttggattctttcctcatgttgcacctaatactgtgtaaaacattctctgacttgtgggatttgcatgctacatgacaaatcacttcttccgagttgcacaagggcttcgtagcactaggtgatgatgatatgacacgccaacatcgaccctatgaatgtaggagcggaaatatgaaccgaacaaaacaatcgttgacgaatttagtaatgtcatgcatgtcatgagaatcctcatcgatgggaaggaactctgattcagatagggctgcatcttccttatctattcgtctgggcaattcaccgc

SEQ ID NO: 89383 - DNA, 965 bp, Zea mays
  unsure (1)..(965): unsure at all n locations
  Clone ID: MRT4577_181519C.1
atccgagggccattctgcctccaactcctcgaactttcccgcctgaaaccctctcgcctccctcgccatctcctaaaatatagggccacagtccaggacccactagtttctgctctcggcctgttcccttctatttctcgccccctactgattaaattttcttcgcacgaggaaaaaaatcaagtggcaagggcttgatctggtggccgacccatggtggaagggatggtagtggccgtgccgaatggggtgaaggcggatggcgccgccgccaccgccgccgccgctaaggcagattctcctaaatccgttctggaggacgagaaaatttctgaatccaagaatgggaacgcctccttagccacggagccagttaagcaaggggacgagacctcggacgattttgtggatgcaatgatgtcccttcctgttgaccatgaaatcgacagtgccgatgtgccccctgctgttgaggcagtcaaggacgaagaccagcttctggagcctgccaaggaggagaaatttgatgatttcctggatgcaggtttatctatacctattgatcttgaggccaagaatggtgatgtatccctgatcacagaagcaatgaaaaaggaagaagaacagctcgaggaggcgcggattaaggcagaggaagaagaggaagccaggaaggagggaggaagttgcaaaacttgcttttgatcctgagtcgcggtatagcaagttagatgagctactgacgaagacacaactattttcagagttcctacttgagaaaatggataanatcgccgatgaagttgttgaacctcaaggtgaagagtcaccagtagagaagaagaaaagacgtggcccgaagaagaaagctaatgccacaccacaatacaatgataaaaaggccaagacagcagtggcagccatgctttacagatctcngtgagatcgtcttgctgatgactcta

SEQ ID NO: 89384 - DNA, 497 bp, Zea mays
  Clone ID: MRT4577_18151C.1
cccacgcgtgcggggaaaactgcctaatggggaagaggtcgccgtgaagatgctgacggcgacgggccgggacgacgatgaggagcagttcgagaaggagcttggagcggtcacgagtatccagcgcgagaacatcgttgagttcgtctgatactggaacgcgcatgtactgtcgtccactgttttgtctgatggacgaagccctgtttacgagaagataataagagccctctgcttcaagtacatggagaagagaagcctcaagaaccatgtcgctggtcttgactggcactcccgctatgagatcatcaaggtggatctgcgagggtttgcaccaccttcacagcaaaagcatcgttcaccgggacttgaagcttgacaacatactcctgtacggtgccatgaggcccagattgcagattttggttttgtcccagattcatggcacgcaagaaccaccggttcacgggaaacattatagggaccccgggtgcatg

SEQ ID NO: 89385 - DNA, 645 bp, Zea mays
  Clone ID: MRT4577_181520C.1
cggggtctgcgtccagagccttcctgtaattacagctcgccttcatcgtctccccgaatgaccttttgcgttcgtcgtctccccaaaaggacctcccaagacctggcatctccagcgaatgcgatgccgggaaccaccggtcgtgcgtcctctctcctcgtgcgcttcgcccgtctccacagttggtgcagcttgttgcgacgcaacttggattctctcctggcctctcgttgcaacaaggcagtccagtgaatgagacggatggccccagctgtgcctgtagctgatgcatgatggagctgagcctgtgggcacaaagattaaatagagtttggaatggtcttttagacgccattagacacatgcaagtctcagccgatgagttgaggaggttgaccagacgcaaccatgtgcctgagtatgtagagtacctacgcaaaaatagattatgaagcccatgtgagtgctgttactgaaattgcacaaggcctagaccacgtgagcacagatttggcggaagttcttattggtccacaacctcttcttgaagattatgaagcccttggtttgtacgatgatttccaatgcgatggtgaagatatctctgtggactcggatgagatcaatgatcgtcgtctatcgcat

SEQ ID NO: 89386 - DNA, 443 bp, Zea mays
  unsure (1)..(443): unsure at all n locations
  Clone ID: MRT4577_181521C.1
ncagttttccaactcacattctactatatattaggatgtgttgggcacacatggaagtaaggcaaaatgatgcatcgacatgtgatacgtgagcacgtatttcagaacccgatagaaatgcaggcagcgccagcaggtcttgcttcacgctcctcgcggatggtggcccctccggcccgcgccgatgcagttgaagctccttccgaagcacaaagattaaatagagtttggaatggtcttttagacgccattagacacatgcaagtctcagccgatgagttgaggaggttgaccagacgcaaccatgtgcctgagtatgtagagtacctacgcaaaaatagattatgaagcccatgtgagtgctgttactgaaattgcacaaggtctagaccacgtgagcacagatttgggggaagttcttattggtgcacaatctctccttg

SEQ ID NO: 89387 - DNA, 225 bp, Zea mays
  Clone ID: MRT4577_181522C.1
gtgtattattttttttttgaaaattaaagtgatttggcatttttttaaagtcgaagaaccggcgaatgctgtaacccagcagcctgaatccctgtcaatttgtacacacgcccaacatttggagatcatgtttcccctggaattgccgtcacaccctatccaagtcaaacgtaaagacagaccatccactgaactcccggaaacaaggggcccacatcaacatgt

SEQ ID NO: 89388 - DNA, 1412 bp, Zea mays
  Clone ID: MRT4577_181523C.1
cccactcgtccgggacctcccaagacctggcatctccagtgaatgcgacgccggggaccgccggccgtgcgtcctctctcctcgtgcgcttcgcccgtctccacagttggtgcagaaacagtgcaacagtgtttacggggtgaactgctggagttggcgttagatagtcgatggtctactgccgccgtgctctctcactaccagtgtcccaccaccgtcatgcatgttttgcggcaattgccggctactatactccttcgtctccaatcatcgccgggaaaaagaatgaccttttgtgttcgtcgtctccccaaaaggacctcccaagacctggcatctccagcgaatgcgacgccgggaaccaccgaccgtgcgtcctctctcctcgtgcgcttcgcccgtctccacagttggtgcagcttgcgacgcaacttggattctctcctctcctctcgttgcaacaaggcagtccagtgaatgagacggatggccccagctgtgcctgtagctgatgcatgatggagctgagcctgtgggatgtgttgggcacacatggaagtaaggcaaaatgatgcatcgacatgtgatacgtgagcacgtatttcagaacccgatagatctgaggccgtcgtcttccactgggtcgcgctcctgttcgctccgtcgtcagaaatgcaggcagcgccagcaggtcttgcttcacgctcctcgcggatggtggcccctccggcccgcgccgatgcagttgaagctccttccgaagcacaaagattaaatagagtttggaatggtcttttagacgccattagacacatgcaagtctcagccgatgagttgaggaggttgaccagacgcaaccatgtgcctgagtatgtagagtacctacgcaaaaatagattatgaagcccatgtgagtgctgttactgaaattgcacaaggtctagaccacgtgagcacagatttggcggaagttcttattggtccgcaacctcttcttgaagattatgaagcccttggtttgtacgatgatttccaatgcgatggtgaagatagctctgtggactcggatgagatcaatgatcgtcgtctatcgcatatgaacgagcgtatatgagatatttgtttgcgagagagttcagtttgccattgatgtctgtagcttatgaagcccttagttagttgccactgttgttcctggtacttgtatgaattgggttatgaaaatgaagagttgtgttatgagttgtattttgtgatcatataatggcttcatctatgtgataattctgcacctgttgtcactgttgttatgagttgtatcttatgaagcccttagttagttgccactgttgtttctgcaatgaactgtacctatgatcatacaattgttatgacccgaattttgtgaccat

SEQ ID NO: 89389 - DNA, 1882 bp, Zea mays
  Clone ID: MRT4577_181524C.1
actgacactcctcgacatcgacgaaacatcttctgactaggtcgttcttaactattgaggggtgtttactctcttccatctactgcaaaattcaattggaaggatatctaatgtagagttaatttgaaaagactgtatctacttctagaacagactcttttactccatgtataccactacccacaaatgccgcagaagcacggaaaacccgaagattgttatttaaccaaaatagacttggcagaagagactcaatgatgactacaacgacgacttcacaatgtgcctatttcacaaatgagtacatacagtcacttaaaggttcaaacatggacctctgcgcatcaaagaaaaggtgaccccacgcgtccgcccacgcgtgagggatcccttaaaggacctcccaagacctggcatctccagcgaatgcgatgccgggaaccaccggtcgtgcgtcctctctcctcgtgcgcttcgcccgtctccacagttggtgcagcttttgcgacgcaacttggattctctcctctcctctcgttgcaacaaggcagtccagtgaatgagacggatggccccagctgtgcctgtagctgatgcatgatggagctgagcctgtgggtgggaatctcttctctgctggtggccactcgcctagctccaaaaacacacacacactctctctctctctctctctctctctctctatctagtgggaagtttcacatcactagctccatcgcaattggtatgggtggtgcttctgcacaaaagaaaaaagatgtgcctgtctcactccccaaccaacttgtgaattgtcatgcatcgatcctagctagagcatctccgagagcaaaaacccttgttacagttttccaactcacattctactatatattaggatgtgttgggcacacatggaagtaaggcaaaatgatgcatcgacatgtgatacgtgagcacgtatttcaaaacccgataggttggttggagtgggcttcttaaaattattactccgaagcgtgcaattgagattgtagtattataatacccacgtatttgtaaatttgttatcgtcgttgctttaaacacccatctatatagctcactcactgctgctgttactggcatttctcccctcatcccgttcctgaaaacggatctgaggccgtcgtcttccactgggtcgcgctcctgttcgctccgtcgtcagaaatgcaggcagcgccagcaggtcttgcttcacgctcctcgcggatggtggcccctccggcccgcgccgatgcagttgaagctccttccgaagcacaaagattaaatagagtttggaatggtcttttagacgccattagacacatgcaagtctcagccgatgagttgaggaggttgaccagacgcaaccatgtgcctgagtatgtagagtacctacgcaaaaatagattatgaagcccatgtgagtgctgttactgaaattgcacaaggtctagaccacgtgagcacagatttggcggaagttcttattggtccacaacctcttcttgaagattatgaagcccttggtttgtacgatgatttccaatgcgatggtgaagatatctctgtggactcggatgagatcaatgatcgtcgtctatcgcatatgaacgagcgtatatgagatatttgtttgcgagagagttcagtttgcaattgatgtctgtagcttatgaagcccttagttagttgccactgttgttcctggtacttgtatgaattgggttatgaaaatgaagagttgtgtatgagttgaattttggggacatataatggcttcatctcatgtgataattctgcacctgttgcactggtgtaatgagttgtatcttatgaagcccttagttagttg

SEQ ID NO: 89390 - DNA, 571 bp, Zea mays
  Clone ID: MRT4577_181525C.1
ggccgccctttttttttttttttttttttttttttttttttttttttttttttttttttttttttttttgtttttttttttttttttttttgggggtctgtttttttgttttgggtgtaggtttggggttgcggttcaaagttggaagtttttcgtggttttttcctcccttttcgggggggggggggggagggttctctaaagaaaaagggctttctccccccgaagggcgcgcccaaaagcctttttttgggggctaatcccggggaggggacaaaaagggggctacgcagggggcggggggggaaaaagaagctcaaaaggggggggaaaaggaaaaaaagggggaggggggggatccggctgctgggcccccgggggtttggggggttggcttattctgaaggggacgcctccccgcaaaaaggggggggggaagggaagggaagtttctgccggggggggaccccccggggcggcaaggggcgcttggtcccaaaggcgccccccccaataccaagggggggcggggggatccgcaaggcacccctcctttcggaagtgggcacac

SEQ ID NO: 89391 - DNA, 250 bp, Zea mays
  Clone ID: MRT4577_181526C.1
gggttccggggccccttccccaaaaagggagggatggggcatatatatatagcatcaaaattatgtaatgaaaaatacccccgattattgttacatgaccaagggtgaccatccatggaggctaaattataaacaaaccccctgattttacatgaccaatcccaaaaagcccatgccttggatatccttaacccgaaagggccctggtgttttaaacaaagagggcccccccccccaggatcccaacgag

SEQ ID NO: 89392 - DNA, 865 bp, Zea mays
  unsure (1)..(865): unsure at all n locations
  Clone ID: MRT4577_181527C.1
cggccgggngaacccnaacagaactgaaccagaacacggctgtgacgacggcggcgatcagttttgacgctggccggagtgaaactgtgagcgtgatatcgtgagtctaacatctggtattcggagcgaggctggagcccacgcacgactacttcacccgagctcaggcgaagggcgtagcaatggcgccgccgcggaacgaagacccgatggcgcagatcatggctaaaattgaggaaggtaacaaggagacccatcggcgtatggagaccgtccaagcctccctggcaacagttgaggcgacgatgaaaggcatgataaaggaacaaggtgaattccggaaatggcgaccggaggtggagatgaaggtcacggaggtggcagaggcgttgaagacaatccaggcaaaggtggatcaattcggaccatcatcatcgacggagccccttcctgacgggaaacaaacgaagaagggtgtgccgatctccgttcaactggagatcccgccggtcgacgcgacgaacgggcaatttcgccaccgctttgctgaaaaccaccggaggccgggtgttgaggagaatctccgaacacccgctccggtcggaggtatgccaatccctcctgagacctttactccgttcttcgattggggatcattaggccggaactcagtagccaattggtcacagatgagtggcccaactatgcccaatatggtgttccctgttttttatggatccaacccaaagctctggaaacacagatgcgagacctattttgatttctatgctgtgccttttgagaaatgggttagaattgctactatgcattntgagggtcctgccatgtattggggttcagtcta

SEQ ID NO: 89393 - DNA, 326 bp, Zea mays
  Clone ID: MRT4577_181528C.1
gagctcatttgtcggcggccgcccttgttttttttttttggggaaagtgtaactagtactcgattggtcggacatagatgtacatctgagcaccgctccagacgcagttgacacacaggggatattggaccaccagtggatacagacagatcaggcacaggacagggcacaggagaagcggtcgccccgatggcttccgccgaggcattattgacggggtcaacgaggacaacggccactccatactcaccggtgccagcgagcaggaccgtgcgggaactgaagccatatacctaacttacccacgggtggagccaacctcctac

SEQ ID NO: 89394 - DNA, 258 bp, Zea mays
  Clone ID: MRT4577_181529C.1
ctagattaaatgtgtcatgttcaattttcacttttataataaatattaacatggtaaatattatcttaactactttctatttacttaacattcgtttagtataaacatgtcgcctgttcagttattctcgtctgtcgcgggtgttgttcctcgcgcggtacgtgctgcttcgcgcgtcgtgcacgtgctgtctgcgtgttgttcgtgcgtgacgtgctcgtggtcgcgtgctgattcgtgcgtgttcgcgctcgtcgc

SEQ ID NO: 89395 - DNA, 298 bp, Zea mays
  Clone ID: MRT4577_18152C.1
aggcaccaaagctcttgcatcatctgcacacacatttaccgagagtgagtcagtcaagcgagcgcgtgctgcttacgaggctgcttcgagtacggcaacgtctactacatcaacagcgttgaaatccaccggaagagttatcggacaaggagcagcttggacgtgggaaactccggtagtcaagggactgcgtaaaggtgtttctgcaactggaaagggcattgaaaaagtcacacgaccagtcagggagactgaagcttataagagtgttaaggaagctatcgatgatggcagtagc

SEQ ID NO: 89396 - DNA, 348 bp, Zea mays
  Clone ID: MRT4577_181530C.1
gccttacattattgtttttttgtttacccttcgagcggccgaagcactactttagacatatccatttggactggtccacaaagatacggcgggctcacaggacctggacgaccccgcatggccgaacctgagatggagtgtcctggccggctacttttatttagatggaagaactctgtgtgcacggacgagctgtttggtggtactaaaaaccaccatgccggggcccatctaaatatttacagcaggctggctgtgccgaccatggcgtgtctggctcactaaatgttcaccatgccttacaacaggcgaagaacattagtgcgggaaactatacctattactttt

SEQ ID NO: 89397 - DNA, 290 bp, Zea mays
  Clone ID: MRT4577_181531C.1
gagggtgacgacgctctcgaactcctcctcccacgccgcgccggcgtcctcccgtgtgcggttgcgcctgaccgcggcacgccgcatcgagccgagcgcggaggccctgggccccttccacctcacctccgcggcgacggcggccctgggctgcgcggcgcccggcggctcgcgctccggcgaggccgctgtcacgggcgagggcgaccgcgaatgcgaatgtgaaggaagctggagccccttcgcactccgcaccaacagccggacgcggaacttgcgcgccgtcagct

SEQ ID NO: 89398 - DNA, 893 bp, Zea mays
  unsure (1)..(893): unsure at all n locations
  Clone ID: MRT4577_181532C.1
cattgggtacctcgaggccggccgggagccagccttataatccttcctctggaaccctaggttgcctctctccccaccattcagctgccgctgcccccgattgagccgccgccgcctcagattcgccgtcgccacctcagattcgccgccgccgccgccgatttggacgctgtcgccggcgattcagcccccgccgccctggatttggcctccgccgctcccgattcggcgctgccaccctgaaacagcgccgcccctttcccttcccctatgccctatgccctcttgctgcttctcacctaggcgacggggacgccttggatccttcgggcgcctggacgcctaggcgacgcctttaaaacaagggttttttcggcatttgggtttgttcacaagatagctacttttgagaaagcagctggtttccaggcacttatccagtatactgatgccccaactgctcttgaagctaaaaactcattggatggaagaagcatcccaaaatatttacttccagaacatatcggtgcctgccacatgcgcataaccttttctgcgcataaggatttgaatatcaaatttcagtcgcatcgcagcagggattacaccaatccttaccttcctgtgaaccaaacagcaattgaggggattgtgcagcccacggtgggccctgatgggaaggtaaaggagcctgagagcaatgtacttttagcatcaattgagaacatgcaatatgctgtgacagtggatggtctgcacactgtgttttctgcttntggagctgntcaaaaaatgcaatgcttgagaagatggtggaatgcaggctctaatcccatatcagatataactaccgcagccgttgctnaacagctntggaggacctgcatatatga

SEQ ID NO: 89399 - DNA, 842 bp, Zea mays
  Clone ID: MRT4577_181533C.1
gaagaatggtggaatgcaggctctaatccaatatccagagaggtgtcggagttcgtgaaggcttaaaatggacatctgcaactttccacagctataaagttgtttttaatataactaccgcagccgttgctaaacaagctttggagggacactgcatatatgatggtggttactgcacatgatgagagaagcagggactacactctttcagaccctaacgtgcagctgcaagctgctgcacaaacgccagttctaaggtctccgggagtggcatggcagaacactgcatcagtaccagctgctcctttttatgcaagcacagcgacttcaactcctattggagttggacaggtggctgcttggaatcctaacatgcaggcagggagttttgcatctgcatcgactgcataccccaaccaaccattaatggccaactccatgcctcactatcctgctattggatcgagttccggtgccccaccagtagcatttcaggcttcgcagcagatgacacagtatagcatgccccctggtgctccgccgcacgcaccaccagctggccaatcgatttactacccgaagtaagcggttttggttcaatattatcaaagagcaatcaggcattttacctgcaactattgttgtccgcaaatgccatctggaatttttttggaagtgcattgtaactcttgtaacttacgagcgccctacgcaagaataccccaggctggctggctattaaaccgtcaaaaatagttttaacctattagcctgcgtggtatattgttatctcaatgccgagttgttttgatgcctcaagtgtttggaaagaaagtatttcg

SEQ ID NO: 89400 - DNA, 1937 bp, Zea mays
  Clone ID: MRT4577_181534C.1
gcgcagcccaaggcagagctccataccccatcctacattgtacctcgaggccggccgggcactcggggaattcccatttccccttcccaacaggccaaccccctctacctatctttttcctcagcaaccgtgctcggttcctcctccctcgaaacggctcccacccccgcgccgcgataagaaaacccaccaaaccctaaccctagcagcggtgccacaaccgcccgcgttcccggccggagaggaagccgagccagcaaggatgccgcccgggtcggcgacgcaatttcggtacacgcagacgccgtccaaggtgctgcatcttcggaacatgccatgggagtgcaccgaggaggagctcgtcgacctctgcaaacccttcggccgggtcgtaaacaccatgtgcaacgtcggcgctaaccgcaaccaggcattcgtcgagtttgcagatcaaaaccaggcaatttcaatggtgtcctattatgcttcatcttcagaacctgctcaagttcgtggtaaaactgtatatatccaatattcaaacaggcaagaaattactaacaataaaggcactggggattcttctggcaatgttctacttgtcacttttgaaggtgttcagcctaatgatgttaccatagaagttattcatttggttttttcggcatttgggtttgttcacaagatagctacttttgagaaagcagctggtttccaggcacttatccagtatactgatgccccaactgctcttgaagctaaaaactcattggatggaagaagcatcccaaaatatttacttccagaacatatcggtgcctgccacatgcgcataaccttttctgcgcataaggatttgaatatcaaatttcagtcgcatcgcagcagggattacaccaatccttaccttcctgtgaaccaaacagcaattgaggggattgtgcagcccacggtgggccctgatgggaaggtaaaggagcctgagagcaatgtacttttagcatcaattgagaacatgcaatatgctgtgacggtggatgttctgcacactgtgttttctgcttttggagctgttcaaaaaattgcaatgtttgagaagaatggtggaatgcaggctctaatccaatatccggagatataactaccgcagccgttgctaaacaagctttggagggacactgcatatatgatggtggttactgtaagcttgtcagctcacttactctcgtcatgagaactgatctcaatgtaaaggcacatgatgatagaagcagggactacactctttcagaccctaacgtgcagctgcaagctgctgcacaaacgccagttctaaggtctccgggagtggcatggcagaacactgcatcagtaccagctgctcctttttatgcaagcacagcgacttcaactcctattggagttggacaggtggctgcttggaatcctaacatgcaggcagggagttttgcatctgcatcgactgcataccccaaccaaccattaatggccaactccatgcctcactatcctgctattggatcgagttccggtgccccaccagtatcatttcaggcttcgcagcagatgacacagtatagcatgccccctggtgctccgccgcacgcaccaccagctggccaatcgatttactacccgaagtaagcggttttggttcaatattatcagagagcaatcaggcattgttacctgcgacaattgtggtccgcaaatgcaatcttgcgaattttgcaagtgcgctgtagcacttgtaacttgcgagcgcccttcgcaagaatgcatcagcgtctgctgtgtctgtaaaactgtcaaagatagtgtttacctattagcttgcatggtatattggtggtgagatatgttggagtagttttgatgcctcaagaatctctaaaaaaaaaaaaaaaaaagcggcc

SEQ ID NO: 89401 - DNA, 258 bp, Zea mays
  Clone ID: MRT4577_181535C.1
cccaaaaaaaacattttttttttcccctgaaacctcaaaacccccccatgttgccccatgaggaaaaacccccaaaccgggccccgaaaaaacaggcccttttacaacggaaaagggtttttggccaaacataaaactccctttattacaacccccttggggtcctctccggggacctttcaaaaacaaaaggccaactggggggtcctttttcttttttttttgaagaccaactttaataatacggccccgggggtc

SEQ ID NO: 89402 - DNA, 442 bp, Zea mays
  Clone ID: MRT4577_181536C.1
cggggctcgccaacgcggcgcaaccgaccgcccgcccacccaggagaagaagatctacgccgcctgctcttagcttcggtaagaataggaggcgaacaggagccagagcggtccctatggataacagcttttaaaagagctctcaacgagcctatgtgctagaaagaaaccgtcgaccaacaaggaattgaaagggcccaacctgaggaacataagagcctacagaggttacttctcgatcgtcaactaccctactgccgcaagaggagccaaggcaccgactgtacaagatgggactaattttgacatgacattgaaagacctccatggaatagagggagaccgctccacatacagaagggctatagtcccacagagagaagccactggcaaagaccaatgctgagttcaaacgattggcagacaaagcagctgccatcag

SEQ ID NO: 89403 - DNA, 244 bp, Zea mays
  unsure (1)..(244): unsure at all n locations
  Clone ID: MRT4577_181537C.1
ccnggccgnnggccgggttgcacagaggaccaatttgacagaaatagcgaggtgccaagtaggcaagtactgccaagtgacttatgtactcaatcaagctggattcagggtagggtcagacgccaaagaaaattgtgccaaccttaaaaaaaaaaaaaaaaaaaaaaaaaaaaaaaaaaaaaaaaaaaaaaaaaaaaaaaaaaaaaaaaaaagaaaaaaaaaaaaaaaaaaggcccctagggcc

SEQ ID NO: 89404 - DNA, 2318 bp, Zea mays
  Clone ID: MRT4577_181538C.1
gcaattcaatggtgtcctattatgcttcatcttcagaacctgctcaagtgttcagcctaatgatgttaccatagaagtgtccgcccacgcgtccgcggacgcgtgggttcagctgccgctgcccccgattgagccgccgccgcctcagattcgccgtcgccacctcagattcgccgccgccgccgccgatttggacgctgtcgccggcgattcagcctccgccgccctggatttggcctccgccgctcccgattcggcgctgccaccctgaaacagcgccgcccctttcccttcccctatgccctatgccctcttgctgcttctcacctaggcgacggggacgccttggatccttcgggcgcctggacgcctaggcgacgcctttaaaacaagggtcttctctgtattaaatattttctgatgtacagtagctaccttgttattcatgcctccgcatgtttccgttgtgctcatgtttgttgcgacctgccttgtttctgccctttggaggatatcctcaatctctgacaattattcatttggttttttcggcatttgggtttgttcacaagatagctacttttgagaaagcagctggtttccaggcacttatccagtatactgatgccccaactgctcttgaagctaaaaactcattggatggaagaagcatcccaaaatatttacttccagaacatatcggtgcctgccacatgcgcataaccttttctgcgcataaggatttgaatatcaaatttcagtcgcatcgcagcagggattacaccaatccttaccttcctgtgaaccaaacagcaattgaggggattgtgcagcccacggtgggccctgatgggaaggtaaaggagcctgagagcaatgtacttttagcatcaattgagaacatgcaatatgctgtgacagtggatgttctgcacactgtgttttctgcttttggagctgttcaaaaaattgcaatgtttgagaagaatggtggaatgcaggctctaatccaatatccagagaggtgtcggagttcgtgaaggcttaaaatggacatctgcaactttccacagctataaagttgtttttagtaatactctctttcttactagaggcttgctttaaactttcattttgtcatcattgaacttcccttgtgacatgcgagtcctaatttaggtacctttacctgtttaatgtgttgggcattagaatatagtcagcacctctatatcattggttcttctgttgaaaaaacattttgacatctaatttgtgggccttatctagcttattgaaataaatatctttgaaaagtatggcaattcaaatgacatcaatcttgttggtgctcaatactgtttgtactggttagtggtagttgtaattgaactgctttgatgaaacaagaatctctaaatacctttgcacccacacttatcacattatgaccctggaatccagagtatcttaaaatttattctttatggtcaagtggaattgctagttctgtttcccccttagccatggaaatatatcattaatatttgatgtacaaatacataggttcatctgactaacaaaatctttttttagatataactaccgcagccgttgctaaacaagctttggagggacactgcatatatgatggtggttactgtaagcttcatctgtcatactctcgtcatactgatctcaatgtaaaggcacatgatgagagaagcagggactacactctttcagaccctaacgtgcagctgcaagctgctgcacaaacgccagttctaaggtctccgggagtggcatggcagaacactgcatcagtaccagctgctcctttttatgcaagcacagcgacttcaactcctattggagttggacaggtggctgcttggaatcctaacatgcaggcagggagttttgcatctgcatcgactgcataccccaaccaaccattaatggccaactccatgcctcactatcctgctattggatcgagttccggtgccccaccagtagcatttcaggcttcgcagcagatgacacagtatagcatgccccctggtgctccgccgcacgcaccaccagctggccaatcgatttactacccgaagtaagcggttttggttcaatattatcagagagcaatcaggcattgttacctgcgacaattgtggtccgcaaatgcaatcttgcgaattttgcaagtgcgctgtagcacttgtaacttgcgagcgcccttcgcaagaatgcatcagcgtctgctgtgtctgtaaaactgtcaaagatagtgtttacctattagcttgcatggt

SEQ ID NO: 89405 - DNA, 360 bp, Zea mays
  Clone ID: MRT4577_181539C.1
gcactactgttttttttgttttttttttgttttttgggaaagggggccaaaaccaccaaaacaggggcgctttggacaaataagaggtgaaccgacacccgggaaaaacctaacagaaggcccaaggggtggggaaaaaaaaaccggttaaaaaccacccgggaactcacccctatttttttttgtaaagtgttagggggcggcccctcactttttttttttttttttggcccctattgggggggtggaacccaccttttttttgggggaattgaaacccctagggggcaaccgggcaaaaaattggggaaaaaaaatttggcccgggatgtacttccccggacccgtggggggcccccg

SEQ ID NO: 89406 - DNA, 2196 bp, Zea mays
  Clone ID: MRT4577_18153C.1
gatgtagtcacctacacaatatccatgccaaactatgttgttggaggtattcgtagaaatctggagcagacacagtacagctcatccagttcaagtggatacagtccatgtgcccgttctaaagtactacagcaacagataatatttggagggcagaatgaccagcacgaggacacacattatgactctgatgaagcagaaagcaaactctctcttgaaaacgtagctcaggacagcgccactcgaggaaggcctgaaggcgacgcccccagatcagggaaaggggttctgaggtcggtcgcaatttaatgatgcccccaacaaagaaagcgaaggctatggagaaagtggacgtggcaagcatggagaaaaatctctagctgaatcagtgggatcacttaacattggcattattgattctgagttcatggattcaagtcctctaattcatgataaagaatcatgttttcctctagaacctgagggctccgttaatgaagataattttacagctgtgctttcacaatttaacgatgcccccaacaaagaaagtgaaggctatggagaaagtggatgtggtaagcatggagaaaaatctctagttgaatcagtgggatcacttaacattggcattgttgattctgagttcatggattcaagtcctctaattcatgataaagaatcatgttctcctctagaacctgaggactccgttaatgaagataattttgcagctgtgctttcacaatttaatgatgcccccaacaaagaaagcgaagcctatggagaaagtggatgtggtaagcatggagaaaactctctagatgaatcagtgggatcacttaacattggcgttattgattctgagttcatggattcaagtcctctaattcatgataaagaatcatgttctcctctagaacctgaggactccgttaatgaagataattttgcagctgtgctttcacaatatagcgatggccccaacgaaggaaatgaaggatatggagaaagtggacattacaagcatgaagaaaaatctctagatgaatcagtgggatcactaaccattggcattattgattctgagttcatggattcaagtcgtccaattcatgataaagaatcatgttctactggttctgcagctgaccaatgttcaaggactataccggctaaatatgaattaagttcagaagagtcagattccacaggcagtcatttggtgtttgacagtggcaagaattatctggagttgaacaatcattctgtcacagatttggaaaggatttacgatggacatgccacgtctgtagatcaatatgttcggggaaatggggagacattagctgaccatccaaaaaaagaggaagctggcctccaaaaggacactggcaccatagctcaacatcgtgatacccttgcttgtgatggggagtctgtgtgttcgagttgtgaagagccgagacgtggattaaatggcgagccatcagacttcagctcggagtcacactcgagactgaccccaacacataacacaggtggcaaattgtcgatggtttctgaacatccagtgcataatatggagtcagatatgactgggatggcaagtgatagcactaacccggagctgaatcctgaagccagcaccaggaacgaaatggacggctcccgatccactgataacccagtggaaccagaaaacgtagctcaggacagcgccactcgaggaaggcctgaaggcgacgcccccagatcagggaaaggggttctgaggtcggtcgctggaggaatcacccttgtcggcgcagtgttcttcatgttccatctcagtgccgcgctgctgcagaagaagcaaggggggaagctttgcgacggtcataccatctctttcgggaaaatctgctcggagcaacgcaagggccaggaacatgggcagagaaaacgtccctgatgcgtatcccggggggcggctgaaggcttgacaagacgatggagcacagtctgcttcacagaatctggatgaactctgtcgacccaccagtcaagttgaagtcagtaccctgccttctttcatgtacagaacgacataatcatatgatttaggtgatcgattacagcaaatagtgggacagattttgtacaagtatagttgaggcatgaataaagtctagtttccaacctccaaaaatataa

SEQ ID NO: 89407 - DNA, 1057 bp, Zea mays
  Clone ID: MRT4577_181540C.1
cattgggtacctcgaggccggccgggcacacatacaagtgtcacctccccggtccctcgcgaaccctagagccgcagcagcacactcccgcagtagtagcagcagccgccgccgccgccgcccagccgcaggaaacaggaggaagatgccggcggggcacgggcttcggtcgcggacccgcgacctgttcgcgcggccgttccgcaagaagggttacatcccgctcaccacgtacctgcgcacctacaagatcggcgactacgtcgacgtcaaggtgaacggcgccgtgcacaagggcatgccgcacaagttctaccacggccgcaccggtcgcgtctggaacgtcaccaagcgcgccatcggcgttgagatcaacaagcaggttaatggccgcatcatcaggaagcgtatccatgtccgtgtggagcatgtgcagccctcccgttgcacagaggagttccgcttgaggaaagccaagaacgatcagctcaaggttgatgccaaggaccgtggtgaggtgatcagcaccaagaggcagcctgtgggacccaaacctggcttcatggttgagggtgctacacttgagaccgttactcctattccctatgatgtggtaaatgatctcaaggggggttactagagagaattatgtatcttgagcagttcaagcgagctggcataaatacctatctgaatctttttgacaactgtctagttattttgttctagaagggcaggcatggtacattggtgatatttgtctcaggcattcgaatcagactccacatttctaggggcggtttgtccctccttgagtaccgtctcgagagcctcgtgcactgggtcggcctctctggttctttttgttctggtgttataaacctatgtggctattgctagttaatgctaaagattttgccatcgtttattgtaaccttttatgtggattgtattgtctaaattttctttagtattatagcttgtttgtttggatcatatgcattgaaaccaatatataagaattgctttacattttattaaaaaaaaaaaaaaaaaa

SEQ ID NO: 89408 - DNA, 2358 bp, Zea mays
  Clone ID: MRT4577_181541C.1
cctcgaggccggccgggaaaatagctgcgagacgagccgtttaaaaaggtgtcatgtggaagtgcagtgatgtatgcagctgaggcatcctaacgaacgaacgatttgaatctttttcctcagcaaccgtgctcggttcctcctccctcgaaacggctcccacccccgcgccgcgataagaaaacccaccaaaccctaaccctagcagcggtgccacaaccgcccgcgttcccggccggagaggaagccgagccagcaaggatgccgcccgggtcggcgacgcaatttcggtacacgcagacgccgtccaaggtgctgcatcttcggaacatgccatgggagtgcaccgaggaggagctcgtcgacctctgcaaaccctttggccgggtcgtaaacaccatgtgcaacgtcggcgctaaccgcaaccaggcattcgtcgagtttgcagatcaaaaccaggcaatttcaatggtgtcctattatgcttcatcttcagaacctgctcaagttcgtggtaaaactgtatatatccaatattcaaacaggcaagaaattactaacaataaaggcactggggattcttctggcaatgttctacttgtcacttttgaaggtgttcagcctaatgatgttaccatagaagtccgctgcccccgattgagccgccgccgcctcagattcgccgtcgccacctcagattcgccgccgccgccgccgatttggacgctgtcgccggcgattcagcctccgccgccctggatttggcctccgccgctcccgattcggcgctgccaccctgaaacagcgccgcccctttcccttcccctatgccctatgccctcttgctgcttctcacctaggcgacggggacgccttggatccttcgggcgcctggacgcctaggcgacgcctttaaaacaagggtcttctctgtattaaatattttctgatgtacagtagctaccttgttaattcatgcctccagcatgattctccgttgtgctccatctgtttgttgcttgaccttgcgccttgttattctgccatttggttgaggatagattaatcctcaattgtctgacaattgttcacgtctaatttaggttttttcggcatttgggtttgttcacaagatagctacttttgagaaagcagctggtttccaggcacttatccagtatactgatgccccaactgctcttgaagctaaaaactcattggatggaagaagcatcccaaaatatttacttccagaacatatcggtgcctgccacatgcgcataaccttttctgcgcataaggatttgaatatcaaatttcagtcgcatcgcagcagggattacaccaatccttaccttcctgtgaaccaaacagcaattgaggggattgtgcagcccacggtgggccctgatgggaaggtaaaggagcctgagagcaatgtacttttagcatcaattgagaacatgcaatatgctgtgacagtggatgttctgcacactgtgttttctgcttttggagctgttcaaaaaattgcaatgtttgagaagaatggtggaatgcaggctctaatccaatatccagatataactaccgcagccgttgctaaacaagctttggagggacactgcatatatgatggtggttactgtaagcttcatctgtcatactctcgtcatactgatctcaatgtaaaggcacatgatgagagaagcagggactacactctttcagaccctaacgtgcagctgcaagctgctgcacaaacgccagttctaaggtctccgggagtggcatggcagaacactgcatcagtaccagctgctcctttttatgcaagcacagcgacttcaactcctattggagttggacaggtggctgcttggaatcctaacatgcaggcagggagttttgcatctgcatcgactgcataccccaaccaaccattaatggccaactccatgcctcactatcctgctattggatcgagttccggtgccccaccagtagcatttcaggcttcgcagcagatgacacagtatagcatgccccctggtgctccgccgcacgcaccaccagctggccaatcgatttactacccgaagtaagcggttttggttcaatattatcagagagcaatcaggcattgttacctgcgacaattgtggtccgcaaatgcaatcttgcgaattttgcaagtgcgctgtagcacttgtaacttgcgagcgcccttcgcaagaatgcatcagcgtctgctgtgtctgtaaaactgtcaaagatagtgtttacctattagcttgcatggtatattggtggtgagatatgttggagtagttttgatgcctcaagaatctcttacgc

SEQ ID NO: 89409 - DNA, 1958 bp, Zea mays
  Clone ID: MRT4577_181542C.1
accgtggggccacacgcgcgccctctcgaccgcttgccggatgcgcctcatgccctcaccaatcatcatgtcaccttctggattggaaccacggtcacgaagcgcagcccaaggcagagctccatcccccaccccccatttccccaataggccaaccccgtctccctcctcagcaacgtgctcggtttcttcctccctcgaatcggctgcaccccgtgccgcgatacgaaaacccaccaaaccctaaccctagctgcagtgccactaccgcccgcttgcccggtctccggagaggaagccgacccaagcaacgatgccgtccgggtcagcgacgcaatttcggtacacgcagacgccgtccaaggtgctgcacctgcggaacatgccgtgggaatgcaccgaggaggagctcgtcgagctctgcaaacccttcggcagggtcgtaaacaccatgtgcaacgtcggcgccaaccgtaaccaggcattcgtcgagtttgcagatcaaaaccaggcaatttcaatggtgtcctattatgcttcatcttcagaacctgctcaagttcgcggtaaaactgtctatatccaatattcaaacaggcaagaaattaccaacaataaaggcactggggattcttctggcaatgtcctacttgtaacttttgaaggcgttcagcctaatgatgttaccatagaagtcattcatttggtattttcggcatttggatttgttcacaagatagctacttttgagaaagcagctggtttccaggcacttatccagtatactgatgccccaactgctcttgaagctaaaaactcattggatgggaagaagcatccccaaatatttacttccagaacatatcggtgcctgccacatgcgcataaccttttctgcgcataaggatttgaatatcaaatttcagtcgcatcgcagcagggattacaccaacccttaccttcctgtgaaccaaacagcaattgaggggattgtgcagcccacggtgggccctgatgggaaggtaaaggagcctgagagcaatgtacttttagcatcaattgagaacatgcaatatgctgtgacagtggatgttctgcacactgtgttttctgcttttggagctgttcaaaaaattgcaatgtttgagaagaatggtggaatgcaggctctaatccaatatccagatataactaccgcagccgttgctaaacaagctttggagggacactgcatatatgatggtggttactgacgctttcataacgaattctgctctctaaaaagattacctatgcaatgtaaaggctcatgatgatagaagcagagactacactctttcagaccctaatgcgcagctgcaagctgctgcacaggcgccagttataagttctccgggagtggcatggcagaaccctgcatcagcaccagctgctcctttctatggaagcacggcggcttcaactcctgttggacaaccgcctgcttggaaccctaacatgcaggcccctggttttgcatctgcatcgacagcgtaccccaacccaccattaatggccaactccacgccttactatcctgctattggatcaagttcaggtgccccgccggtatcgtttcaggcttcacagcagaggccacagtatggcatgccccctggtgctccaccgcacgcaccaccagctggccaaccaatgtacttccagaaataagtggtttcgattcaatgttatcaaagagcattcacgcatattacctgcaactattgttgtccgcaaatgccatctggaatttttttggaagtgcattgtaactcttgtaacttacgagcgccctacgcaagaataccccaggctggctggctattaaaccgtcaaaaatagttttaacctattagcctgcgtggtatattgttatctcaaaaaaaaaaaaaaaaaaggcccctaaaaaaaaagcggcc

SEQ ID NO: 89410 - DNA, 656 bp, Zea mays
  Clone ID: MRT4577_181543C.1
agcggaaaagcgccatctcattcttcttcctccatcttgtctctacttgccccgcgccggggagccgcgagcgtcgcgccactcccatcgcctgcccacaactccggcatggagccgtcggcgtgggccgtcgccttcgccgcactctgcatcgtcgcgctcgcgccgccggcctcagggttctacctccccggcgtcgcgcccaatgacttcgagaaggtacgcgtaagacagccaccctttgtctcgcctccgtttctcctcctgggctcctggcacgagatctcctccctagcgctttgtgtgtttggggatcgcgtgcggttcggacctgctgtcggccgccccagatctgcgaacgcgcgggtcggccgcatcgagatctggctgcgcgtgttcgcgacgattctcgctctccgcgcaatcagtggcgctcagaatgtttcggtcctatgagccgtgcaaaaagcttcatatgtgcttcccccgtcacgttctcgtcgtgagattcatcgcgggtggatgcgtgatggagactgaaacaacggagatgtgctttcaccgggaaatgcccagaggccagagtgtgcacctaggagaatgtggagctgcaaaactttacatttacgagtgtctgagtcctccggcgataaaat

SEQ ID NO: 89411 - DNA, 409 bp, Zea mays
  unsure (1)..(409): unsure at all n locations
  Clone ID: MRT4577_181544C.1
cgggnncgacccacgcgnccgcccacgcgtccgnnnnnnnnnaacgcgggggggggggacagaacaggacaagcnnancgagaaagacacngcgagncnacaacaanccacacccaacacaggcgggggacacaacccanccaanaancnnncaggagnacagggncggagncancggccaannncnncaaaangaggaagaagggangangnncanggaacnanagncgnagganaaggcagggccggnnnggnnncancacgcggangggagcaccnncnngacgancncancacngagcgaggcgancngggcgncgagcgccnaaacagccnccnccnncngcgccncgagggnggcgagcgccncnacgagcncggccnccacacggcngcgccccccggccag

SEQ ID NO: 89412 - DNA, 1396 bp, Zea mays
  Clone ID: MRT4577_181545C.1
cgcagggttctgtcacagctgaacctcaggtcctcctcgctccgccatttcgcgggcctcggctgtttctccgccgcggcgtctagctctgcctccaccagcttcctgcccggctacgcccccgacttctgcgtattcgtggcgctccgtccgatcaagccgcccgccaccgccgtagcgaaccctcccgcctctccatctccgctggaggaggagcaccggcggcaggccgccgttccatggcacagcgacgacccgccagcaccatccgttcctgcgccgctgcgggtggggatcgtcgggttcggcaactttggacagttcatcgcgggcggcgtgcagcggcagggccacaccgtgctcgcggcctccagatccgactactctgcctactgcgcccagcatggaattcgcttcttcaggagcgtggacgcgctgtgcgaggagcagccggacgtgctgctcatctgcagctccatcctgtccacggagagcgtcgtccgagccatccccttccacaagctccgccccgacaccatcgtcgccgacgtgctctccgtcaaggagttcccccgcaatctcctcctcgaggttctcccaccaggattcgggatcatctgcacacacccgatgttcgggccggagagtggcaaacacggctggggcaagcttcccttcgtcttcgacaaggtccgtgtcgcggacgacggggatcaggcggcaacgtgcgaccggttcttgagcatatttgagcaggagggttgtaggatggtggagatgtcgtgtgccgagcatgatcgctacgccgcggggagccagttcatcacgcacacaattgggagggttctgtcacagctgaacctcagttcaaccccaatcaacaccaagggctacgagaccctgctgcaacttacccagaacaccgtaagcgacagtttcgacctgtactacgggctcttcatgtacaatatcaatgccacagagcagctcgacaggctggaaatggcatttgagaaggtgagacagatgttgtctggcaggctccacgacttcataagaaagcagattgtggagagggcggacccttcaggaaaattggcaaatggcaggtccagttctcctgcagcgcaccacttatcgacattaacagaagaaaataagacacgtgtatcccccgctcttactctagcctctcctacgctttagttaaacttgtataaatttgaccatgttttgttaataaaaaaatattgataaaaaaaaaaaaaaaaaaaaaaaaaaagcatcattcaaatttctgccctatcaactttcgatggtaggataggggcctaccatggtggggacgggtgacggagaattagggttcgattccggagagggagcctgagaaacg

SEQ ID NO: 89413 - DNA, 350 bp, Zea mays
  Clone ID: MRT4577_181546C.1
ggttggaaccgagaccgcggttctaaggggaccgggaccagggggggggcaaagaaccccccaggaagaggccgggggggggaattttccggttcccccccgaattcttgaaacaaacacagaagccgccagacaaaaaaaccccccctccccgaaaaaaaggaaaagctggcccccggaaggacccggggggtaaggctcttgaggacggggacggcccccccctggggggggtcaaagccaaccccgccaccaggaagaagaccctctgtaattgccccccccaccaagggcttatttgaaaccaccggggggaggcccctttaccattcaaaaaaatttgggccccc

SEQ ID NO: 89414 - DNA, 380 bp, Zea mays
  Clone ID: MRT4577_181547C.1
cgcatggttctgtcacagctgaacctcagttcaaccccaatcaacaccaagggctacgagaccctgctgcaacttgtaagtggtcttgtccattcttgattgctgagacgaatgctggctcttatcgcctacgaaccttgcagacccagaacaccgtaagcgacagtttcgacctgtactacgggctcttcatgtacaatatcaatgccacagagcagctcgacaggctggaaatggcatttgagaaggtgagacagatgttgtctggcaggctccacgacttcataagaaagcagattgtggagagggcggacccttcaggaaaattggcaaatggcaggtccagttctcctgcagcgcaccacttatcgacattaaca

SEQ ID NO: 89415 - DNA, 833 bp, Zea mays
  Clone ID: MRT4577_181548C.1
atcttacgacaaggagtcgtgtccacctgtcgctcagcacttcaccttcagtcacgtcgctatgcgagctctgctctctcgcatcccgatctcccctgctgctttcttctcctcctcatcccaaaccctagcccccctccgcctcggccaccgcttcgtcgccatggccgccgccgccgcggaggagttcgtgaagggtcgcgtcttccccaacggcgtcgcggtcatcaccctcgaccgccccaaggccctcaacgccatgaacctcgaaatggaccttaggtacaagacatttcttgatgactgggaaacaaatccaaacgtgaagtgcattcttgtggaaagcagttctccgcgtgccttctcagctgggatggatattaagggcgttgcagcggaaattcaaaaggacaagagcacatcacttgtgcaaaaggtcttcacagctgagtactctttgatttgcaagatacatgagtatgcaaaaccttatatatgcttgatggatggtgtgaccatggggtttggaattggattgtctggacatgggcgctaccgcattattacggagagaacactgctggccatgccggaaaatggtattggcttgttcccagatgttggctttgcttacatcggtgcaaaagcgccaggagggggtgcagtcggagcttaccttgggatgacaggaaaaagaatatcttcacctgctgatgctctattcattggtctcggaacccattatgtacctttccggggacttgggttcactcaaggaatccctcctgagtgctaacttcactgctgatcctcacaaagatgttgagtcactc

SEQ ID NO: 89416 - DNA, 885 bp, Zea mays
  unsure (1)..(885): unsure at all n locations
  Clone ID: MRT4577_181549C.1
acgtgtccgcgacgcatcattcaaatttctgccctatcaactttcgatggtaggataggggcctaccatggtggtgacgggtgacggagaattagggttcgattccggagagggagcctgagaaacggctaccacatccaaggaaggcagcaggcgcgcaaattacccaatcctgacacggggaggtagtgacaataaataactgcccctacgcgtctgccaccgcctcgtccacctgcgcggcctcccctcctcgcttcggcctcctctcccctccaccatggcggcgccccaacccggctgcaaaacccttcgccccaccactacttcttcgccgtctcctgccggcccggccaccaagaggtccaggacaatggccacggacgcggcggcttccccggcctcggcggggtgctccgcgatgaaggccgagttcaccggccacgccgagtacctcaacgcgctgaatgataaaagggaaaggcttgtgaaagcaagtcgggatgtgacaatgaacagcaaaaaggtcatctttcaggtccacaggatcagcaaaaataacaaggaggaagttctttcaaaggcggaaaatgaccttgctgctgtggttaaccagtacattggaaaattagtaaaagaactacaaggaactgacttctggaagctcagaagagcctatacccctggtgtacaagaatatattgaagctgcaacattttgtagattttgcaagactggcactttattgggtctagctaaaattaatgattctttgcttgctctaagtgataaatccattgagcccttgcagataaatgtgcttgactatcttttaggngttgctgatttgtcaggagagctggtgaggctcgcaattggacgtat

SEQ ID NO: 89417 - DNA, 534 bp, Zea mays
  Clone ID: MRT4577_18154C.1
ccccccaaaaaacatcccttattaaaaggaacgtcatcccacgggggtttttttaaaatcaaatcgaaggccaaatttttaggggggggctaaaaactaatctgaaccactgggtaaaaaaacccccaaggggtctaaaaaggcccaaaagaaaatccccaaaaaaatcaactaaaactgggcccaatgttttttttttttacccctttccaaaaacctaaattttggaaacaaaaaccaccccctcctttttaaacccctggaactgggccaccggggggtgccccctggaaaccctgggaaaggcctggttttccttggccgacccccccttaaaaaaaaacccaaaaaacttggcggcctttaaccaaaaatttccaaaattgggctttgcccaagcccgttttttttccccaaaaaaaacctccccccccactttttccccctaaaaccgccaccccaaatcaaacaacccggagtaaaaagagggcagggagtcgtattcggccaccgatttcccggaccccttggcct

SEQ ID NO: 89418 - DNA, 2064 bp, Zea mays
  Clone ID: MRT4577_181550C.1
atggcaggtgcacccgatccaagcgtgacgtcggccctggaagcgcagtccaaatccatggaggcgcaatcaaggacgctggcgactcaatcccaacttcttcaacaactctgtgatcgattggagtcacaagatcaccgatggtcccagatggaggatgcggtcaagatgaacaccaccaatatctccaagttacaggagaagctgggtgatggagagattgaagcattccgaacggatctcacccgttccttgggcgaccgcgtcgaagcacagatcgcacaattggaggcagcaaccttggggcgtgtcgacggattggtgaccgagacctccaatcgggtggcggtgctggagaacgccacctcggcgttcgagtcttggcggccacgagtcgaacattccgtggacggcatcaggaactccgtggacaccttgcgctcggaccttgctcggctgacccaattcctcgagcgcaacaacaacaccacaggagatcatcgcggccaagacagcatccttggaccatatgtaccagcgggagagcacacatctgcttccccgacttgtactggaaggcccgacgggcacggcactgcaactactaaccgggagtatggttttgggaaaccacacccaatccaactcccgatcaatggtatatgttcttctcaacctcgacgtggtcaatctgagttccattctgtaccttgcggtcgcacttttgacatgaatggggttgaggggccagggcacttttcagccaagaatttaggcaacctacccaaaattcacttcccatcctttgatggagataatcctcggttgtggcaaaagcgctgcgaggattatttcattatgtatgaggtagatcctgctgtttggattcgagtttcatctatgcagttcactggaccggctgcccgttggttgcagtcagtagagtcgagagtatccactatgtcctggggagagtttggtaggttgattttagaacggttcggcaaggaccaacaccagctgttgctccgacaactgtttagcatccgacaaacacattctgtggcttcttatgtagatgagttctctcaactagtagacaaattaaatgcctaccaaaccatgtctgaccccttatattacacgttgaaatttgttgacggtcttcgtgacgaagtcaaagctgttgttatgcttcaccgcccatcagacctcgatactgccatggttcttgcacaattgcaggaggaagctggggctatgatgaagagaaccggttccaaatggggtgattctactactgcattcaagcctcggctaggggctgcaccagctcaacctgttaaagaacccaagcacatgactgctttgtccacaggcgacaaatccattgggggtactttaccatctacagatgaccgtattgcctcattatatgcctatcgcaaagcaaaagggctctgctacaagtgtggtttgcaatataaccgtggtcatcggtgttcagacacagtacaactacaagtagtggaggaattatggcaaatggtacaatgcaccaatactgaagcaattccagaatgcgccgaggtgtctgaagacaatgttgagattaatgtgttgcaattgtcacaagcagctgtggatgggtctgaggcccctcgcactatgaaatttgtgggtcacatagcaggcatggatatcttggcactgcttgattctgggagttctcattcttttttgagtatggctgtggcttcttctattcctacaatttctacaatggaccagccaatgaaggttcaggtggcaaatgggtcttacatgagctgtgcaaaacatattgtggatgcttcttggtccattagtggggttacattttcatccacattaagagtattacccttgtccacatatgatcttattgtggggatggactggttggagagtcacagtcccatgctcatacactggtcacaaaaatggctcagtattcctcttcaggacaccacagtaaccttgcatggagttaagtcctcagtgttacagacagcagtgatacag

SEQ ID NO: 89419 - DNA, 700 bp, Zea mays
  Clone ID: MRT4577_181551C.1
ccggccgggatagccgagtcttccgtcctatccgcgtgttgcttacagtagccgcattgtctggtgtgtaacttgagcttcgtttcgagacgaaaacgtgctatagcatgctaccctgccgttgaggcttgatcgatcactgtctgctatacacgttccattcatcgttgttgtcccgggtcgacagtcagccctttgtcatttgacgaaagatatggcttatcttgttggctcaggccaaagagatccgtcaccaggatctatgatgagtccctctggctcgctcggcgtttctgtcaagcttagcatatagctgacccatcttctaactgtctttgaaaagacacgttagataacttctgacgctcactatgatcggtccgaaggagtgctggttgcgaatcgaaatcgtgagccttatcacgtttctttggccctgtcgcaaagctccgcaatgccatcgttcactgggttcacttgaacctagttaaataactcgtcgaagttatgcttgggttccgcagtcacatcggccagttgtatttatcatggatggtcgttgtatcgttgcctgctatcaattgagcataacataggtctctgaagagtattgccaggtccaacgtccaagcccagtgttcccatggtagaaaaactagtctctgtttaatccaaaaaaaaaaaaaaaaaacccgcggcc

SEQ ID NO: 89420 - DNA, 223 bp, Zea mays
  Clone ID: MRT4577_181552C.1
aaagacgtgctcgcagaatcacacctgacacgtgctcatgaggaggggagtcgttcttcagcaccaggacgtggcagggacatggtgcgttgttgtgcgtccagggtcctgtgatggtgcgagcacacatctgcggtgcatgatgccactgccgggtgctgcagggggttgcagtggcgttgtactggccttgaactgggccaggccacgattaaggaccccg

SEQ ID NO: 89421 - DNA, 289 bp, Zea mays
  unsure (1)..(289): unsure at all n locations
  Clone ID: MRT4577_181553C.1
agccggcacaagtcttctctcacaatcaatatatgaactggcatgtctcacatgtggcgctgcccgtgcccgcgacttcatacattttcttttcctcccccccactggggggggggggggggttcccttttnnctcacacctcacctttttgcattctaatccccnggccttttttaacctttcccttgtggacactcaacaggtcatgatgcgggcttcgctgaaatgcggccgtcttgctcggcgccttgtcttctgaatctggttcttcgtgcgggccttctttcc

SEQ ID NO: 89422 - DNA, 951 bp, Zea mays
  Clone ID: MRT4577_181554C.1
cctcgaggccggccgggttttcttaaacctctatgtggtgctcatatttttcaatctacaggttgtcgaagacttttgttgcagatgatccaaatgttgttgctatccacatgaagaaaggcgtgaggcgatagctgtagagacatgacattgccacaacagcggtagtgccatatcggtgggcttgtagatgcttcttccatgcggtctgcagacgacagtgacctcctggtggcggtggtgctagatcgctggggctgaagaggcgccctgttgtcacaacaagtcttagacgtggtctgcagattagatgatagtgacttcccttccttgcgactcatggtttgttggagctgtaggattctcccggcacaatggagtcggcactcacgatggccttggacacaatcctgagcaacaagatgttgaaatactatttggacctggctatactggtcttgcggatcttgggaatagttgatatatggcttcaataatgcaagtcatgtttttaacccaccattccatatcaagatactttgagaaacagagtttgaaagctgcatttgctactgcactagctgatccaacagtagacctaaacatgcaaatcaatcatcattctggctagcatgcacccaaggttgaccaaactgattcgacagttttgggatgagatcataacgttcgtccgacttttgcagagatcattacagaactccaagatattctacaccatatctaggcaccgaagggatctctgaatgtgatctagcatgtgttgcttttgggtgtgataataagggaataaagttgtagctaatatgattttttaggagccccctcccatgccctttttgtttaaaccaaaaacttggcctaagggtatattgtttttaacaggcccccaagggatccctgaatgtgatctagcatgtgttgcttttgggt

SEQ ID NO: 89423 - DNA, 337 bp, Zea mays
  Clone ID: MRT4577_181555C.1
ggctgaaaccttccggggggggttttttcgtctggcgacccactttttttctttttttttttaaccaaagagaggggcccataccctacccaaactggcttgggggggaatgggtagacagaaagaatcgggccctaccttaacaaggaacaaaaggtgtgtaccggggaaggtttggggcctcgcgccactgacacggggcccaacaattatttccaccggatgcacctttttttttgcccaagttacttttacacccgcacggaaaactccacgcgaaaggagcttttttatacctatcgggtttctgtccacccacacacccaggggggggccc

SEQ ID NO: 89424 - DNA, 585 bp, Zea mays
  Clone ID: MRT4577_181556C.1
caccttcacaaaagggagggtatattaccaacacagacaaagtcaaagataagtatggtgcatatctggaagtctcaaggctggaaacattttttcatgaactctccatgtatgaagataaaattttcctcaaaagaatgatctgaaacaggattcgttgctggagacatatcatgaaatgttgcgtgaagctccagaaagcgaaagaccagaactgagacaaaaattagatgatctcctttttaatgaagaaaacccatatgacagtataagactaggcttaccaggatggaagtctcggttcttcagggagcatttcggtgccaaaacttctagtgaaattgggaagctgcagaacgacatggcgcaaaagtacttagaaggactttgttgggtgcttcaatgctatttcgcagacgttccatcatggagctggtactacccgttctatgttgctcctttcgtatctgatctcaaaggtctatctaggatcgagatatctttcactgtggacaaaccattacgaccattcgatcagcttatggcagttttaccgatgcaaagctggggtgctctcccaaaatg

SEQ ID NO: 89425 - DNA, 328 bp, Zea mays
  Clone ID: MRT4577_181557C.1
aataaatttagagatgtacttccttatttctggggggccacaaacatcatccaaaaaactccattcttgaactataactcatacgcaatctaccatagggccccctgtatgacgggctgttggtaaaacgttgctgggtttgtcaaagcaagttggttgaatggcatcaatagttgcagctcgcagacggcgccagcgttaggcgcatcgtgcaggtagaacggcaacaactggcgttgtgtcaagaaggcaacagggctcacatgatctagctggttgacaagtcgtagctgttgctgttgtaaataaccagcagagttcaatgctg

SEQ ID NO: 89426 - DNA, 240 bp, Zea mays
  Clone ID: MRT4577_181558C.1
cggaggactcttgtgaaactttaagtatggccaacgagtacatagtaaatattgtcggcggacgattcattttccagtgaggtgaagatcatcgagcagtctctgttcgttgcacattggagaccctactggagagcctagaggcattcgctgtggttggatcaacattgctgtgaaatggcaccttcgccgtctgtacacttgttcagcttggtgccgtctacctattgtgttcagaga

SEQ ID NO: 89427 - DNA, 303 bp, Zea mays
  unsure (1)..(303): unsure at all n locations
  Clone ID: MRT4577_181559C.1
ccctccctcccctcccattcccatccagatttggccgctccaccgccgctgccccgccgccaggtcggagcggnnnnctgnnnnnatntgggtttgtcnattctagggagatggtaatgaaggtggttggaattgagaatgttgtagaaatggttaagggaggtaatgagaaagaggagaaggaaaaagagggggaaaagaaaagganggaaaaagattgtgagatttttctttttttttttttttataaaagagagacgagaaaaaagagagtggggcgtgaaaaggttgtaataataggag

SEQ ID NO: 89428 - DNA, 421 bp, Zea mays
  Clone ID: MRT4577_18155C.1
tgacgtggcgggacccgaacctaagcactcaattcgagtccaggtactctctgacgacagaggcaaacgcgggggggggaacaacaatgttctcacggtacaaccaatgccaccgccacaaccactatcacctattgtctaacagcaacctgtgaatcctaaccaaccacaataactcctatggatcaaaccgagctaacaagaaaaactaccacgcgaaaatcccaatcgcaaaatctagtgggatcactatcactgacagctactgatgcagcaccccaaacgaaaacaacatcgaccaaaacggatcgagttccaaaaacagcgaatattatagatacatgcacaacacactctactgctccagcgctgccttcatcgataatgacaacgcttatggctgcaaacacacctactacta

SEQ ID NO: 89429 - DNA, 533 bp, Zea mays
  Clone ID: MRT4577_181560C.1
ccggccggggtaaacatcatcagcccagccatcggtgatcagctctcgtcgcgagggagtgtgcttcacctggcaaccatccgttctcggcttctcgcacagcaagacgattcagacgaacagagcgagggagatgattggttccgcagaccaccgcaccaacgcggagatgatttggttctcgtttccaagattcggtccgtcttttcctcactccaccctttttctgggtttaaaaaaaatgggacgagggagatttcatccgtccgtcattccgtccaggattgcagaatccaagaagccagcatcaaggctgccgtgccgtgccgatgcttgtcaatcatcgcctccgccaccaggagagcttgattgaggggagctgggtcaccaccagccacccagctactccctccatttccagcccaccgagtgactagctgtgagagatggcagtagtatgtattacaaaatcatgaaacgcgatggtttcttttcttcttcttcttaactaaaaaaaaaaaaaaaaagcggcc

SEQ ID NO: 89430 - DNA, 921 bp, Zea mays
  Clone ID: MRT4577_181561C.1
agtcgtagtactgcagccagcgtgggcgcgcggccccggcgagcgcggcccggcgcaggcacagcggcctcgacgccgatcctctctggcgcgtggcgccgaccatggcccagcccgacgcggctgcggcggtccggtggcctggcccccacgcctagcatggggcccggcgcggccttagccagcgcggggcgcggctgcccagccacggcacggtggcacgggcgcgtaggcgacggccccgtccctgacggcgcgcgggcgcagccccggtgtggcgggcacggcctccagcgggcgcggccttagccgcggaggcgagcgcgcggcctcggcccgatggcgggcgcggccccgtgggcggcgcgtgggcgctaggccccatgcgcgacggtgcgggcgcgaggccccctacgcgacggtgtgcgcgcatgggcaggcggccccgacgggcgtctcccctgtccaggcctcggcggcctctgcggtgcggccccaccatcctgcgggctcgtggccacagcatgagtgtgctgccacggctgggcggtcgggcaccggcgcgggcacgacctcatcctggcacgggcgccatagccatgcccgcatgcgccttggccgtcgtcgctgttcacttggatgcaggcaagcaaaagcctgcaggtctcaagcgcaggagtggcagaaatattcattaataatgaacttgtaagtgtgcagttcgtaccttgtaaaatcagacttctctgatttgtttatttgaacgaatgctcttataaaattggtgaatttgtctaaaagaacactaaggagcactgcttgtgcgtgcggcaattggacagggacttcatgcaggaaccgtttgttgatggcagtgccctattcttgtcgagaacaacaagtattctccttcgcatccct

SEQ ID NO: 89431 - DNA, 3319 bp, Zea mays
  unsure (1)..(3319): unsure at all n locations
  Clone ID: MRT4577_181562C.1
caggagcagttgctgaaagagtctgctccatctgcttctgaggaacaagctatgatgaataacttttccaagaattctgagacttcacattttcttgatagcaatgctgtggaagtgagaactggaacttcagagcctactgttcaaagttccaatgacgaaggtgactcggatattagtccagaaacagacctagctgtttgcaatgttcctctagtttcatctgagggacaactgaaatctgagagtagggctgatgatcaacaggctgctgaaccaacagtttcagttcgatcagtatccagggaaaagcctagtgttgagatcgccaggtcaaagtccgcagctgggaagaggaagaagaaaaaggaaatgcttgctaaggctgatgctgctgggtcttcagatctttataatgcatacaagggaccagaagagaagtctgaaatggttggtactgcagatggtgctgatagttcttcaatagttgacacaacacatgtgctgcttgatgaagcagaaagggatgttagtacgtttgcagatgattgtaagaaaaaagttgagcttgatgattgggaagatgctgcagacatgtctactccaaagctggcaccagattctggaaatcaggctggcaccacccaagtgctagattcagatacaagtgaagcaaacagcaggaagaaatattcacgggattttctgttgaccttgcaacaccactgtactggtcttcctgttggatttcagatgaatgaagctgtcaatgcaataatgaataatttggttggaaagtcttatgttgttgaccgggaaccttaccctagtcctggaaggggtttggaccgcccaacttctcgtggtgaccgccgtggtgctgccatgactgacgacaggtggactaagacgggtgttcctctcagtcctggtcgtgatgttcacatggacctgccaaatggaacatcagttgtcaactaccgtagctcaggaggtaatcatggtgttttaaggaatccacgtggccaaccatcaaatcaatatggtggtggtcttcttgcaggacctgtgcattctgttgggcctcaagtacctcgcagcggctctgattctgatagatggcagcaaaagggtctcatgccttcccctgtcacacccatgcaaacaatgcacaaagcagagaggaagtatgttgttgggaaagtttctgatgaggaggaggcgaaacagaggcagttgaaaggcattcttaacaagctgactccacaaaactttgaaaaactgtttgaacaagttaaggaagtcaacattgacagtgtagcaactcttactggggtcatttcacagatatttgacaaagctttgatggaaccaactttttgtgaaatgtatgctaatttttgcttccatctggctggtgccttgcctgacttcagtgaagacaatgaaaagatcacattcaaaagattgcttttgaataaatgccaagaggagtttgagagaggtgaaagggaagaagctgaagctgataaaacagaagaggaaggtgagatcaaacagaccnnnnnnnnnnnnnnnnnnnnnnnnnnccgtgctcgaaggcgcatgctgggaaacattaggttaatcggagagttgttcnnnnngaaaatgttgacagaaaggattatccacgcgtccgggaaatcatgatgatcctgatgaggagaacattgaagcattatgcaaattgatgagtacaattggtgatatgattgatcatgtaaaggcaaaggagcacatggatgcctattttagtatgatgcagataatgtcaacaaatcagaagttgtcttctcgtgtaaggtttatgttgagagattcaatcgacctcaggagaaataaatggcagcaaaggcgtaaagtcgaaggtcccaagaagattgaggaggttcacagagatgcagcacaagaaagacatgcccagtcgagtaggttgggacgtggtccagctgttagttctgttccaagaagagcacatcctatggattatggccctcgtggaccatctgcatcagcatcctcaagttcccaacaagggagcattcgaggaatgcctccacattcgcgtggttcacaagacatccgacatgacgaaaggcaccagtttgacaatagaactgttcttccccagcgggtagtcaaagatgaagccatcactcttgggccacaaggtggccttgctaggggtatgtctataagagggcagccaccagtatcaaatactgaaattccttctgttattgaccaccggaggatagtatctagttctaatggctataactctgcggctgattggacatcatcatctggaagagaagattctaattcaagacttccagatcgaacctctggccgaattcctgcttctagtcaatctgctgtaacttcgcagaggcctgccagccaggaaggccgttcaagaagtaaatcatattctgaggatgagttgagagaacaatctgttttgaccattcgagaatattacagtgcaaaagatgaaaaggaggttgttttgtgtattgaggagctgaatgctccaaatttctatccatttcttgtgtcactttgggtaaatgattcctttgagagaaaagacatggaaagagagttgttggctaaacttctcgtcagcctttgcagtggtcgacataatttgttgagcaagcaacaactcagtgatggcctttcaaatgttcttgcctcattagaagataatctaagtgatgctccaagagccactgagtaccttggacgacttcttgcaaggtttgtggaggaaagcatattgctcttgcaagaggtaggtaaattgattcaagaaagtggagaagaaccagggtacctaatacaaggcggtattgcggctgacatcctaggtgcagtcctggattccataaaatcagacaaagggaattcattcttggatgagatcaagacaacttcaagtttaaagttggttgatttcagaccacaacatcttaagcgatcaaagttggacgccttcatgtaggcacataagttattgttacctggtaagtctgttctagtccaggtgtaaatattgttcttgggtagttatttgttctgaagacatacacttgatttaaatactctgaactattctgatgacagannnnnnnnnnnnnnnnnnnnnnnnnnnnnnnnnnnnnnnnnnnnnnnnnnnnnnnnnnnnnnnnnnnnnnnnnnnnnnnnnnnnnnnnnnnnnnnnnnnnnnnnncgaggtcgcacgtgccgtagattgattanccctcacccc

SEQ ID NO: 89432 - DNA, 374 bp, Zea mays
  Clone ID: MRT4577_181563C.1
ggggcaccaaaggttactaaacataccagcttcaaaattagcaggggaaaatcaccatgacacaaaactttcaccaactttttccagtacggggagaaacgcgagtaaaatcttgcaaaacccatgaccctaaaacatgaaggggatcgcatatgcaagtctgcatcaaaacagaagggcgtccttacgaactagtactgacaccagactggagttgcttgacctccccacctactcctggcaggctttatgggtgtgctcctctatgcctctcatgtatctcttatatgcacttcgccaccacataggcccactaaaacaaaactggagatatgctacaatatcatcatcaactttctccccatcgttaggga

SEQ ID NO: 89433 - DNA, 4670 bp, Zea mays
  Clone ID: MRT4577_181564C.1
caaacctgctgctgcacgtaaggctattgtaaaaatactcatccagacacacatgaagagttgaagcttgataagaggatggactcttctgggcagagagctgcaccgagtattgcacaacaatctcagcctggtgttaattatgctcctcatttgggcttctttcatcagccaccgaattcctacaaccagtcaggaatgtattactctactacagctagtgtgaaccaggttgctactggatcatcgggtcctagatataattatcctgtcactcagtctgcgcaagcgatgacatatatcagtccatctgcagcgcctccggtatctggtcagtcacaatatacagttaagccgcaccctatggggttgctgtctgaaaaatcaggtactcatgtcacaataagtgctccaccagcaaaatctgatccacctaagttacatgctgctggggatgctgcgtcaagtctgaaaaaggataatgaagttgtttctgggatcactgttttaaataaaccaacccttgagagggagagtaacgatcctttagtcacagtgaagcattccactgtgataagcccgtccttgccaattcatggtgaaaaaccacaaactttggtgacatcgtcgcctgttgctaattcagtctcacctgtgactggagctgatgggaaaagcaaagaacccattcaaaggtctggatcatttaaagatagtaagaaaaatgtcactaaaaaggatgtcaggaattcatatgaaccaccaaatccagcttcatttgttgaggataaggttcaaactgtaaaggttggagatgtcgatctccaggaaactaaaaagctgaacaatgagttggatttgaccaactcatcttcagctccaacggttccactggcagttagtacagagaatgccgacagcacagcagtaaccactgctgatgttcctgggacagatacaagctcaagaagaccatcttctgagggtactggtgagcctggagtggaaagcttcactgtttctgctgttgaatgtgacgaaagcaagaggactcacaaagttgtgaaagatcctagcaaggataatatttcttctgatgctaccaaacatgaattgcctaaggaatgtgcagtggactctactgaacaagcatcagcagtgacttctaacactgatgattcatatgcagcacctctagtaactaatcaggagcagttgctgaaagggtctgcttctgagaaacaagctgtgatgaataactcatccaagaattccgatacttcagcacatttttttgatggcaatgatgtgggcgtgacaacttctggaacttcagagcctactgctcaaacttccaatgacgaaggtgactcggatattagtccagaaacagacctagctgtttataatgtccctctaggttcatctgagcgacaactgaaatctgagagtagggctgatgatcaacagcctgctgcaccaacagtatcagttcgatcggtatccagggaaaagcctagtacaaagtccgcagctgggaagaagaagaagaaaaaggaaatgcttgctaaggctgatgctgctgggtcttcagatctttataatgcatacaaaggaccagaagagaagtctgaagttgttggtaccgtggagggtgctgataattcttcaacagttgatacaactcatgtactgtctgacgaattagaaaaggatcctagtacatctgcagatgattgtaagaaaaaagttgagcttgatgattgggaagatgctgcagacatgtctactccaaagcagccatcagattctgggaatcaggctagcatcacccaagtgttggattcagacgtaactgaagcaaatagcaggaagaaatactcacgggattttctgttaactttgcaacatcactataccggtcttccttttggatttcagatgaatgaagctgtcaatgctataatgaataatttggcaggaaagtcttatgttgctgaccgggaaccttaccctagtcctggaaggggtttggaccgcccaacttctcgtgaccgccgtggtgctgccatggctgacgacaggtggactagggcgggtgttcctctcagtcctggtcgtgatgttcacatggacctgccaaatggaccatcagttatcaactaccgtggcggcccaggaggtaatcatggtgttttaaggaatccacgcagtcaaccatcaaatcagtatggtggtgggcttcttgcaggacctatgcattccgttggacctcaagtacctcgcagcggctctgatgctgatagatggcagcaaaagggtctcatgccttctcctggcacacctgtacaagcaatgcacaaagcagagaggaagtatgttattgggaaagtttctgatgaggaagaggcgaaacagaggcagttgaaagctattcttaacaaactgactccacagaacttcgaaaaactttttgaacaagttaaggaagtcaacattgacagtgtagcaacacttactggggtcatttcacagatatttgacaaagctttgatggaaccaactttctgtgaaatgtatgctaatttttgcttccatctggctggtgccttgcctgacttcagtgaagacaatgaaaaaatcacattcaaaagattacttttgaataaatgccaagaggagtttgagaggggtgaaagagaagaagctgaagctgataaaacagaagaggaaggcgagattaaacagaccaaagaagaaagggaggaaaagaggatccgtgctcgaaggcgcatgctgggaaacattaggttaattggagagttgtacaaaaagaggatgttgacggaaaggattatgcatgaatgcattaaaaaattgtttggaaatcatgatgatcctgatgaggagaacattgaagcattatgcaaattgatgagtacaattggtgatatgattgatcatgtaaaggcaaaggagcacatggatgcctattttagtatgatgcagataatgtcaacaaatcagaagttgtcttctcgtgtaaggtttatgttgagagattcaatcgacctcaggagaaataaatggcagcaaaggcgtaaagtcgaaggtcccaagaagattgaggaggttcacagagatgcagcacaagaaagacatgcccagtcgagtaggttgggacgtggtccagctgttagttctgttccaagaagagcacatcctatggattatggccctcgtggaccatctgcatcagcatcctcaagttcccaacaagggagcattcgaggaatgcctccacattcgcgtggttcacaagacatccgacatgacgaaaggcaccagtttgacaatagaactgttcttccccagcgggtagtcaaagatgaagccatcactcttgggccacaaggtggccttgctaggggtatgtctataagagggcagccaccagtatcaaatactgaaattccttctgttattgaccaccggaggatagtatctagttctaatggctataactctgcggctgattggacatcatcatctggaagagaagattctaattcaagacttccagatcgaacctctggccgaattcctgcttctagtcaatctgctgtaacttcgcagaggcctgccagccaggaaggccgttcaagaagtaaatcatattctgaggatgagttgagagaaaaatctgttttgaccattcgagaatattacagtgcaaaagatgaaaaggaggttgttttgtgtattgaggagctgaatgctccaaatttctatccatttcttgtgtcactttgggtaaatgattcctttgagagaaaagacatggaaagagagttgttggctaaacttctcgtcagcctttgcagtggtcgacataatttgttgagcaagcaacaactcagtgatggcctttcaaatgttcttgcctcattagaagataatctaagtgatgctccaagagccactgagtaccttggacgacttcttgcaaggtttgtggaggaaagcatattgctcttgcaagaggtaggtaaattgattcaagaaagtggagaagaaccagggtacctaatacaaggcggtattgcggctgacatcctaggtgcagtcctggattccataaaatcagacaaagggaattcattcttggatgagatcaagacaacttcaagtttaaagttggttgatttcagaccacaacatcttaagcgatcaaagttggacgccttcatgtaggcacataagttattgttacctggtaagtctgttctagtccaggtgtaaatattgttcttgggtagttatttgttctgaagacatacacttgatttaaatactctgaactattctgatgacagattaccaatgggtgcggtcaccaagcagtttagtttcttcgcacctaaatacccaacggcctttttgatgtactgtaaaacctctctgctcctacttgctgtccctgaccgtacactatttataagatggaaggcgatcggccacctatgtagcacggacggatacaccaattaggtgcggacgtgcggaggtgcggtatcctgtatcggatacttaacagatagggataccccatgatacgtacgaataaaaaaagaaaaaaaaaaaaaaaagagaaaaagaagaaaaaacaa

SEQ ID NO: 89434 - DNA, 276 bp, Zea mays
  unsure (1)..(276): unsure at all n locations
  Clone ID: MRT4577_181565C.1
cttcttctactactgcgccgncgtaactattctaatggctcgcttccccgtggtcgcggacatgcgtggcctccttgccgaagtctcggccaaacaagccccgtccgccacccctaccacagctctcaaggtcgcgcccaagatggtcgcgctgttcccaccctctttgctgtgcacacacacctctttgtttcagaccgggattcattaatcgctttccgttgtaacaatacagagctcttgagggaattgtacctctcgggagcccgaactttt

SEQ ID NO: 89435 - DNA, 253 bp, Zea mays
  Clone ID: MRT4577_181566C.1
ccgcaatcgcaagaaccctatcgccgccgcacccgcaggaatgggtattgacctcctcgccggggggaggaataagaagaccaaacgcactgcgcccaaatatgacgatgtctacctcaagctcctcgtcaagctctaccgcttcttgttcaggaggaccaacagcaattttaacgctgttgttcttaagaagctttttatgagtaaaaacaaccgaccaccaatcttcatgcgccgccttgttaagtttatt

SEQ ID NO: 89436 - DNA, 1345 bp, Zea mays
  Clone ID: MRT4577_181567C.1
gggtccctcgggccggccgggaaattcgttctgactccaccgtaagtccgtaacaccgcctaatcaagcaaagagtctacttcggacggctcggcgaatggagattatcacacgggccgccttgtgctgaatccagaggcagcgagagcgagtgcgagacaccggatcccgtccgcccccggaccaagaatcccaacctcacagcgatggcagcatcccgcagcgaggaacgtgatcagaatcagccagtggtgcttgtgacggggtgctcggagggcggcatcggccacgcgatggcacgcgccttcgctgcggccgggtgcgccgtcgtggccacggcgcggtcacgcggttccatgcgcggtctcgacggcgacccgcggttcctgctgctggagctcgacgtgcgctccgacgagagcgcgcgcgccgccgtggcggatgcgctgcgggagcacggccgcatcgacgtgctcgtcaacaacgctggggttcacctcgtcgcaccactcgccgaggtgcccatggagtccttccaccaggttttcgacaccaatgtctatggtgcaatgaggttaattcaatctgttattcctcacatgatggaaagaaggaaaggaacaattgtgaatgttggaagtattaccgctctggcacctggaccatgggctggtgtgtattcagcatccaaagctgctcttcatgcattgagtgactcgttaagggttgaactaagaagcttcggcataaacgtgatgaccgtcgccccaggagggacgaggtcgaatcttgggaattcttctgcagccaagtatgatcagatgcacgagtggaagtactacaagaaatacgaggaagggctccgagccaggactggcatttcccagggccccaggtccactccagcagaagagcttgcaaaggcggtggttgcatcggttctaaagaagaaccctccagcttggttcgcttacggccagtactctgccattctgtcgattttgtattatgcaccgctatggttcagagattacctctataagtttgtcatgaaatgttagtccctggaagaataatggctgtatggaccaaagagagagctggacaggcccagttcaattcatttcattgtactgacagcctgttacgtcgtactcctatattgtacatatagaactatgctctgtacctgctggcaacttggcatcctactccttctttctgcgggcggactctgctccgtaccgcctggctcctcggcatactgcagcttctttcagggggcagattcaggttcaaaaggcttgatgtcctcttcactaaaaaaaaaaaaaaaaaagcggcc

SEQ ID NO: 89437 - DNA, 658 bp, Zea mays
  Clone ID: MRT4577_181568C.1
agtttttaaatttctttttttttttttttttttttttttttttttttttttttttttttttttttttttttttgggcgctaaattttttttcttttttttccgacaaaacacaatgtttttgtacaaaaaaacatggaacattcacaggccctggcaaaaacggcaaaaaaatttggttgccaaggtacaggattcaaaaccccccaaatgccccggaacggaagtttggcacaaaacaaaggggtctcacggtttttgtccaaaccaaccctttaaggaaggggggttggggaaggaaataaaaatttttcaacaacaccaactctttccaagtttaaacggggatccgcaaattaaaaaattgcctggaggaattttggcctcattttttgaaaactaggggcagggtttaccttgaaaagtactatgtcccatggcaaatgatcgattccccacagtttttttccatgaaaacctaaaaaaatttcaccattgtttacatactatggcacactggatgttttgagcactttttttttgggggatctcaatcccaaggcactatagaaagttcaacctttttcactgaaggcaaaaactcctccaagcaagtcattgttatccccattttcctaaggtttttttttttcgcagggg

SEQ ID NO: 89438 - DNA, 195 bp, Zea mays
  Clone ID: MRT4577_181569C.1
gagcttatctagtcggcggccgccctttgtttactttcttttgcatgccacaagaaaacaaaagctatcgcattagcgcatataacactacagggcgacacaagccaacgtgaatagtggcaaaacccaggcatagcctaccttaaacttcttgacagacattaccttaacgtcagatggtgttgttgcaaaagg

SEQ ID NO: 89439 - DNA, 195 bp, Zea mays
  unsure (1)..(195): unsure at all n locations
  Clone ID: MRT4577_18156C.1
ttggcggncacctcccccattttcgncgccccctccgatctcgccgttctcgtctccttccgttggattagggntcttcatgtgtttgnnacactttgnnagtgggccatggnaggatgaggaggngaatgataaaaaggngatnntagaggatngttaaaaggataagtgtgtgtgaaagtggaatgagtatga

SEQ ID NO: 89440 - DNA, 385 bp, Zea mays
  Clone ID: MRT4577_181570C.1
catgcaggtgcgtgatacaatgaatcttatttgatgctgtacatattttctacagttttctgttaattcggttaaagctagaaaagtttgacttatgatagacctaatactacttacaattgggaacacaatgccacaattccatttcaacaaggatacattgcggacacaatttcctttcaatgatattcgctcacgttttttttctaactagggtcaactcaacaaacatcatcaaacagttcacgtgtgcttttagctttttccgtgattatctgcctcgcaaaaatatacaagcatgttctgcctttttgtgaccatcaaactaattggtcagaaaaggaagccaagctcactacaaccaataggcaaagcaacgaaaaga

SEQ ID NO: 89441 - DNA, 833 bp, Zea mays
  Clone ID: MRT4577_181571C.1
ccggccggggctatatgcttaacacatgcaaatctaacgaagtgctcctggacgaaggcatctcatcggcgaacgttttttcgaggccgggctcctgctcccccggaatctagggttcgcctcgccccgcgtcgccctcgatgggcccggccgcgcagccgccggactccggcggcggtggggacccggaggcgtggtacggcagcatccagtacctcatcaacatctccgccgtgggggccgcctcctgcgtcctgctgttcctcctcgttaagctccggttcgaccaccgccgcatcccggggccctccgcgctcgccgccaagcttctcgccgtctaccacgccaccgcggcgcagatcgctctccactgcggcgccgacgccgcccagttcctcctcttcgagcgcgcctccttcctcatcctcgccgccgtcgccgctgccgccgtcgccgcggcgctcccgctcaacctcctcgcgggggacgccgccgtcgtcgaccagttcgcttccacgaccatctcgcacatccccaagtcgtccccgctcctctggctccacctcctcctcaccgccgccgtcgttgccatcgcgcacctcggcatctctcgcatggaggacgcgctacgcatcacgcgcttccgtgacggcaacggcaaccccagcgaccccaactccagctccgtcgccgtcttcaccataatgatccagggcatccccaagacgctggccgcggacaagaccccgctcaaggactacttcgaacacaagtaccctggcaagggtttaccgtgtcatcgtgccatttgatctatgcacgctggagcatct

SEQ ID NO: 89442 - DNA, 110 bp, Zea mays
  unsure (1)..(110): unsure at all n locations
  Clone ID: MRT4577_181572C.1
cagcgccgcacctgcaggacgggccgccctggcgctcgtgctcctccctccttgtcgnatgaagtgtggctccttgcccgactngggnctgagtcttctcgnnntatctg

SEQ ID NO: 89443 - DNA, 223 bp, Zea mays
  Clone ID: MRT4577_181573C.1
ttcttcgataaaggaactaaacactggggctaggcggtttcaccaaatgtgtatttacatgcaaggactaccatccaacctgatcagttgcatgatggtaactcaaccacaacaaaaacgtgcacaacactccccccctctcagacctcagctacaagaaaacatcaaatttaggactacccagggatttagattgtgcattttgacccacgcgtccgtccac

SEQ ID NO: 89444 - DNA, 467 bp, Zea mays
  Clone ID: MRT4577_181574C.1
ccaagccaggctagggcctggcctccttcccgacgccaccgtagtggcgagcgagattgactgggggatagtaacacatgagcgatgtccccgacggagcgggcggaggcgcctcggaaccgctgcaacgtgaggagccgaaacggaggaggggcggcggcggcgcgaggacactacggggcacatctttatgaggcgacgcgaggagagccttcccaagacgcgccgcgaggggctccaagcccaggtgcttgtcactgcttaggtggtgcagacgaagctagagagcctcacaggtatgcggagcgaggcatattcggatgagataaccttcaggctgaggccaccacacagttgcgccagcagccctgtatagagaggagccctcacatcgaacaggttatcaaatcaggaggacccgaaagattcgtgcaagtgctcacaagaaaggacctgccccatctgca

SEQ ID NO: 89445 - DNA, 186 bp, Zea mays
  unsure (1)..(186): unsure at all n locations
  Clone ID: MRT4577_181575C.1
aaatactgatgaaaaccactaattgttacaccaacattaatacgcncttgacacatacaatgtctcaatattcctcgcaggctgcgctatatatagtcgagactaagctccacaaccaaatcggcccttcgctaacatttgcgctatctagaatggcaaaatgtgatcgcgcccatgtagcattaa

SEQ ID NO: 89446 - DNA, 326 bp, Zea mays
  Clone ID: MRT4577_181576C.1
gttctagatcgcgagcggtcgccctttttttttttttttttttttgctgattgctgaatacagtacatatacttggtttgctatcgaccttccgcggcaattattctctacaaactcttggtctcagattcatacaagcttggaaataaacaactaaccaacatataggtaagaaacaggatggttcacagtccccgtgaaagtccaagaaatacaacagccgaggacatctgcactttaagatctgcgatatcaacgtcatgacctcctttcaccaagccccatcgatcaacctggtggtcttcttcaagcctgatcaactcaat

SEQ ID NO: 89447 - DNA, 1145 bp, Zea mays
  Clone ID: MRT4577_181577C.1
gtgcgaatcccggcacacgcacagcacagagacgttggttcagccatgcctatcgccctcccactaaatctcatcgcgttcgcgacacctttctgcgaaaagatacggacatcatcaccgagcaccaagccaccatgttcgatgtttcctgtctatccaagaaactgcagaagcgcaattaggctagagattgcaggagaacagaattcaatcaggccgtcttccatctccaccttcctcgcctctctctctctctctctctctctctctctctctctaaccactgtactagaactatcagtacctgagcaagactgcttctacctgtactgtgctgacattatacacctcttcccttcttgcccgtgccaatcgccattgccaggcaccacgtagagctgcattgcttcgaggccatggccatgggagttgcaacaagagtttgcttcgtagttcttgttctgatctgcacatctttcagaggagggagggccgcgacattcacgttcgtgaacaggtgcgcggcgacggtgtggccgggcatccagtcgaacgcggggagctcgaggctggacccgacgggcttcgcgctgcccgcgggcgcgtcgcgcgcggtgccggcgccgtcggggtggtccggccgggtctgggcgcgcacgggctgcgtgcaggacgccgctagcgggaaggtggcgtgcgccacgggagactgcggctcggggtccctggagtgcgacgggcggaacgcggcgacgccggcgacgctggccgagttcacgctggaccccgccggcggcaacgacttctacgacgtcagcctcgtggacggctacaacctgccggtcgtggtggagcccgcgggcggcagcggaggcggcggcggcgccgccacgacgacgacgtgcgccgcggccgggtgcgcggcggacctgagcgagcggtgccccgcggagctgcgcgccgagggcggctccgggtgccgcagcgcctgcgacgccttcggcaggcccgaatactgctgcagcggcgcctacgccagccccggcacctgccgccccaccgcctactcgcagctgttcaagtccgcgtgccccaggtcgtacagctacgcctacgacgaccccaccagcaccttcacctgcgcc

SEQ ID NO: 89448 - DNA, 709 bp, Zea mays
  unsure (1)..(709): unsure at all n locations
  Clone ID: MRT4577_181578C.1
cctcgagccggcgggttagtgtacccatttcccacagatcaggctcttgatcagtcttggtacaatggatttctcaggcaataatttatctggtgagattccacatacccttggtagctgtgttacactgcagttcctgtatttgcaaggaaacctcctacaaggtcaaatcccagtggaactgaatgcactaagaggcttagaagttttggatatctcaagcaacaacctgtcaggacccattcctgattttcttggtgacttccaagttctcaagaagctgaacctatcattcaataacctatctggtccggtgcttgatcgaggtatcttccacaataatgccacctctgtttcactttctggtaatgccatgctttgtggagggcctggtttctttcaatttccaccatgctcaacctatggccgttccaatcatcaacgaatgcatgtcttggccttttcctttactggagctttagtagtctttgtgtgcatcactgcatgctacttcatgaaaaaggcatctgacaaagcaagtgatgctgcgcacgggttagttacgcttcctagaaacaaataccagaggatatcatatgctngagtatatgaagctacagattcgttttccgattcaaatttgtntggtcgtggaagatttggtactgtatataaagggattctacatgatgacagtaatacagaaact

SEQ ID NO: 89449 - DNA, 459 bp, Zea mays
  unsure (1)..(459): unsure at all n locations
  Clone ID: MRT4577_181579C.1
ctggntgtagatcttggttatttatgtaaactagnatgtttgctgtatggtagtaatctagcacttagtagtaccgaaacttccctagaaccatgctttggtccacaatgttggatttatttctctttctcttgtctaggttctattactactgccagtttgatataagttttaaagtatcattcatttcttatattgatgttaatttcgtgtttgtcttgctacaatgtagagacacttgtgcattcaactcttgaacactgtgaggatgctgatttcacatttccagttcattttaacttcagagagcacacaatatatgttcgatgccgcccctatctcaaggaattcttggatagggttgccagcgtgtttgagacaattattttcactgctagtcaaagcatttatgcggagcaacttctcaatgttcttgaccccaaaagaaagttgttccgc

SEQ ID NO: 89450 - DNA, 341 bp, Zea mays
  Clone ID: MRT4577_18157C.1
tgttttattagtgatgataggctaacaccagataagtcttgatataactggctgaggtcataaacacgggcggtgaggtgaagacgaaattgatggagcttacaggtggtagtatgatgctcgaagattgactgtgtgatcaaagatcgccaattataacatgcgttatcgaaagcatgctctacgccttggctagctccaagaggaataggaactggatgatgagatggtcagccgtgggataaaccatcatgatactacatatgacatactgggtgggaccgacaactgttgccactactggtttcaatgttgctaaatgctagtacaagaatgtgatg

SEQ ID NO: 89451 - DNA, 477 bp, Zea mays
  Clone ID: MRT4577_181580C.1
aatattatattgtgtttcttttcccccaaaaaaggggggcgaaaaccgcgggttggggacaaaaattacacacattcccattaactcaccgcccgaggggggctccaggcccccggccaggggagcggggggccccccaaaacaagggggggaaaaccgcgggggcgggcgcttttttttagggggaacccaaaccccctcaaaagggggggggggcccccccaccccccgggggggggacaaaggccccggaggggggccccgccccccccttgaaaaagcaaaaaaccccccgggggaaaaaaagggggggggccttggctggggcatgtcccttgcatggagaaaagaaacccccccccgagaaaaaaaaaaaattttggcagaaccccgggggggagaggcctactcccaaaactttcttggcccggggggtcccccggaattcccgccccggcccggggggggccccccttc

SEQ ID NO: 89452 - DNA, 536 bp, Zea mays
  Clone ID: MRT4577_181581C.1
attgggtacctcgaggccggccggggattcttcctgcgaagcaagcatactatcatgaccggatcgtctcgcctgttcagtttccttctcttcccgcagaccggcgttggccgaccaggtgtccactcagttccatagtagccgagcgaatcccgtgtctgattcgcgcgcatggcggaggagcatcccaacccccagcaccatgaagcgcaggaaagggaggatatggtgaagtagcagcagccgaggaggacccctaagctgatgcacctggacttcgtccaggtggcggttgcccaggccgcgagcagcctcgctgtgctctacggcctcgacaaggaccactgcggaccggtccgccccagcgatgacgtcggctatgcttacgacaatggcgtagttagccccgtctacgaccgattacgtggtctgccggtcgacgaactcgccttcgtctaccgcaaggtggacgacacagtgcacgaggtggacaagcacctcccgcgcgcgctgaaggcggcgtcggtgcatgtcta

SEQ ID NO: 89453 - DNA, 278 bp, Zea mays
  Clone ID: MRT4577_181582C.1
tttttttttttttttttttttttttttttttgtctttattatagttttttttcctgctcctttctttggtgctggtcttagtggcttggcttattgtaacacttctttgtttccttgggagagggaccaggggcggtgcacacgcggggtccgggcggcggaaacagagatgtgttggtgcgccccgcgtacaggaagaccttgggccccagcagcccatccctaaaggggctagtgctaccaagaaaacaagcccacccgttcatcgattagtacgc

SEQ ID NO: 89454 - DNA, 245 bp, Zea mays
  Clone ID: MRT4577_181583C.1
ctccccctaaataaatccccccagacccacaacccaaagggggacggaaaaaaacttggggccgaaccagcccacaataactcaaaacccaaagagccccagaaggccagaacccaaacccccatagccaagcgcaagggacccacccgcccgccaccgccagggcagcaagcacgcacgcacagcaagcccaacacgaaccccaacaagccgacaaacatacagcaacaaggccccaaaacccg

SEQ ID NO: 89455 - DNA, 330 bp, Zea mays
  Clone ID: MRT4577_181584C.1
gatcttaaaaggttctacttagccaggcaggatgccatccacacaagcatacttagaatatagagatgagagccggagctgagcaacaagtccggtgaacagtatccacggagagctgacttgctgccctactgttaacggatacactgctcaaacttaggacgttgaatcctcgctgctctccactgagagagctacctgccagccatggcggggtgctaagtgtgcgctttcctgtatggtaataccgtgcgagtggtggcgtctatgactgggacatcaccatgcgtggggtggctggcagcttggcctgctgggttatcttacctg

SEQ ID NO: 89456 - DNA, 376 bp, Zea mays
  Clone ID: MRT4577_181585C.1
gcgagtacaagcttttttttttttttttttttttttttttttttaagaaccaaagcgggacccccccatataattaattaatgggcccgggggaagaacccgggccaggcagcaacctcctggcggggcccataatcaacccagggggggggggggggggaacccaacaggcccaagcctatcgcaagaacctgggggggaagggttccgcccccgggaaccaggggggttccggggcccccgtggcggggggccgggtggccctgggccccgggcgggggggggcggcccgcgtggggggcgctctggcgggggggggccccctggcgcggtgcgctggggcggccgggggggccctgcggcccctcggcctccc

SEQ ID NO: 89457 - DNA, 196 bp, Zea mays
  Clone ID: MRT4577_181586C.1
gcgtctctctccccatctccatcttcaatcctcgctcgctcagtctcggcagccatggcgtcgtcgcgcagcgtagcctgagcctgatccgtcggccgtgtggtggtcttcccgttcccgttcctgggccacttcaacgcgggtgatgtcggctggtccgcgcgacgctggcatcgctgccgggtgcgctcgcgat

SEQ ID NO: 89458 - DNA, 308 bp, Zea mays
  Clone ID: MRT4577_181587C.1
tccactcgtccgcaaccatccttaatgaatctatatcttcaaagaatcgggggggggcaactacaacatcagttggttccaataatcaatcaagtagttgcagcgaaccttgctgtttacctccagcaacaacaatttcttccattcaatcaactagctggggtgaaccctgctgcttacttgcaggctcaacagctattaccattcaaccaacttgtcaggagccctgctgtcttcttactggaacaacagttggtttcattccatctacaagttgtggcaaacataggttgttttttgcaacaaca

SEQ ID NO: 89459 - DNA, 551 bp, Zea mays
  Clone ID: MRT4577_181588C.1
gagacaccaaagacatgtcatatactgttgattttctgcaaatttttcccactaggttttactggagtgttacacagtatattattgcaaaactcctattttctttacaggattttaaggagattatacatgatggacaactgcttaaggaggagtgttacaggatataagcagttactatgtacactcattttagtctacggttcctggtccacagggcttcttgggacgtgactgttgagcacgttcccacgttctctgtcctttcggttcctagacgaagggtcacgacccttgcctgtgtctcctccctagtaaagcatgtccagctacatgtttccccgttacatcaacggaaaagcatgttcctccacttgtccttcaagtccaccggtgtcctgccggtcaaagcctcagcattgttatctagaatatccctccaattgccaacaccatactcttcaacaccctttcttaaggtttcttcttcgaacaagctccacctccttgtctttctccgcttagtgtttttgtttccaggcggtggcaaa

SEQ ID NO: 89460 - DNA, 383 bp, Zea mays
  Clone ID: MRT4577_181589C.1
gctcggaattcggctcgaggcattacaaaccccgcccattttttggccaccttaaacaactcagttccaacggggtcatttcatgggggaggggcctgctcaactatcaacttatatctctgcggccttgccaacacgggggaatacgaagttactctaaaccgctcagcataaccaaagtctgagctcatacacagcctgacttcaatcgagtacaacaccagctttaactctgccaagcaccaaatgagcagactgatccaacgcatccagaggaacaccatattgaaccacaggactcatcaatgcggatcaaacaccacatcgatcaacaaaacctggaacagaagcaatggtacagcttcaactgattgtcagatgca

SEQ ID NO: 89461 - DNA, 138 bp, Zea mays
  Clone ID: MRT4577_18158C.1
gccgccacccgttctttttggtttaccactgcacccggcctcaagggtttcctggctttaatggccctggtggggggaattggtctgggccttggtttcttcctcatgaggccccttgttttggggaccccccaaaaa

SEQ ID NO: 89462 - DNA, 437 bp, Zea mays
  Clone ID: MRT4577_181590C.1
acccaggcaaaggcccaaattttacaaaagcaaacgggcccggaattaacgggtacaagggggtcaacctgacggggacaactggtggcccaaggaaaaaaacaatgcgagcgggcccggcccaaggggggcctgaaacaatcgacaatgcatgcccctgcccaaaaaaaactaaacgggggcaagcggggaaagaaagctggatgccctaactgccctgcccacccctagggggggcgggttcggcttttaaaaaccgggggaggggagctgctccggggggggggaaaaaaaaaacaactcgtaaataacccccgcaaggcccccccccataaggggccccacccacaacacccactgggagccccactcccaactaacgagggcggggcccaaggacaccggggggtttatggaccccccctcaaaggcccccc

SEQ ID NO: 89463 - DNA, 455 bp, Zea mays
  Clone ID: MRT4577_181591C.1
tctttcgctggttccgatgccgctgctgcgctggcctcacgcctactgcgccacgttcaccatggccccaaagaaggagaaggcctcgacatcgttacccacaggggccatgtccggtgtctgtaagctccagaagacgatgaggggcccgggtatgcaaatggagaaggtcaacaacgctgggctctacgaccagggcactctacgataagctgttgtctcaggacgcccaagtacaatcatatgaccacagatatgctatctgagcgcctgaggcataatggatacttgatacggaaggccatcaaggatcttatggctgatgctctcatactgatgagatatgtttattctaagggatacatctacaccacatcagccaacacatgaagggagttgtgcgcttcgctgacgttatctagtctagacgacttgctgatgctgttatgacatgc

SEQ ID NO: 89464 - DNA, 455 bp, Zea mays
  Clone ID: MRT4577_181592C.1
attcggctcgagccttgatcggctcctggatgttcagaagcttgataatgttgacatagaaggagccatccatgcttattatgacattacccgtcaacagtgcataatatgtagagaattgagtgaagagcaactgaaaagatatacctctttgcattcagcttcgttggatgaaagcttgagaattgtaaaggactacttaatagcagcaactgcaaagactgcagttttatgatatgttttagacaaaggaaagcaggggattctggatctggatctatttgcagtaacatatatcttgagtcaactaagcaaacctttgacttcaaggtgtatttcattgacttggatttgaagcgaatgagtaaaatggaagaatattatgaattagataagaagatagtgagctgctatgaagaaatgatcaaaatggaccaagggataaattcacaaac

SEQ ID NO: 89465 - DNA, 284 bp, Zea mays
  Clone ID: MRT4577_181593C.1
ggcccgaaatatttttaaaaggggttaattgttgattacattatacgtttgaaacgtccatttattttttacaaaaaataaaagggcgaaaacaaaacgtttattgtccggcttttaaaggtccccattgggggttgcccttaaccccaacctaaaactttgtttaattttggaactcccggaagatttttttcaaaaatttatttttccctgaacagtgtttgaaatttttaaaacctgggggggggggggggttatttatatttatatctcttttttcttat

SEQ ID NO: 89466 - DNA, 256 bp, Zea mays
  Clone ID: MRT4577_181594C.1
tgatcgaccagccatggcgaggtctatagaggagtgggagagccagtcgtcccgctgtggatgcgaagtgattgtgatgccgccgtggtaacttccatcggttcgtgtggagagttggtccatgtgcatcgatctgctgggggcctctactgtactatatcgtagtgcatgtttcgagatgcaactcgatgcttaccgtgacactgtctgggtggctgtataagtgtgataaggcgcttggttccaggtttctagt

SEQ ID NO: 89467 - DNA, 877 bp, Zea mays
  Clone ID: MRT4577_181595C.1
cctcgaggccggccgtgaaaacatattttattaaaaaaaaaaaaaaaaaaaaaaaaaaaaaaaaaaaaaaaaaaaaaaaaaaaaaaaaaaaaaaaaaaaaacccaagccgccgccactccttctccctccccctttctctctcttctccttctccctccccctttctctaccccgagcccccacccgaccgcgcctggaacaccgcccaggcgccccgcctctgcatccgcccgccctaggccgcagaagggagcattcgccgccccaccctccgtttcccgtcgcctcgcccccgcgctccgtcagccgcccctctccgatggagcgtgtaaaaaactcgatcagcattggaggaactggcaatggcatcataaccaagaagaaaattaggcttccaaatttgagatgaagacgatgactcaaacttgggccatggaggtgttcaccaacagccaaatttgattcaggacaagactctggtaaggaaaagattgatatcaagcaacaacactcgtgtcaaggcagagtctggcacctgttaacgatgatgagtttagtgcaacctcatatcatgctttgtatctgtaactggtagaaacaaagttgttgcaacatcatccattgccgatgatttgtcagaggttgacatgccatcaaaacgcaggaggctgttgaatcaagacacaagactatctagagcagaataccttgatgacaacaactcatgtgttactggtatatcagcagaaggcaaacttcttgtggataagaaaaaaacttcaagctggattgatgttgatgtggtgcttttgtgactaatcatctttagagcttttgtgaatgatctagctagctatctgtaaatgatctagttgt

SEQ ID NO: 89468 - DNA, 371 bp, Zea mays
  Clone ID: MRT4577_181596C.1
gtaatgatgtgtcaagagctccctctcctgatttcagaattaattgaattgcacttgctggcagattttgtttcatcagccttgttggcacctttttttgttgatgcttgcttttttggtccatgaactcttaaatcattgcagttcaaaatgataaagtagtgtgttcacagttgagcctgtgatgattagctatacatttggaattaccatcagatttacttgtgaagactgttgtctggctttatgaggcttttgttccacacatctatattctatctgttttacaatgtttcagtttcatatcattagattactatgaatttccataggatattcaatatgattatttccctgtggtgctttgaata

SEQ ID NO: 89469 - DNA, 733 bp, Zea mays
  unsure (1)..(733): unsure at all n locations
  Clone ID: MRT4577_181597C.1
ccggccgggctctatatctacttgttatctagttttttttctccaaatatttcatgcgatcattcttgcgatggtgtatgtttagtattttgttgccttaatcttggattgcctgtgaacttgtgatggtggttcttttggtacatgttgaacaagtattcctgaactgtactgtatataagattgcctattagtattctgtttcctcaatgctatctggttttttttttttttgcttagaattgattatctgcatgtttgccaaaacttgagttgctgggccttctgtacaaaggaatctggtctatatttatggccatctgcattccacttccagtccattctaacaatattttttttgtttgagtttttgagagatttctttcatggcatggagtaagaaattcggttctaattaaggtttattgcaaaattttatcttcaggatgaagatactgaatatcttgttcaaccaatcgctcagcctcaagccatggctattggaagtgaattagatggagttgaccctgatgatgctgacgaggacaaggaagaagtcgacaacgatgatgatggggccacagatcagccttcatcctcgcatggagccaagcggaagagagatgatgatgatctgtcangcagtggtgatgacagtgaggatgacggtgttgaggacttgaggcccttcagcacaagtgatggagcagccaatgtacatggatccctccct

SEQ ID NO: 89470 - DNA, 225 bp, Zea mays
  Clone ID: MRT4577_181598C.1
gagcatactattcggcggccgcccgtcctttttttttttttttttttagttattgttcttgcttgtgcttctaccacatgaaaccaccaccttacgaatacaggtcatgaccgggggggaggaaagtacaaaagctagatcgctctagaagtcaagctcagcttgagcggccataaaacagagggggcgaaaacaatctccaggcttgccatctggctcaaaaag

SEQ ID NO: 89471 - DNA, 511 bp, Zea mays
  Clone ID: MRT4577_181599C.1
aatctcacaccgagcccgaactaagccccggctgcagcagctcccattcctcgccggcgagctcgccggacaccgcccgaagccaagatgactacttccaggcgccttgctgacaggaagacagcgaagttccagaagaacatcaccaagaggggttcggtgcctgaaaccactgtgaagaaggggaatgactatcctgtcggacctatagtgcttggattcttcatctttgtggtcgtcggatcatctctgtttcagataatcaggacagcgagcagtggtgggatggcctgaacgccgtcatacattaatacagttgcagctaaatccgtttgatgtcgtcatagtttgtcttacttaaaagtacctagtttgagctgatgttgtaagaactgtaaacagagttatcaatcttatacatgttaaacggacaagtttgtctctggtcactgttttcagtcgcatttgcatgttgaagcaatctatttgtttgcaacaaagagcctatgac

SEQ ID NO: 89472 - DNA, 1607 bp, Zea mays
  Clone ID: MRT4577_18159C.1
ccgagctatcccactggacctcacaaagcggtggcgtctatctttttctcctcctgccgtacgtccgttccagcttgcaaagcgctcgcgagctgctgccatggcaggcgccggtgcgcccgcagttccccaggccggtcgcccagcccccaacttcgacgtcatcgtggtgggcgccggcatcatgggcagctgcacggcgcacgcggcggcgtctcgcggcgcccgcgtcctgctgctggagcgcttcgacctgctccacccgctgggctcctcgcacggcgactcccgcatcatccgggacgcctacgcgcagccgcggtacctccgcatggtgcgcctcgcccgccgcctctgggccgccgccgaggccgaggccggctaccgcgtgctcaccccgacgccgcacctctccatgggcccgcggagcagcgcctcgctcgccgccgccatcgctaacatcggtgccgaggaggtggacgtggacgaccttcaccgcaggtggggcggcgccttcgccctcaccgtcccgggcccggtggacgcgtgggtcaccgcgctcagcgaccacggcggcgtgctcagcgccaccaaggccgtggccatgttccagtcgctcgccgtcgcgaaaggcgccgtggtcagggacaacaccgaggtcgtcggcatcgacagggcgcccgagcccgacggcggcggcgtcgtggtgagggccgccggcggcgaggcgttccgcggcgccaggtgcgtcgtcacggtgggcgcgtgggcggccaagctgctcggctcctggggcgtggacctccccatcaggccgctgcacacgctacacctctactggcgcgtgaagcccggccaggagcagactgtctcggcgagcgccgggttcccgaccttctccagctacggcgacccgcccgtgtacggcgcgccgtcgctggagctcccggggctcatcaagatcagctgcgacggcggcccgccgtgcgacccggacgcccgcgactggctcgcgggcgacgcggaggtcacgcaccgggtggccaggtggatccaggaggccatgccggaccacgtggacgccgcgggagggccggtcgtccggcagtcgtgcatctgctccatgacccccgacgccgacttcgtcatggacttcctgggcggcggccgggacgtggtggtcggggccggcttctcgggccacggcttcaagatgggccccgccgtggggaagatcctggcggagatggccattgatggcggctccgagacggcggcggaggccggcctggacctcggcttcttccggatcgggcgcttcgatggcaaccccatgggaaatgccaagtagtgagctatgctgctgctgccatgcatgtagtactaaatatggatcgatggtggtcaataatgaaagtaataaaacattcatattctagcatcataggctgagaatactttcttgatgtatggcaccctgagaaactatcctcttccagattttgtatggtcagtcactctaataaacgatttgctgtattttaaacattaacgtattcccaagtgatacttcttcgtttcttcgaatcgaagaacgactttgaagc

SEQ ID NO: 89473 - DNA, 374 bp, Zea mays
  Clone ID: MRT4577_1815C.1
aggacagaccaaaagtcgggctatgttgagggataatatatttattttgcaggcgctccatccttgattgaccgtatcaaggattgccaatcaggtttcccttggccgtgggcctggcccaatctgaagctttctggcaacaatgaagaagaaggaaagatcatccttatgtgctacactcataatcggagcttgctgggatacgcaaataccaaatcgcttccatcacacacaaaacttgttttctggtgggcgtgagcaattcactgttgtttgcttgtaccaacgaaagaaaccccagctcttattgctattttcaatgcatgcaagcagcgcccccagactctcaagaggctcctgcacggacttttttg

SEQ ID NO: 89474 - DNA, 641 bp, Zea mays
  unsure (1)..(641): unsure at all n locations
  Clone ID: MRT4577_181600C.1
actagttctagatcgcaagcaaggcagcacaactccttcagtaacaaagcatcacctgcttcttccttcgcctgtgatccattcaaccgagagcatgtcttgctgcagcggcaactgcgggtgcggctccggctgccagtgcggcagcggttgcggcggctgcaagatgtcccctgacatggagaccaccgccaccgtcggcatgaagcccatggtgctcgctgcaccgaccaccaaggccagcgccggcgggttcgaggcggccgtcgagggtggcggctgcgactgcaacacctgcaagtgcggcagcagctgcggctgcagctgctgcagctgcaactgagccatcccggcgatggcgcacgaggaggaaggaggagacagagacaacaaccaccccccagcgtactaaactatgtagcggcgtctaaataagatcctgtcaactgcgtgcgtgcaccgccattattcatgcatggtcgccggcctcgtctccgtctccgatcctggggttgttcatctccaacgtctcgcggtttgacgattgccgtcgtcgtcgatcctatgtccgcctcgtgcctgatctaatatatgtgttttttttctgcattacctgtgncttctctgtctgtctggctggc

SEQ ID NO: 89475 - DNA, 606 bp, Zea mays
  Clone ID: MRT4577_181601C.1
ggtttcccactcccccgtctcccactctcccccgcagtcccgcacccgccgtcttcccctccctcctccgtcagacactctccatatcagtgcggtagcatactcgtcgcaatccattctcaatcctaaacccgaaagctctcagctccgcctcactgttcgtacgtcacgtcttatatgactaacccctagctagcatcatgttgcggagcatcgccggggggcaagaaaagcacctggccaagaaagagtgtgagaaaggaggatggcggagatgaaggagaaaagtcaccccatgatagagcccatcattggaggatctcgagggccagggtgctgataaaagggacgagccgcccgatgatgcggtggcgtgcagggcctgcgggaggctaaaagtgtgccgccacaacgccgcagtaccagtagctgccctgcgggggagaggtgcttgacatcgacaaatggctcaaggatagcatcttccctggcgcgctcaagcgctagacatccacacggggctaaaggatggaatcactctggggagctctgcagcacgatgatgcagctgcacgcgaccccggacagcagcctgtacaacggcgc

SEQ ID NO: 89476 - DNA, 795 bp, Zea mays
  unsure (1)..(795): unsure at all n locations
  Clone ID: MRT4577_181602C.1
ggtacgcctgcaggttccggtccggaattcccgggtcgacccacgcgtccggaaatatgcaggagaaaagtctttgcataatgtagagcgagccgtggggctccgggagcggcgccccaaggtctggggccatgaacgcgagcgtggaaggagacaccttttctggatcgatgcaaatcccaggaggcaccacggtgctggtggagctggcaccggacatccacatctgcggcctctgtaagcagcacttcagcaatctggatgcctttgtggcccacaaacagagcggctgccagctgactaccacgccggtgacagcccccagcacggtccagtttgtggcagaggagacagagcctgccacccagaccaccacaacgaccatcagttcagagactcagactatcacagtttcagctccagagttcgtctttgaacatggctaccaaacttacctgcccacggagagcactgacaaccagacagccaccgtgatctctctccccaccaagtcacgcaccaaaaagcccacagcaccccctgctcagaagagactcggctgctgctatccaggttgccagttcaagaccgcctatggcatgaaggacatggagcgacacctgaagatccacaccggtgacaaaccccacaagtgtgaggtgtgcggnaagtgcttcagccggaaggacaagctgaagacgcacatgcgctgccacacgggcgtcaagccctacaagtgcnagacgtgncgactacgcgcggcggacagcagcagcctttacaagcacctgcgca

SEQ ID NO: 89477 - DNA, 1280 bp, Zea mays
  Clone ID: MRT4577_181603C.1
gacagctacaggtactagcaggctagcggctgcctcccttgtccccaccggccgccaccaccaccaccacggcaccaccacaccgacccccttcccctcccctctccctgtcgtgcggtgcctcctccgcccaaatccccaaatccgcgcctccgatccgccgccgtccacgatctgccgcagccgttgacccgctaaaaatggcctccgggccgccctcgccatccggcaaaccctactcgcgcaaatctcacgccagctccaaggctcccagcgtcccttccttcgacgcccacaacggccagctcctacccaccgtcaccttttcgctgccctccacgaccaccgcccgccgggagctgcgccgccgcctctcttccgagctctcccaggtgcgcgccgccgtcaagcgcctgaactccctcccggctcccgccccctcctcggcgctctctgccaccgacccctccacgccgcatccgccgtacccgccggcgtccaagcacaagtctaagaagggcggcggagtcccgcagccgcacctctcggcggaggcgcggcgcaagctctacgcgcccgtgttcaagacctgcgccgctctgctctccaggctgatgaagcacaagcacagctgggtgttcaacaagcccgtagatgcgagcgcgcttggcctgcacgactaccatacaatcatcaccaaacccatggacctcggcacagtcaagtcaaagctaggtgccgggcagtacaagtcaccacgggaatttgcaggtgatgtgcgtctgacgttccagaacgccatgacgtacaaccccaagggccaggacgtgcacttcatggccgagcagctgcttaacatgttcgaggagaagtggccggagattgaggctgagatagctcagctatcaccacagcctcctacaccatcctcagcagcacccaaaaagccaaagccaaaggagatagataattctaggccgttagagaggtctgattcgacagttcatgctgccgggatagaagctaccccgaagacacacactggcagaccccaagttttaaagaagcccaaggcaagggagcccaataagagggatatgacattctgggagaagcagcggcttagcaataacctccaggatttgccaccagagaagctagacaatgttgttcagatcataaagaagaggaacttgttactcatcccgcacgacgatgagattgagggtgatatcgatagctttgatgttgaaacattattggggctcgatagatttgtg

SEQ ID NO: 89478 - DNA, 136 bp, Zea mays
  Clone ID: MRT4577_181604C.1
aattagccacaaagcgggcacctcgcgtcgctgttgccggccctgatagggcacgggctcactgcgatgttcggtctgcaccacccgactccatgcccctactctggtgccggccgagaaccccactcaagaaact

SEQ ID NO: 89479 - DNA, 701 bp, Zea mays
  unsure (1)..(701): unsure at all n locations
  Clone ID: MRT4577_181605C.1
actcgcccattcgttgctgtcgatccgttcgcctctgtgcctctctgagctcgcactcgctcgtgaacgctccccgacctccgtccgtctccgtgtggtccggctcactttagcagttcagcctgctaggactctctgcgagtagcatagcagcagcttcttgcgaggcagaggcagagccttgtgttgcgttgcgtcttccttcctgcttgagcttattagttggctcgcgatggccggcggcgtggtggtgagctccggcgggggcaaggactaccccggcaagctcaccatgttcgtgctcttcgcctgcatcgtcgccgccaccggcggcctcatctttggatacgacatcggcatctctggtggcgtgacgtcgatgaacccgttcctgatgaagttcttcccgtcggtgtaccgcaaggagcaggaggcggagcggaaccagagcaaccagtactgcaagttcgacagccagctgctcaccatgttcacctcctcgctcttacctggcggcgctcgtggcctccttcttcgccgccaccgtcacccgcgtggccggccgcaagtggtccatgttcggcggcggcgccggtttccctggtcgggcgcgcgctcaacggcgccgcccaggacgtgggcatgctcatcctcggncgcgtcctcctncgggcgtcggcgtcggcttcgccaaccagtcc

SEQ ID NO: 89480 - DNA, 386 bp, Zea mays
  Clone ID: MRT4577_181606C.1
acattgaatataggtgtttttttttcaattttattgggccagataccaaaaccgtggggaaccatagctgggtttaactcgaagaggggaaaaataaaataactgtggatttttctgagagtgaattgggggctgaatatggatgcctttgaatccagattaaaccatagagtaattgaactgaatgagggtttaactggagggtggtgcttggctttatggacacctggacgcatggaaatttaaatctgcctatgaaaacatgagtgttgcggttcatggattgattctggtattgacgctgttcccattgggagatcacttctcttatcaaattgagtagattgtgcttggatatacttaggccttaatggaatggtccactt

SEQ ID NO: 89481 - DNA, 389 bp, Zea mays
  Clone ID: MRT4577_181607C.1
aaacaaagtcgtgttcctggccatcagcgtccaggatctacccgtcaccatcatagcaaccgtggacgacgatacgttcaggatcgccgtagagcacagggtcagggtcgagtacatgaattagcagatcgcgaaggagcagcaccaggaggcgcgcatagacgatcagatgctcgtgcgctagggctaggatctctacaaccggcagcttatcaaggatgtctgcaagggcaactatgatgtcatacacttgctgcatccgcgctccctcgacgagggcaacaagtcatttcggaagacgtagttaccgctacggtgttacaacgtcaagatcaaccacatatgcagcggccataccgtcatgatccatgacaagctctacgaagcgc

SEQ ID NO: 89482 - DNA, 516 bp, Zea mays
  unsure (1)..(516): unsure at all n locations
  Clone ID: MRT4577_181608C.1
ttattttacatttatgagcgaaagttagttccctnttaactatacatacatgtcagctgcacatacactactctgcgcgccactttctgtgaagcgtttctgaaacaacctgtttactttgaaacccttttagctctcatctctgtaagactttctaccggcagtgcaagagcgctgaagcaggtgacaccgtgaacagaagagaacaggaagagatcacaaacagctatccactcttctggcttcttcatacgcatgtgattcatgcaatgcccaatctatcttttggtgttgtactgatgttagccttgtacctgaattgctttgatgtgaatcctgtaataattgtttgtatgtgatactgataacatttaagcagtagtgggaccagctgctacattaggatggctactgctgcttgatgtgagctccttctcgacttcagcaaacagttccttcaatccattcgaggtattggaaataatgctcttggtgaccttcttctgctgcttggtg

SEQ ID NO: 89483 - DNA, 409 bp, Zea mays
  unsure (1)..(409): unsure at all n locations
  Clone ID: MRT4577_181609C.1
acgaacccacagcgnntccgccaagcgttatgcgcacatattacggataggcaggggcacaggaagggcgcggcagcgtagcggcatatgagtgcgcctcaccagccataaggaaggcccatccgcgatcaacccgtggagaggaagctaccgaagacctaccatgcagccaaacaagcagccgactctacagcaggacaaggcgactcgccgcaggctgcacgctgactggactagctgcaccagctgcgcgacataccctgcaacacggacatcctggggtccacgcaggtggtgaaacgacaaaaaccatggactaagcaccctaagaccgacactcacgcacgcgcataagacatgtgagagcactggaaaaaggtagccctagaagagacaggagacaaaaatg

SEQ ID NO: 89484 - DNA, 495 bp, Zea mays
  Clone ID: MRT4577_18160C.1
ctctgcctgtgcacgcgcgcttggttgtgatcttcatcgtgatcgactgattgtatgtacacggcgcgctgtccgccggagaacattgttttgcagagttggctgttatccacgtttgtttgagattcaatgactgttgctaaagccatgaagagtccaggtcaaaagccgaaaacccccaagaagggtccatctacaccgaatgtgaaatcccccaaagggaaaggtgtaggaactcctgccggaactccaaaacaaacccctggcaaaggtccgaaagtggatcagaagacccctaagaagcccttggctcctgcaaatggaactccaaagcctaaaacaccaaatgcgaacggttctaccaagcctcaaactccaaaccctaaggcaaatgctacacccaaatccaagactcccaagggtaatgctacgccaaagttgaagacacccaaggctgctaatgagagtcctaaatctcttggcaaacggtctgca

SEQ ID NO: 89485 - DNA, 763 bp, Zea mays
  unsure (1)..(763): unsure at all n locations
  Clone ID: MRT4577_181610C.1
ctttaactatacatgtcagctggacatacactactctgcgcgccactttctgtgaagcgtttctgaaacaaacctgtttactttgaaacccttttaactctcatctctgtaagacttcctaccgggggggcaagagcgctgaagcaggtgacaccgtgaacagaacagaacatgaagagatcacaaacagctatccactcttctggcttcttcatacgcatgtgattcatgcaatgcccaatctatcttttggtgttgtaccgatgttagcttgtacctggaagctgcatactagttagttttttgggggaactcccttgaattgctttgatgtgaatcctgtaataattgtttgtatgtgatactgataacatttaagcagtagtgggagcagctgctacattaggatggctactgctgcttgatgtgagctccttctcgacttcagcaaacagttccttcaatccattcgaggtattggaaataatgctcttggtgaccttcttctgctgcttggtgctctttaaccaggcaatccccagcaaaaccagcacactacaggtgtttggcttcgaaggtacgttcgtgatacagtacttcatctgcagattgaagtggtctgcgagcagaacaccttggagggtcatcaccttctcgatggcccagccatcctggttcaccaagctgtacttctgctcggtggtgnccgcttctcctccgtgccgagacaggttcttgtccacgcttgtagctcgtctgccgc

SEQ ID NO: 89486 - DNA, 515 bp, Zea mays
  Clone ID: MRT4577_181611C.1
ccggccgggcttttttgtgcaaaactgcaaaccctagctcagactctctcattttcaaaaggcactggcggctggcttcaacctgatggcggcggccggcttcaacggttcaagttcaacacgttggcggcgatggggatgaagcaggagatgctgttgctgctcctgtaggatctcggccactactccctgtctctggctccctgctggcggcaagcaatgaagcaagtagtaacaatcagggcagtactccaatagtattctctccactctccaacctccaattgctgtccagttcaaccggcaccatgtctcaggcatgtattcttcaatagatgttcatgtttatactctattttttgcaaatccgctaaaagttttagcttccgctatagccggttatagctggacttagctgttgtggaacaaaaacgctaaacctcttagcccgcgatttaatacattggcaataatacaagtgtatagtaccgaaaaaaaaaaaaaaaaaagcggcc

SEQ ID NO: 89487 - DNA, 339 bp, Zea mays
  Clone ID: MRT4577_181612C.1
gtcgccatgtacgaccagaacacgcagcgcagacgtggcttcggattcatcacctgtgactgctaggacgctcttgaccacgtgctgcacaagaccttacatgatctcggaggcaagctggttgaggtgaagcgcgcattgccccgtgaggcgaaccactgaggctctggtagtgaccgtatcagagcgagtggcagtaaccagaacagcaatggccgttacaccagctcagatagctacgatggaagaagcgatcgaggctggtaccgacatgctcagcaagttattgaactcgcatcatgactacagtgctgaggcagactcatatggatatgatgc

SEQ ID NO: 89488 - DNA, 956 bp, Zea mays
  unsure (1)..(956): unsure at all n locations
  Clone ID: MRT4577_181613C.1
gtagggagcaacacgagataaccactgtgaaacaataaaaataaaatttacatacgaggagaactctcactatgccagtagtacacaacaggggcacaaacttgcacacacacgtcatgcactggagtcctcccactcctcgtgcaacacacaaccgagaaccatacaaatggcagggatataagaactaactaactgatcactaaagctcgagagagagccgatcaagggggccaaaccgaacccatccaccggcaaagttttcgagtgggaatgatcacagtagatctctgacgggggcgctctggtctggcaaatcatgcccccgaaaaccttgcctccaggaaatgagtacagcagcaggcagaaaaagaagtgcggaaggttatttgccagagtaaggacgacgaggttcttcagtgtgatagcctgaaataaggatgatctacttccaagaattcggggggaggaaccatccccactgcaatcatggcagcagcttcaggcaataatggatggtgcttgtagggacaggctgcgattatttgacgcctttccacgcccatccagatagcagcgcactgcgctgggcaggtgtcgatcagtgcttgcccttctccttcatgtctgcgtgctggaacccgttccagagctggaacgcggcgaactggccgtcggccgtggtgggcgtggtgaccgccgcagcggcagcggcagcggcggccgagctgtacaggaagggtatgttgggagcgtccagtggagtagacagcctctggagctgctgctgctggtgatggtggccggagatatgcggctgcgaattggactgaagggcccccctagtgttgacacccataatacccgaggacatggagaagtcgaggttgattctccggcggtagccgacgccggggccggcgccggtnccgcgtggncggncggnncgcgtggcg

SEQ ID NO: 89489 - DNA, 429 bp, Zea mays
  Clone ID: MRT4577_181614C.1
cgcacgcgtcgcagcacgccacacgtaatttccgaagtctacaacatgtgccaaacccggcgcgaaatctgcctcttcttgcggctttcgttcccgcttctggccaaattcctccaaaacctgacgagctggatgaccagctcgagggtccatgccgggtgatccgagcagtgatctgagcccagtcctggatccaagcgggaatccatacttgatctcctacatcagctacgcgatcgatcgatccaccgatagatgctgcggcctcagccacaatgtgagacatagctgtggatatacctgctgctatgcgaaatgggcatgcatagaggacttctatgagacatactatgatagagatgatggtcatatagatggtcatataggaggtcttgatggacatggtgatggtcatggtgcagattatgt

SEQ ID NO: 89490 - DNA, 296 bp, Zea mays
  Clone ID: MRT4577_181615C.1
cgtaccacagggaaaaaaaaacaaaaagaaaacaatttgtatagataaacggaatacaaaaaggtgggaagacaggttttgaaaaagaagcttgcaaatctcccgactatgctacccaacctcttacagaaaaaaatggcaaaatggggggaagccagaccacttaatggatctctagcaccgcgcattcaagacagaaaggcaaagaaacgggcccgattttaacaaatgcgcaccattgtactggagccctcagaaggcacacgcacgcccataccaacacctgttgttcctgg

SEQ ID NO: 89491 - DNA, 194 bp, Zea mays
  Clone ID: MRT4577_181616C.1
gggtgttttttatcaatgtttcttttttaacacgcaaaccccaacagtttgcaatcatatttgacacattttaaacttcaatgaacggctcacatacgctggtacccctgataagggccggatttgcccaaccccaaatttggggggtatctcacaggcccccccccccacaaattcccctttcatgactacgg

SEQ ID NO: 89492 - DNA, 307 bp, Zea mays
  Clone ID: MRT4577_181617C.1
atgaccgcaaaggattgctgcatgatgtgtttcacatactatctgatctggagctaataggccacagggtgaaggtggcgaccacaccgtacggaagagttgttgaccttttctgtatcactgatggcatggaactgctgcacagaatggagaggcatgaggagacctgctcggagctaacatgtaccctgggcccttacatcaactgctaggtcgtaccagcagaatggatccagcatgggttttctttcctgccgcctgagatcggctaggaactgttcatggcggagcttgctgacactgacag

SEQ ID NO: 89493 - DNA, 460 bp, Zea mays
  unsure (1)..(460): unsure at all n locations
  Clone ID: MRT4577_181618C.1
gtctaagcgnacatggatttatgggaaaatttataggcctataaacaaggagggggagcatatcatgacgaggatgtagaaacgaactcttgcagaggaggtggaaattacacatgatgaccaacaaaagtgggaacgctagaacgaaagtgtaacatataaagaatcacccttagatctgggagcaagcatttacaaacacaagctcacatgtcatacaaggggaggaaacaagaacaactttgtcacaaaaaaagatgggcacccttgaaacaaccatacgacaagggacaacgacaggagatacaatgcgataaaagaatcagatggacatagaagccaagcggaatcggacaacagtaatggaggaggaataccgaaagaagacaaagagcctgagaaaccaaaagagggcaaaaagaatcagacaggcaaaccaaatgatagaataccagaaaaa

SEQ ID NO: 89494 - DNA, 688 bp, Zea mays
  Clone ID: MRT4577_181619C.1
ccggggggtttaaacctcagtgttatggcttgtaagggcttcggcccaacttttttcttcttcttaaatataatgatataccaactctcctgcatattcgagaaaaaaaaaaacatcgcactatgtcccgtttgtgaccaagaagagacaatccagcatatcctggtctctcatgtcttcataagacaagtttggttgctcatcctccaaaaaatgggtttggcaggacttgcccctcagcttgatgcaaggcacgtctctaattagtggaatagtgcagtcagaagtgtgcccaaggatttgaaaaaaggcatcaactccctcgtcattatggtcatctggtggtttgggagatatgggaacaccgcaacgatgagggtatgttacagttggcggtgaatgagaatagcttgtggtgtttcagccctctacgagttactcgtcaggtcacattatccttgacaattaggtcaggatgtgtgtggtggaggtcagttttttctaatttatgtggctcgcctgcaactatacatctacagagctggccctctagcctctccttgtattttttccttcttaatgaaatgatacacagttctcctgcctcattagagaaaaaaggccactgtctactatcatgatcacctgccatatgatttggcgtcacacaaaaaatgaagcagaaatc

SEQ ID NO: 89495 - DNA, 233 bp, Zea mays
  Clone ID: MRT4577_18161C.1
aggggggggggggccctttctacttacaagaaacgggtcagtaagacaaacataattccggaaaaaatttttatggcccttaaaaactcgcttaaataaaaactttttttccaacattcaagcccaacaaatgtttttttaaaaaaattttcaacaaatggtttcactacacaattccatttgtccagctggaaaatctcagccatctattaaaccacttcttttccatggga

SEQ ID NO: 89496 - DNA, 351 bp, Zea mays
  Clone ID: MRT4577_181620C.1
tttatttttgtgggttttttttttttttttttttttttttgaggagcaaacaaacgggggggatggggtttatttgccaattcaacggtttctacaaaaggggaattttaattaataaaaaaacagaacccttaaaaaaaaaaccgttttttacaacaccgggggtttttatttaggttttggaaaaaaacgaacttgggctggttaaataaacaccttaggatgtccccatttgttatgaagggggccaacggaccacttaaccccggggagatgcttaagggacttccacctttcttgaacatggggttttgtccctacaggaaaggccggtccggaaggttcgggact

SEQ ID NO: 89497 - DNA, 400 bp, Zea mays
  Clone ID: MRT4577_181621C.1
cccacgcatcctagcaaacaataatccacactcaacaatttaccaacaatcactaccaatatgagaatgctacttatacaccttactctctcttcatatatttataactcaacaatcttccctcaatgctcacaaactcctatatcttcccttcttcccccataccttccatcaatcatatctacaatatgtgaaaacccacctcttcatccctatatactccaacaagcaatcactacaaacaacatacctctatcacccttactgattcaacaatcaccagccatatctttcttacattcattgctacaaaccatcaattcacatacactacaacaactgcacctacctacgatcaatcaattcactcctctcaacctacctctctactttcactaac

SEQ ID NO: 89498 - DNA, 378 bp, Zea mays
  unsure (1)..(378): unsure at all n locations
  Clone ID: MRT4577_181622C.1
aagccccacgtggtgctggggccgtgcccggggcacgggcacatcgcgccgcacgtgcgggtggggcgcgccctccgcgcccgcggggtgcacgccacgctcgtgcacaccgagctgtaccaccgccgcctgctgcgcgcggagcggcancangccacgggcggggacgacgccctggacccggacgaggggttctccgtggaggggatgccgggcggggtatcggtggaggacccaccgcgcgcggtgcgtgcgtgccacgaggcgagggggcgcaactgcctcnagcgcggcgaggcgctgctgcgggacctgctgctgccgcccaccggcgggcgcggcggcangtgcgtcgtgggcgacaccccgatgccggtc

SEQ ID NO: 89499 - DNA, 347 bp, Zea mays
  Clone ID: MRT4577_181623C.1
atgatatattatcattttttttttgttgtttctttttaaaaaaggggggaaaaaagcccaaaaacaagggggaaagaaaaaaaggtggacaaaacaaatggcccggccaggcaaaaaaaaaccccatggaaggctggcccctttcgggtacgaagaggaagaccccccccccccccaaaaaaggggacaaaaaagggttaaaggaaatacaaaaacccccaaacaaaggggcctaacggcaaaaaaggggctcaatggcggccaaaatctgaaaaagggccctaaacatggagcgctggcaaactggagaccctttccaagagaaaacttaggcttgatcaagacct

SEQ ID NO: 89500 - DNA, 506 bp, Zea mays
  Clone ID: MRT4577_181624C.1
gggggcgccttctcctctaagaaccggaccaaggtggaccgaagcggtgcctacctgggcaggcacgccggcaagagcatggtggccagcgggctccaccggcggtgactagtgcaggtgtactacgccattggcaaacctgatcccctgtacgcggttgttgactgctacggcaccgggaggattcgacacaaggagatcctaaagatcgtacaaagaaaacttcgacgtttggccagggatggtcaccatgaacctgcacctgaacaacggccgaaacaggatgatcaatacctgcgcatacggccactttttccgtgacgacgccgaatacacctgtgaggtggggaatcccataaataaggcatcctcttaaaaatgtattgggaaggtcactggacatgaagcccatcttgacatggctctgctgatacctgcaaggattgctgctgctgctgccgcactttgatgtgtgtcatgatcagcgactggctgatgtgctacat

SEQ ID NO: 89501 - DNA, 1752 bp, Zea mays
  Clone ID: MRT4577_181625C.1
cattgggtacctcgaggccggcccctaccggacagtgaggcgccgcttgccctccacatacggccgcggcgaggaacccaaaaggccaaaaccctcccaaaagctactacacagtacacacacggaacggaatccgggcatccgggaaagcagccctaatctcaaggccgcggctgcgagcgctgcttcccacctcccaactccggaactcctccccagtcgccgccagccgcgcgcacacccaccgagagctcgggctttctttctccgttcctccctcgcgcgctcagggtttcacgatggaggccgaggcggcggccaagagggcgcgggagggcggggaggacgccaccgcgccggtggcgggggccgaggcggtggtcgccggtgctggcgagcaggcggggatctccgccgtcatcccaggatggttctccgagatcagccccatgtggcccggtgaggcgcactccttgaaggtggagaaggtgctgttccagggcaagtcagactaccaaaatgtgatggtttttcagtcctccacgtacgggaaggtgcttgtcctcgacggagttattcaggtgacagagagggatgagtgcgcgtaccaagagatgattactcacctgcccctttgctccatcaaagaccccaagaaggtgttggttattggagggggggatggtggtgttttgcgtgaggtttcacggcatatctctgtggagcagattgacatctgtgaaattgataagatggtggtagatgtctccaagcaatttttccctcatctagctgttggatttgaagaccctcgtgtgtcattacacattggagatggggttgccttcttgaaaaatgctccagagggtacatatgatgcagtaattgtggattcttctgatccgataggtcctgctcaggagctttttgagaagcctttcttccagtcggtggccagagctttgcgtccaggtggagttgtatgcacccaggcagagagcatatggctacatatgcacatcattgaagatattttcgtcaattgccgccaagttttcaaaggctcagttaactatgcttggacaacagtacctacataccctagcggagttattgggttcatgctttgctccaccgaagggcctgctgttgatttccagcaccctgttttcaacatcgaggaggatgaacattctacgaaatcaaaaggaccccttaagttctacaactcggagatccacacggcatcattctgtttgccctcttttgcaaagagggtaattgagtcaaaggcaagctagacgtgaggatacttcaccaagtccagtcgattgggttaagtaccttaggcgcaacacaaaatttgttgtcgtgtgaaaatgggatgcctccctcccccaccccccacttgatgaataagcacatgagatgagatgcaacggttatcggagttgtcagtctatacgattctgtctgttgtatgtgccggctgccaggtgcagctatgaaaacgttttgcaatagctgttttcggcagtgctctgatcaggttgagttttggacatcataaaaaaaaaaaaaaaagcggcacctgatactccctccgttcttttttatttggcgcggtttagttcaaaaatgaactagtggtgataaatattcgagagaacggaggtagtaccacagatggaatatataagaaataaaactgtgtaatggttgttgccatcctatctttttgaaactggttca

SEQ ID NO: 89502 - DNA, 279 bp, Zea mays
  Clone ID: MRT4577_181626C.1
gacatctctgataagctgcaatggctgctaaagctggtcctgccaagaagggtgatgcctagacccactccttgtaggttgccacggctgcaaagtctggggcagccaacactatgaccaataagatccgtacgtctgtgtcatttcaccgccccacgaccctgaacaatgcttgggaccccaactacccacgaatcagcactaccggaaggaacaagcttgatcagtaccacaatctcacgtacccccttaccacataattagcgatgaagaagattg

SEQ ID NO: 89503 - DNA, 617 bp, Zea mays
  Clone ID: MRT4577_181627C.1
ccctcctcgagtttttttttttttttttttttttttttttttttttttttttttttttttttttttttttttttttttttttttttttttaaaccaccggaccagcccttggtttaaaaaaaggggaaaaccacccttaccaccgggcggttttttttggaaaaacctttaaacaaaccctggggggggggtttccccccaaaaaaggaaaaaggggggtttggcaaatttttagggaattttaaaaagggtttggggaaaaacaaacaaaaaccaggggtcggttttgggccggcccaacccctaaattttggtcattcccccaaaaaaacccgggggggggggcccccccttggggaatgcctatttcccaaaaggggaaaaatttttttgacccccttccaaaaacggaagggcccccccccccccccaacttaattggcccaaaaaaaagggcccccccccaaacctgggaagggccactttgagttttacccaaacccccaccgggaaaaaaaaaaccgggggtttcaccctttgcaacaaccggaggggggagggtccctggaaaacctcccccttcccggggaaacccttaaaaggccaaaccccatttt

SEQ ID NO: 89504 - DNA, 393 bp, Zea mays
  Clone ID: MRT4577_181628C.1
gaaggctctaggaggtgctactctacttcaggtgctgtgcatgtgcaactggtgcgggcaagttgagtggataggtacgtggtgcagtagctagattaagcaagtgtactaaaactcgcaagcgaaatgagaagggtgagaaggacaatgagtacgacaatgtacctaccgaactatgagaggaagcattaaaaaaaaaaaaaagaggacgggcaatctagacaatgcaagctgacaaccgcatgcatgcgattacatagatgttgtatagcgtcacacaaaggcatatgaatctagacaggcaatacaacaaggctacttacaagacggtgcaagctcacatctaacttgctgagctagagatagcagaggccgcagttaaaaaggtactga

SEQ ID NO: 89505 - DNA, 513 bp, Zea mays
  Clone ID: MRT4577_181629C.1
ccctccctcgagtttttttttttttttttttttttttttttttttttttttttttttttttttttttttttttttttttttttttttttttaaacccccggaccggcccttggtttaaaaaaaggggaaaaccccccctaccaccgggcggttttttttggaaaaacctttaacccaacccgggggggggggtttccccccaaaaaaggaaaaaggggggtttggcaacttttcagggaattttaaaaagggttttgggaaaaaccaacaaaaaccaggggtccgttttgggccggccaaacccctaaaatttggtcaaccccccaaaaaaatcccggggggggggcccccccttgggaaaggcctaattcccaaagagggaaaaggtttttcgacccccttccaaaaacggaagggcccccccccccccccaacctaattggcccaaaaaaaagggccccccccccaacctggaaagggccactttgagttttacccaaacccccacggggg

SEQ ID NO: 89506 - DNA, 442 bp, Zea mays
  Clone ID: MRT4577_18162C.1
ttcttcatcctaatctcccaccacttcccccacacactcccctcttccgccatggtcatggacaagtccaacctcccacagccgccgccgtctcctcccttcttcgccttctcgctcaagtccctcaacaaggcctcctacaagatctccaagcagtcgtcctccgcctcttccgctccctctcccgctcccccttccaccatgagagcgccttccccgtcgccgccggctccccgcccacccgcaccacttccgccgccgcaggcctcctccgtccctgccgaccacccgcctccccagcccccggtgtacaacatcgacaagtcggactttcgcgacgttgttcagaagcttaccggctcgccgttccaccttttgccggcccagccccgggccggcccccgtcctcgttctcggattggcgcctccctcttcttcctta

SEQ ID NO: 89507 - DNA, 397 bp, Zea mays
  Clone ID: MRT4577_181630C.1
gggccgggatttcaacactgcccggtgcccgtcatgtattcggacaaccactggggcggctcgtccgagatcgtcgatggggcggcggaggatgaccacagccgccaacatggagctgaaccgaggagcgatgtcgtggcgacagcaaccacgagctgcacgatgacgcagcagagctgggtgtgatggccgccggatcgcccagaagaaggacatagtacgggtacctcgcgtgtgcctccgtgcacctcaagctcctctggggcggcttgtggtgcgtcgtccccgatttcgtcctgatccctctccccatcatcctcgagaagtgcatcccgaacaagaagccagagccgccgccgacctatcgagatccagacaccctgcacaacgtgctcct

SEQ ID NO: 89508 - DNA, 377 bp, Zea mays
  Clone ID: MRT4577_181631C.1
cttcttaaagttctttatcccatttagaagttctttcccccaccatctttcaaacccaatcccactttccaaagaccatcccaattcaacaaaaattcatatcaaaacaccaacccatctcaaataaatctttgacccaattaccaacccaatacgaataacctattctacccatgcctttaccaccacaacccatcacttctatgatttcaaatcccaaacccacataatacatgtccattgatccacttaaccacacctacaaaaaccctagctcaccatggaaacagacctcagaagacacctgaccccctaactttatatactccccattttctagaccacatcaagaacttcatagtcagccataaactcca

SEQ ID NO: 89509 - DNA, 397 bp, Zea mays
  Clone ID: MRT4577_181632C.1
catcccccacgctggctcgccaccgccgccgcagcaggcgtgggaatctgggcagcgccccgcggagaagaggaggcagcgcgctctccgtccgtcatggctggtttttatctcttattacttgctctttttattatctttactattctatcatttttttttattttactacttctttttgttaaaaattatctttactaatctataattttttattttttattttatcttatttactttttttatttttttttattttatttatatcatttatttttctttccagtataactctttttaaacccttccaatagttttttttcattgacaaatgtctctttccacccctattttttaacatccaatgtgaatgtttatttcctttgacatttcttaa

SEQ ID NO: 89510 - DNA, 375 bp, Zea mays
  unsure (1)..(375): unsure at all n locations
  Clone ID: MRT4577_181633C.1
aacgggnccgaaatcccgcggtcgaccacacccttcctttgttcttcgcaccttgcttcgccctaatttacttggttggccccccttccccccgcggggttttaaacaactcttgtttgtacaacaattccccccctcctcattcccactttttctttaggaattacgtcctctttaccatcttgaacaacaccgcttttccttactcattaaccaacgccatttccttttttatctctatttccaccaagtccttccccataaggcccattgtggaattactttttgcttttttttttacacattttttgtatttcacttaccaaattatttaattatccttttcttattaaccttctctttttttttatttta

SEQ ID NO: 89511 - DNA, 239 bp, Zea mays
  Clone ID: MRT4577_181635C.1
gatgcaaaatgcaggggatctaaggaccattttgcaaacgataggggaagcgcaactgaacaaggactctaggcaaccctaactaagtccacagatgccggaacaccagatcttaactgatggaaagaatcctttcttatcgggggattggacacacaaaattacagattaccgaaggacacgcgagggatttagtttactaaaacaaacaaaaagacgccaatacgcgtagaagacag

SEQ ID NO: 89512 - DNA, 685 bp, Zea mays
  unsure (1)..(685): unsure at all n locations
  Clone ID: MRT4577_181636C.1
ccggccgggctaaacccgatccgattattaacagccaccctctcccgactccgtttaccacacctcccccctccccccttctccgactcgactaggacgctcgcgcacgccgccgccgccgccgccgccgacgacgacgagcggaagggaagagggagaactcccgatctccacgtgggctgtgggggcggacgcacggcgcgcgtggtggcctccccggtcgggggtcagatccgagctgaatcggggagatttcccggccaggtgagcattgcggagtggttcctcccgatctagggaccggtagttcggtctggtagtctgggtttcctcgcaagaacgggtccggcgcgcgcttggattgggttgggttactcgggtcctgttccagactcccagccaattcgttcgctcttccggcgatttttttggtggcagctgcagtatataattctcgcggcttcggaaagtaacccagctccgatttatgatttttatgtatggcttgatcccgtggaggcgttcagtttttatgtatggtttaatcccatggaggctttcaactcttttgactcaaggntcttgctttcggataaggctagttacttccccttgaaatagaggaggttttacggtttggaatgatgtaattgtaagggacgttataaaagcatttctgataccc

SEQ ID NO: 89513 - DNA, 194 bp, Zea mays
  Clone ID: MRT4577_181637C.1
ctcgatcgctctatcaagactgcacaaaccccgggctgggctcaaaataactgttggggctgcacactcctatacacacccactacccatcaaccgaacagaacgctaaaaaaccgctctgctccatacatatacattctctacaacacgctgggcacctcaagctgatcaaatatctccttccaactaaaaac

SEQ ID NO: 89514 - DNA, 392 bp, Zea mays
  Clone ID: MRT4577_181638C.1
ttttgggtggttttttttttttttttcaggggaccattgttgtttcaccaaaatgggcacattcccaccttttgttacaacgaaaaacacaaggagggttgttcaaccctatatgctcaccgattctatagagggtcctaacctggggggggggggggggtccccaacctaaaacactatgaacgggctcgggagcccctagcggctgcattaacaatggggggcggacattgaactccacctccccgtggaactacaaatactaaaccccgcggaccactagcatttactctggccccctcttccctgtatagaaccctcaatgttcaacccctgattttccaaccggcccctcggggcgaaccaactttccctatagtgacgtcgatcac

SEQ ID NO: 89515 - DNA, 457 bp, Zea mays
  Clone ID: MRT4577_18163C.1
ggccctaggggccttttttttttttttttttttttgttttttttttttttttttttttttattgtttattatttgttttttttttttttttacaaagtgcaatttccccctggcgggaaaaactgttaaccttttgagaaaaaagcccacggaaaaagtgaaaccccctttaaaacccaaaaattttggaccttccaaaaggttgtcaatttgaatgggcccaccacaaaaccccggaaggattacaggggcaaccccagttcaggttcatttacatgcggggaagaagcaaaaccgcgaaaatttgatgaccacctcgtgcgcaacttctgggttttcaggaacacaaatggggggaaaaaccttggtgggcaccccttccgaaacagaggggacacccccaaaaaaaagggggatatcttcaggggtttcagagtcatgtagccttgaaaacccg

SEQ ID NO: 89516 - DNA, 614 bp, Zea mays
  unsure (1)..(614): unsure at all n locations
  Clone ID: MRT4577_181640C.1
aattcggcacgaggctctgtataccnccctcgcattgtgctttctttgcttgtcttgctcgcgtggtagatgggatttgctcctctaagtgaccataattgcgactccgtactgttagccatgatctcgttctgggtaatgatgttacgcacgtcgcactttatttcctgatgttgagcttgcatctgattgatcataaatgctgaggacgtgttctgtttttggtagttagtatgctgctgtttgtgggagatatgtgaggctgcatctgggaggcttggaacaacaactcttttggttatatccttgtattgagcattgaatttgtggatggactggtattgattgccttctgcatatacaaaacataaggatcaccaatctgttgccaaatcctgtacaacaagcatctttcttgctgagcagcagcacacatgatagtttgggttctggaggagcatgtgtgagtggaccagcgtcattagttgtttcctgagtatctatttttagaatagcataagcatgtgctgattttgcctcaatactgttcacactagatgtacagcaaacttggggttactgtacgaaagaatgctatttgtcttctccattgc

SEQ ID NO: 89517 - DNA, 568 bp, Zea mays
  Clone ID: MRT4577_181641C.1
aaaggaaaaccaaaccggttttttttattaaaacagggccgatttttaagggccccgggaagaaaaggcgggcccacccgcccaaaaaatacacatccccccaaaaggtttccccaactttttaaaaacatttaaaggggggaggaaccaggccaaaatttccgggggggaggggggccaaaacagatcccacacgggcccactttgggataggggtttacaggcttggggccggaaaaacaaagggggggcagtccataggggaacttggaaaaaaaacccgaagttgaccatgcccccaagttacaaccccacctccgaggggaaatggcccccccttggggtttcctcgccaaatatggggggaagttttgttaccaaaactccactgcccccaatggatctcaggggggggaaaaatttgaaaagcaacttttggggaacaacccctttaaggggatagttttccaaaaaaacttttcaatcacgtttggaaaaaaaaggactaaaagggggcccctgaaacccccaaattgggggtggggtaaaaactttttttgcatttttt

SEQ ID NO: 89518 - DNA, 302 bp, Zea mays
  unsure (1)..(302): unsure at all n locations
  Clone ID: MRT4577_181642C.1
gctatatctctatctctctatctatagcagcttttcttacgtacccaagcatacgagcacatagatgttttataatatcacctatatacaattcactaaccncaattcaacaaccactggactacaaaaacactaccgctacaaacctcaatatactcaaatcacatacccctcattacagctctcttaatatagaagagatcataaccatatagccctttacaacacactctcaccaacaatttcgcatactacacgcccaatattactccatttttagcgcctcatttaacgcttacact

SEQ ID NO: 89519 - DNA, 479 bp, Zea mays
  Clone ID: MRT4577_181643C.1
gttccaggttacgctctccacagtccacactccctagttccaattccaatccaatccccattactccagccatcagtacggcagtaccaccccacctgaccgccccaacgacggtggttcttttcgcctcatctcctaccccgtgtgctcaccggcgttggctatgcaccatcgcatgggtcgcttcctgctcttgccggctctaaccttggtagttgcgtccgcgtgggtcccgatcaccttcgccgacccgcaggccacgctgctcaaccaggggtgcagccagtacaacgccacgcccgcgtccgccttcatcgccgccctcaactccacgttcgccagcctccgcgctaacctctccgctgcaagcagcgtcggtttcgccaccgcggcggaaccgcgcgctgccgccccggcgttcgcgatggcgcagtgccgcccgtacgtcgcgggccgtgactgtgtcgcctgcttcgacc

SEQ ID NO: 89520 - DNA, 388 bp, Zea mays
  Clone ID: MRT4577_181644C.1
cagggcgggagctgcctgcaactgtgacggcgaacgaagacgaaggtatgtagcacattcggggacggaaaaggcctacatacctaccttaacagagctgcccctatgtaagcctggagctacagaagttctgaatctggtactgatatactactctcgccagacagagctatctacaagtctaacaagctcgacaggctcacatcaacagacattgtcactttcgttacccccacgacgctgttcgcggtctccgtaaaattactcttgctcttctaagccccagtgccacagcatgctcttccagaaacaaaacttctcgaagcaggtcttcaacctagggtccgttacgttgcgcttgcaatgccccgccgtgaagttaaacttc

SEQ ID NO: 89521 - DNA, 625 bp, Zea mays
  Clone ID: MRT4577_181645C.1
cacaagctctgaagccctagcccctagccgcctagcgtcattcagtcacagccgccacaaggcacaagccactgaagccacgctgccacagcgcacacggcacgccgcacaccgacggaccggctcccgtcatcgcgccgtccgtacatcgccgccgggcgccgggacctgccagtgccagccgcggggaagccgccgccccttacaggtgagtcgctctgccacgcctggtcgcgggtcgcctgcagcctgctcaacgcccgaacgccgctcgcccgctcggccggtcctagctgctgcgcggcagcgcgggcgcggctgcgccctgctacacctggctgctgccgtgctgcgcggctggcggctgcgccctgctcgagtgctcggccagttctaggctcctagctggatttggtagcaccatggatgtaaatcacatcgctgatatggaggatgggttaaataatgatgaaatggaagctctatttgagggtgatgctgatgccggttacaatgaccaaatagcagaggaccatgctgcctgtgtccctattgccagtgatgagcatgccatcgtccaacaacaagttggcctaagaaagaagaaatccatgtgtgtgaatga

SEQ ID NO: 89522 - DNA, 272 bp, Zea mays
  Clone ID: MRT4577_181646C.1
gatctattttttatattgcgaaagggggttctgaaagaagtgatatattcttataataaggatatattggaatacttattggattaacactctaaccccttcacaagaacccccggtctttggttggtttccaaatggtatggcaagaaacccctggtttaattgagcccaaaggtatttggaaaaatataaaacggccttggtccctttataaattgttaaggaccggaattggagaacccacaaggggcctttaaagttttggccgccaa

SEQ ID NO: 89523 - DNA, 393 bp, Zea mays
  Clone ID: MRT4577_181647C.1
atgttttttttttttttttttttttttaaaacattttttttttttagggcagggtgtattgggtttttatcttatgctatttggttttggtttttttttgaaaatttaaaatatactaggtttgataggttttttttttttagtcacgaccaattttcacagaaaagggacgcgggggggggggcgagaaccccaacaggtacttttttttttgcgaggaaaattataggaattcctattagaactcggcggaagcatgataattctgttagggggggaggaccaccctaaggtaactttaaaaaaaaaatacgagcccgaattttaaggggttactcttgggaagccgattgagggagctaaatcacataaaatgcgtttggctgactgccc

SEQ ID NO: 89524 - DNA, 640 bp, Zea mays
  Clone ID: MRT4577_181648C.1
aatccttagacgcgaacgccctcctcctcccctcctgcccccgagcgccgccgccaccaccaccaccgcctccggcatactctgtgacttcttccatgccaccatactcggtgacatcctcaatgccgccatcaccactacccccaccactcataccgtttagtccgataaggataagaaagagggagaagagagatggtgatctcgacggggatgattccacggatgaagacgacgacactgacagctgctcgacgcctctgcccccgccgccgccgcccggtatggagtgggagtacacggacccaatcactatgcgtcccttggattttcttccatcttcgttggctgatcgggacgataaagaagtggcctcacaagtcagcatggatgacgattgggtggaaacgaacatagaatttgatggacaggatgaaagcgtctctggcaatgctgatggcatacttaggcgtgtggaattgcatccagcaaagagtagggttatgggtgatgaaaactcatcaatgatgagcagctgggtaacaaaggactcgaactcttcggtgatggcctgggcgactgacaagtcactggtagaaatagccaaggagattgatgagtacttcttgaaagcagccgc

SEQ ID NO: 89525 - DNA, 342 bp, Zea mays
  Clone ID: MRT4577_181649C.1
ggggccggggcccaaaaaacaaatattgggggcccaggtcccctagcaaaaagaaggggaaaaatctttccggaaaaaaacccaaaaaaaatgcccccaaaaatcgggggccattgcccccaaaaccggggaaataaacaagcccatgcagctttgctccattccccggtacatgggaaacaacccaacaatgccgaaaaattcatttttatcaccccaagaagggacaaaaatttatttttaaaaacaaaaacctttacccttctttattccaacccaagaaacaagcctgtaaactgggaaacccccaattttttgaaccaaaccccattttcctcaaaa

SEQ ID NO: 89526 - DNA, 295 bp, Zea mays
  Clone ID: MRT4577_181650C.1
attcggctcgaggcaaaacagccatgtttacgacaacggccccacctcactatggctagacactgaacctgatggatgcatgccgctcattcgcgaggctactgcatgagctgacagtgtacactgtcgactgggtcaacccggtccgtcttgaagggcagaagacagccgccattgagagagtgcatctattcaattgacaggaggcataccggatcagtggctcatagaggcacatcttgagaatatctatgcatactacatggcgcttgagatgcgccaagaactatgactt

SEQ ID NO: 89527 - DNA, 491 bp, Zea mays
  unsure (1)..(491): unsure at all n locations
  Clone ID: MRT4577_181651C.1
cccacgcgtccgcccacgcgtccggcgctgcgcctggcggcgaagatgcacgagacgcgttactttacgttgcgcgacatggcgtcggcaatggggctgcccagcacggacgcagcactgtccctccacgcgacgtgcgagtggaagcttgcagccgcgctcggctttgacgcgcttgtcagcgagcacgagtttcatgcgacgatgacgcttgtcgattctttctgagatgcaatggcaaaacacgatcccggagtctttcactttttgttcactatttgagattgagaacanatcttggtggtacagcgctgacgggtttacggtcgcaaaatttcgacctttttcttgggaccaggcaacacgaaaacaaaaaaagaggatgaggctgaaaaactttcttgtgttgggcttaaaatggaaagtggaaaaccttttgcattaatattttgggggtgctttgagagcacatgttcagtgggtaacctttt

SEQ ID NO: 89528 - DNA, 2478 bp, Zea mays
  Clone ID: MRT4577_181652C.1
atggcaatcggcgaacacgaagcggcaacttttgactcctctttgctccttgaagttcgagtaaacgtcaatccagttctcgattttaatgtatttaagtggtcatcggccacatttccattcatcgcaactcagaaaaaactgtggcgcctagctttacccatgtcgacatcaccgagtgattcctttgcttcttttgtttcccattcttctagtcgtgaaccaaccccaaagtggcatcctatagcggcatatgaaaaacacacacctttgcactgggatgcagatggatgggactttgcagttgcgtcggaatctgaaggcaacctcaccgacggggatgaccttcagttcctcgttgacggggagctggactccgacaccagcactgagtggtcttggacgtacgacggagaatcatcagatgtggagtccttggacaacgatgacgacccgatgtctggacattggatgggcatggtctcctccaacgacgaagatgacgagaacgacgacggtagtagtgactacaacagtagtgatgaggacaacgacggcagtggcgacaatgacggtgatgatgatggcggggcaagccaatgcgatgagatgcctcccagcaagcgtcgtcggctgcaacatgatagcttattcggatatccgagagaacccagtttcgtcttcggtccaaagatccactgcaagaaagcaaactccatagccgacaaggcaattggaaggatgcaagagattgcagacaagatattttctgtagcgagggaaacaatccgtcctggacgagggttgacctcatttgaggccaccaaactccgtgtagcattagaggacatttcttgcatgatggagcaggactctcttgtgttgcaagagcatttggacacggtcaacaacgttaccaaccttgttcacgccaactatgaaccctcagacttgtcctcaccaatccctgctaaagacgacctcggtgaagactgggattttgccgagcactttgaaaacttttggggtgttgaatacgaatcaaatcagatgccttcctttagtgataatgagatggggaagtctggcaaagtgattgcaaagtgggacacaagaggaacaaagatttacacagaaatttgtgtagaagaggttaatgcaggaaacaagccgcataactttctaaatgcaaaagggtatgctaacctcattaataagtttgaggaacgcactggccgcacgtacaccagggatcaaatgaagaataggtgggactctttaatgagaatgtacacgcaatggaaaacacttaatcaaagggcaataggtcttggtcgagaccctcatactagatcaatcagtgcaccagatgagtggtgggctaagcaaaatgaagcaatgccagtgtgtattatgttcaaaactgtcccgcttgaaaatgaggacaaccttaagataatgtttggacccattgtgtgcaccaacgagacaacccttgttcctagagttgaggatgctaattcatcatctgatggtcatgaagaagacatttttggtgcgggtgaaaacaacacacctaaccccagctctacaattaagggaaagcgtaagatgtttcaacctgataccgaccatagtgatgatgatagggatcatgaggaattattagtggcagcattgactttggatatttggggtagctcgtcaagtagggtacccagaagaagcatggtccaaacacgtatccaatgggttgagcgtacattggagaatagtgatgattgctatgacatgtttcgcatgcgcctcactgtgtttcgtcgtttgcatgatacgttggtgcataattatggtctgcaaccaagtcgtggagtaagtacaaaggaagcgattgcaattttcttgtgggcatgcgggggtccacaatcttttaggcagattaggaacaagtttggtcactcgttggaaacaattagtcgcaaatttagtgaagtccttaacacaatttatatgatgtcttcggacgtcatcaagcctaaggacacacatttcaatgagattcatcctaggctacgagagagtagattttggccacacttcaaggattgcataggtgaaatagatggaagccactttcccgcttctgtcccggcctctgagcaaccgaagtatattggtcgacacggttgtacatcgcaaaatgtcatggccgtttgtgacttcgatatgaggttcacatttgtcgtcacaggttggcctggatcagtgcatgatactagagtattacatgatactttgatcatgtatcgagataggttcccgcatccacctaaaggtaaatactaccttgtagattctggttatcccaacaggaagggataccttgcaccatataagggtcacaagtactatacttctgaatggcaaaatgcgaggcgaccggtgagagtagcagtgctagcacatctgatgagttag

SEQ ID NO: 89529 - DNA, 456 bp, Zea mays
  Clone ID: MRT4577_181653C.1
ttgaatttaccagcttcaccgtgtggtactgctcgagagagcgctttgtgccgagaccactgtcgtgcggcgaagaattccgctgaatccgcgtccagagcaacatcagcctcccattcgacgctctcctgggcgaccagggcaagggtccgtcttcccctccccctatccgtggtgctgatgggatcgtgtcgacgacgacgacccgatctgggtgctctagtgctggagctgccacgcctacccgcacgtaggcaacaacgactgcaaaaagcccctgtacgcaggcggcccggagccctttctcctggtctggaggaagcgtcgccgaggggtggagtcacgcggttcgtggccgcgcacagtgtctgcctgccctactcccgggcgacctgccgctcctccgaaatatgcactgcgccgcaccacaactactgcgcggggatcttgctcacc

SEQ ID NO: 89530 - DNA, 324 bp, Zea mays
  Clone ID: MRT4577_181654C.1
gggaaacttgacctgggggggggaagaaaaacccccccttgggggggaaaaaaagccccccttacttgggttaagaaaaaccccttttccctgcgggaaaaaaaaccaccggacccctggcttacccaaaaacaaccacatccggggttttgtctaaaaccccaccttcggggggggacataaaacggaatttttttgaccgcccacccaaaggaatttttttgacgcaggcgctcccaattcctcccgcggggtgctgaacccacctccctcagtggtgtttatgccccacctaaccgtctaacctggaagtccggcccgggg

SEQ ID NO: 89531 - DNA, 124 bp, Zea mays
  Clone ID: MRT4577_181655C.1
attcggctcgagcgcttctgtgccttaggtttttcataccctaactggcactaaagctgggggattatcatgacgtcctgtcgcacttatagcggtaaactgtatggatgagaaacgctctcag

SEQ ID NO: 89532 - DNA, 285 bp, Zea mays
  Clone ID: MRT4577_181656C.1
ctcttattgttcaaacttttacccggtggatattattgttcctgtctttaggttttgaaaaaagcccggagttaacaaaaaatatgggaccgaaaaacctacccttactaaccaaaaaacttaaaaggaaatgaacctttaaaccaacaccttattcccgggacactaaaagacctgtaattacgaacgaaaaagggtgttgacatgtggcctgatactaatcagaaggaaccgcgcacgaaagacattcataagttaaggcttgcacccgattctctcacgcca

SEQ ID NO: 89533 - DNA, 370 bp, Zea mays
  unsure (1)..(370): unsure at all n locations
  Clone ID: MRT4577_181657C.1
ccaaaacactcgattgttggccatcaatggaggatgatatcacggggtgtgaagagtgttcttatgccatgaaaattcaacgaatgtcacgcccttttcgtaatagatcatgttaaaagcatgtgacttttatcgactttacaccgactcaagattggtgttaacacatgccatacaagaggtttgcggaagctattatcatggcctcaaagaaatataagattgcttacaacaagaaacgttctggatgggcggaggatatctttaagtgggaacatacaattcagactggtgttccaattgacttaagagagtttaataccagctacctcgttctacaagttatgaccatgtggnggaatgacagacg

SEQ ID NO: 89534 - DNA, 849 bp, Zea mays
  unsure (1)..(849): unsure at all n locations
  Clone ID: MRT4577_181658C.1
ggccgctcgagccggcgggcgactcttcgcccaaaccctacccctcgagcaaccgcgccgccgccgccgccgctccacccagcgttcgggttgctcgccgccggcgagctcgtgccgcgactccaccatgaagctgaacatcgcgaaccccaccacggggtgccagaagaaggtcgagatcgatgacgaccagaagctgcggaacctttatgacaagagaatctcccaggaggtagttggtgatcttctgggtgaggaattcaagggttacatcttcaagatcatgggtggctgcgataagcagggtttcccaatgaagcaaggagtgctaacttctgggcgtgtccgccttctgcttcacaggggcacaccttgcttccgtgggtttggcaggcgtaatggtgagcgcaggaggaagtccgtccgtggttgcattgtcagccaagacctgtctgttatcaacttggtgattgtcaagaagggtgagaatgatctgccaggccttaccgacactgagaagcccaggatgaggggacccaagagggcttccaagatcaagaagctcttcaaccttggcaaggatgatgatgtccgcagctatgtcaacacataccgcaggaccttccttaacaagaagggcaagaaggtgagcaaggctcccaagatccagcgtctcgtgactcccttgaccctccagaggaagcgcgccagaattgcagacaagaagaagaggatcgccgaagaagaagtcagaggctgcagagtaccagaagctgcttgcacagaggctcaaggagcagagagaccgccgcagcgagagcatggnccaagaggaggtcgaagctgtct

SEQ ID NO: 89535 - DNA, 333 bp, Zea mays
  Clone ID: MRT4577_181659C.1
ccaactggcagcataggcaagcacaatagggcaccaacagtggcagccaaaatacaaggacttcttatgcaacttgggctttctgcatgtgctgctacggtgaccattcatccacacagctagcaaggtcctatagcttaccttctttcccaacacctcacaccagggggggccttcgtatggaaaaacccaaagctatagccctacaagaaacaacatgacactcgggctggggttttacctaaatcaaccttgcacctccaacaatgatcagccctattgcaacagggacctctagcgcaatgattggcacacaatagcaggggacaacaa

SEQ ID NO: 89536 - DNA, 216 bp, Zea mays
  Clone ID: MRT4577_18165C.1
ccctcgcgagctctccaccccttcacacgaccctcctcggcggcggcggcagcgatgcagatggcggtgaccaccaccgagtgccaggcgggcgtgccgactaaacaccctaacgcgcacgcccactcgcccgcgcagtatgctgacccgcaccaccacatgccggagacactgtgggtcgtctttccgtacccgccgacgccgtccatggtggtc

SEQ ID NO: 89537 - DNA, 674 bp, Zea mays
  Clone ID: MRT4577_181660C.1
ctcgccccaaaccctagcgctcgcgccgccgccgccgccgcaccaccgctccccagctcgcgccccgcgagcttgcgccgcaacttcaccatgaagttgaacatcgcgaaccccaccacggggtgccagaagaaggtggagatcgatgacgacatgaagctgcggaacctctatgacaagaggatctcccaggaggtagttggtgatcttctgggtgaggaattcgagggctatatcttcaagatcatgggtggctgcgataagcagggcttcccaatgaagcaaggagtgttaactcctgggcgtgttcgccttctgcttcacaggggcacatcttgcttccgtggacatggcaggcgtgttggtgagcgccggaggaagtctgtccgtggttgcattgtcagccaagacctatctgttatcaacttggtgattgtcaagaagggcaagaatgatctgccaggcctgaccgacactgagaagcccaggatgaggggacccaagagggcttccaagatcaagaagctcttcaaccttggcaaggatgatgatgtccgccagtatgtcaacacataccgcaggtccttcacaaacaagaaggggaagaccgtgagcaaggctcccaagatccagcgtcttgtgacacccttgaccctccagaggaagcgcgcgag

SEQ ID NO: 89538 - DNA, 585 bp, Zea mays
  Clone ID: MRT4577_181661C.1
ccggccgggactacctcgtgtacgtcgagccacacccgccgggcgtcgactgccaggcgtaccagctcggcatcctggccgccgccctcggaggtgaggcccaggcgaaggcggcgatgctgtacaactacaggaacgtcatgagcgggttctcggcgaggctcacgccgccggagttggaggccgtcaagaagcaacctcaggtgagccgggtgctgccgagcgcgaccttgtctctgatgagcagcaagttcgacggcgtcagctgatcccgcttcttccatccatgcaccagccagagcaagctcatccgtcgacaaacccctaaaataaatacatgttttagtttgttaattaatatatatatcattatggaataaagataccaggatgtggacccatgaagcagaagcagatcaaatactgctacatgacgggggcatgccctaatgcagcaacggggaatgaagagcagtctgacgagtgtcaataaaataggatatcatgtattttcaaacaaaaacaataatcaaaccgttttcaattctgatttttaattttattttcaacccgatttcagttttc

SEQ ID NO: 89539 - DNA, 176 bp, Zea mays
  Clone ID: MRT4577_181662C.1
gtccatgaagaagctctactccatggtgcgcccggactggttcttcggcctgtcgggcaccatcagtgccttcgtggccggctcccagatgccgctcttcgcgcttggcgtcacgcaggcactggtgtcctactacatgggctgggagaccacgaagctggaggtgcgaaagattg

SEQ ID NO: 89540 - DNA, 390 bp, Zea mays
  unsure (1)..(390): unsure at all n locations
  Clone ID: MRT4577_181663C.1
ttactttttcaaggctgncagcgctgccctagtttttttttttatagaacgtaaccagtggcccgctagcaccggtaaaagtaaattcacaaagcatcgagatgaaaaaaatgagcgaatcacaaagccagaagaacttgttcggctatatgatctgcttattcaggtatgtttgttttctgtcacatcctctttttagacatatttatcatgtgtttactagacttcgtgtgaggccgcttttttcagaatgtaacggacttgacagatttagttagctctggaagaaacaaaaatgaagaagaaaactcttttattcatgagtatgagctgaaaggcttggctttccgagctgagaggtttgttacactgtatccaagtttagcgtac

SEQ ID NO: 89541 - DNA, 160 bp, Zea mays
  unsure (1)..(160): unsure at all n locations
  Clone ID: MRT4577_181664C.1
gcagcacgagtcgantcgctcatacgcacggctcgctcgcttatacgcgncgnccgcgcacagtcgctcgtctgcaccgtcgagtcacccatctctctcgtcatcgcatcgctacgctccagcgcatcgaccatccgtcctagtgtgctcagtatgcagt

SEQ ID NO: 89542 - DNA, 315 bp, Zea mays
  Clone ID: MRT4577_181665C.1
cccacgcgtgcgcgaaatgatataaatagaggatatgaaagcgaaagtggggccattctgagttgtgaacgcgaatacaacgacggattgaacgttgaaggaattccaaagatcagacggatcggcgtgtacctaagctctgggcgacagcattatacaaagtgcctgatgatatgaacaattctatgtcattacacgggagatcggtcgtaatgcagattgtggctatgtcaacctatgtagattgaaggacatgtgcatgtagcgctacttcctatattggctaggtcgccgaaaagcgtacgatagttaccc

SEQ ID NO: 89543 - DNA, 228 bp, Zea mays
  Clone ID: MRT4577_181666C.1
gtcagcggcgtctctgagctagcatgaaccatgacgcgcgagtatgaccttctctcgccacctagtcaacacctaagtgtcgtgcaataacacggcgaggagagtctccgttcacggatgtaattcgagatcggcggctctgcgccttgatagtggtaactactcatgaggtagtgtagctgttacccggaaatcacgtatcctcgacgtggtctacagtgcatcggt

SEQ ID NO: 89544 - DNA, 258 bp, Zea mays
  Clone ID: MRT4577_181667C.1
ccttggggcccccccaacccataaaaaacgggtcctttacaccataccagcgttccccaaccaaattttaaaagggggcccaaacggggggcaggggggggtcctttagccggatagatgcatggagccaatcagccaaaccctcttgctcgaatctctctagcctaagacggagaaagcttatccttccacagtgtgtcgggggcgcccatcaaccctgggggcttaaggggtgagcacccgggggcggggccccgg

SEQ ID NO: 89545 - DNA, 484 bp, Zea mays
  unsure (1)..(484): unsure at all n locations
  Clone ID: MRT4577_181668C.1
ttccttaagcagtggtaacaacgcagagtacgcgggtgagaaatgtgttgttgtgaaggagaagactcctacaataagctccgcgttaatgagtagtaacaatacgctccttgtaacttgtggtctgtttgccaataataatgtacggactgtagtgcctatcttgaaaatatgaagagctataatgggtataacctgcctgcattttatatttaaaaaaaaaaaaaaaaaaaaaaaaaaaaaaaaaaaaaaaaaaaaaaaaaaaaaaaaaaaaaaaaaaaaaaaaaaaaaaaaaaaaatattttttgggttgttaccactgtttaagggcgaattttggaaaattnaataaaattgggggncgtttgagcatgcatttaaagggcccaattncccctatagggagtgggattaaaattaattggcgggggttttacaagggttggatttggaaaaccttgggggtactaaatttaatggcttt

SEQ ID NO: 89546 - DNA, 853 bp, Zea mays
  Clone ID: MRT4577_181669C.1
gccggccgggctgggaaagaaggtttcgtggtgtagtgtcaactcattccatgcggataccatagctggactgatggagtacatcattattgcccccgcgcgctctaccccttccccttcctccagcaccacctctgctccttcacttcaccacaatggcaaccactacccctgctgtcacggaaccggacaatgctgacgcatctcctccatctccgacgtctccaccgtccaagaagctcatgtacgagctcgccgcccggaacatctactacgccaagcctactgcagcgccgaggtcgctcgcgcagcttttgaagccgtgcggcgcggccccgacgccgccggactacatcctccgcgatgtatccctcacggctcgggccggggagatcctggccgtcgtcggcccgagcggcgccgggaagtccacgctgctcgacatcctcgccgcgcgcacagcgccgacgcacgggaggctcctgctcaactccgcgccgctgcggccgtcgtcattccgcaggctgtcgtcgcacgtgccccaggcagatgtcgcgctcaccctgctcaccgtctccgagaccttcgcgttcgcagcgtcgctgctgcacccggagtcggagtccgctgtctcggccgcggtcaccgcgctcctcgcggacctcaggcttgcccacgtcgcgcacacgcgggtctcccccgcgcggctgtccggcggcgagcgggcggcgcgtgtccatcggcctcgccctcctgcgcaaacccggcggtgctcctcctcgacgagccgacgtccggcctagactcctcctcggccgcacggtggtcgtcagttgcctccgcgccgtcgcgg

SEQ ID NO: 89547 - DNA, 581 bp, Zea mays
  Clone ID: MRT4577_18166C.1
ggctgatatgctgaacccttttcatcctccgctaatatatgcatgcagtacagctcagctctacaggtaggcagcacaagatctgcttcctacctatatgattgcaagttgatccatcatacttaacctcatgccatgcacagcttttgaaaatgtttcctgtggatgtaactggttgctgtttcctgttactgtctccatcattctaacagttctttagtggtgacatcgaacacttgttcttatgctcactgtcaatcatgaccaggtcaactacaaggagatcttattttggttacaatgaagcgcatgcatagaatgcaaacgagaaagtcccattcatggtggtgggacagccatattagcccaaagaactccaaatggctagctgagaatttggaaggtaacgactctgttttttattgaatgacagtatgcaccgacacttgttcaatctgcagtgacttgttcaatgttcatgtatcccgcagtataataataccatagcacaaactttcctgaccttttcttttctgacgagtagagatggacaagcaagtcaaagagatgctgaagctcat

SEQ ID NO: 89548 - DNA, 318 bp, Zea mays
  Clone ID: MRT4577_181670C.1
ttatcgtattttattatggagctgggaaatcatttttttttttagttattatccaatgttcattgcctgcgagaaaaccatggaaacccacaaaacctacttgcccacaaaaaaaacaacagctcattcttaactacattaaacagctttccaaacgttttccaacttctatcccacaatcagctgtggactaaaccaaaaaatcccccatgccccacattgcggttaccatccaaaccaaaaacttaaggctgataccaaaacccaaccttctgattgccattgaaaaacacgctgggcaagccctcaacgaaaaca

SEQ ID NO: 89549 - DNA, 397 bp, Zea mays
  Clone ID: MRT4577_181671C.1
ttcactttcgccgccgccgccgtcgcaagtaggggcccgttccgtcgtcgtcgccgttgccggagaaggagaggagcagccatgggtcgcgtgcggaccaagacggtgaagaagacctcgaggcaggtgatcgagaagtactactcgcggatgacgctcgactttcacaccaacaagaaggtgctcgaggaggtgtccatcctgccgtcgaagcggctgcgcaacaaggtggccgggttcaccacccacctgatgcgccgcatccagcgcgggcccgtgcggggcatcttgctgaagctgcaggaggaggagcgcgagcgccgcatggacttcgttccggagaagttggtgctcgaggtggaggagatccgcgtcgacatggagaccatggagatgc

SEQ ID NO: 89550 - DNA, 211 bp, Zea mays
  Clone ID: MRT4577_181672C.1
aattcggcacgaggatccatggccaaacgcctcactccgggcgtggttagttaacagcttcttctatgactctttcggtagcagaagaagctccgacaaagtgcgaactatgaagcttattgaccctataaccggaaacacgatccgagcagtggaggttcttgctgatgttctggtcctctcctgccggccgtacgatgcgtggcccggc

SEQ ID NO: 89551 - DNA, 404 bp, Zea mays
  Clone ID: MRT4577_181673C.1
attttcattcctcctctatccattcacctatcggcaattcattggccgtaattccacatcgcgcccactgccaaaaccaagccctcacccaacaaacccaccttggagaacgcccataagaagcccactgccgaaaaactcatgccgcgcaaggaggtcggcgagaagaacgggaacacgaacgccatgaagagcgtcacgacctacaagatctacatattcaacgcgctcaatcaggtgcacccggacattggtatctcgtccaatgccatgtccatcatgaactccttcatcaactacatcttcgagaagctggctgtcgatgccggcaatctcgcccgctacaacaagaagcccaccataaccttcctggagatccagacttttgtgcgcctcgtacttcc

SEQ ID NO: 89552 - DNA, 263 bp, Zea mays
  unsure (1)..(263): unsure at all n locations
  Clone ID: MRT4577_181674C.1
gtcaagctgacacatgatcaagaacttctcttcagatacatccagaggaatgaataccataacctcttcaacttcatcagcggtaagcagtgtgagattctgaatcttggagatggacaaggtagaactagtggtgttactagctgtcttcagagcactgatgatgatcctgttgatcaacatctgaagcggatacagcatcaggccggtaatgagganagtgatgaagaggatgaagattctgtggcagacaaggatgatag

SEQ ID NO: 89553 - DNA, 452 bp, Zea mays
  Clone ID: MRT4577_181675C.1
aacccacccaacataccctttttttttatcttttattttttaaacccccatcccctggcaataggttgaacccccccgccccgtctttggttttttcccaacaaaaattaaaaaaggggttggcccaaatttcaaattttgcaaattgggccaaggctttggcaccccatggttgccgtttagcaggggagaaaaacccaggtttcaccaaaggggaggcctttaattggggggccaaactccttcgggatgatgcccagcccaacccgggggggggtttccccctgaaggggggggcccgtccccgtcgtggaatttaacaccaggtggaaaagaaggggggccaacaccccggttgttgtttttttgttgccgcactccatgctagctagctagttttcctttttttttttcgataaaaaaaaagggaggggaccttggggccaaattct

SEQ ID NO: 89554 - DNA, 4212 bp, Zea mays
  Clone ID: MRT4577_181676C.1
atgtctactcaacgggaccatgtggatcctctcctcgaggaaatccccatcacatcttccggtgaggaagtggaccccaaggtcctcgacctcgccatgaagattgccgagaagatgttcctcaaaatgaaagaggaagatgctaagaaaaaggccgaagaagaagaatcaagaagaaaggccgaagaagataaaggtaaaggaaaatttgatgtcgaaggtgttgagcaaggtaagtctcaacaccgagggatcatctaccaaaagcaaagaaattttatccccaacttctcttcctccccacttggaaagttaccaactcttagtgagttgaactatgacgagtgggccgacaagatgaagtcgcatttaatcggtgtgcatcctagtctttgggagattgtcaatgtaggtatgtttaagcccgcccaaggagaagagatgactccggaaatgatgcaagaggttcatcgcaatgctcaagcagtgagcataattaaaggaagtctttgtccggaagaataccggaaagttcaaggaagagaagatgcccgtgacatttggaatattcttaaaatgtcacatgagggagatcccaaagctaagagacatagagttgaagctttagagagtgagcttgcaagatatgattggacaaagggtgagtcacttcaatcactctttgaccggttgatggtgttagtaaacaaaataagagtgcttgggagtgaagattggagtgactccaaggtcacaagattattcatgagagcatataaagaaaaggataaaagtcttgcaaggatgattagggatcgtgatgactatgaggatatgacgcctcatcaattatttgcaaaaaatcaacaacacgagtccgaagaagcccctatcaagacaagagactctcatgccttgatcactaatgaacaagacaaccccaagaagaacaaagaccacaaagcaaagaaagtggtcgagacctcaagtggtgaagatagctcaagtgatgaagacacaactatgttcatcaaaacattcaagaaatttgtaaggaaaaatgacaagttccaaaggaaaggaaagaagagggcatgctatgaatgtggccaaaccggtcatttcatagtggattgtcctaacaagaaggaacaagaagccaagaaggaatacaagaaggacaagttcaaaaagggaggcaagaccaagggatacttcaagaagaagaaatatggtcaagcccatattggtgaagaatggaactccgatgaagagagttctagctccaaggaagaggaagtggtggcaaacgtggccatccaatctacatcaagctcgcaactcttcaccaacctacaagatgactcctacactccaacttgcctcatggcaaaaggagataaggtaagcttatttagtaatgatttaccaaatgatgatgatgatgaacaaattgccatgaaaaataaaatgattaaagaatttggcttgaatggatacaatgttatcaccaaattaatggagaagctagataaaacaaaagcaactcttgatgctcaagaagacttgcttatccttgaaaaggaaagaaacctagagcttcaagaattgcttcacaataaggatgaaatgctagatgtcttgactaaggaagtatctttagtcaagataactatagagaataaagataaagaagtaattaatatgaaaacctctatagctaatcttgcaaatgaaaagaatgcacttgaaacaagcatgttaagcttgaatgttcaaaatcaagaacttcaagtgcaacttgaaaattgcaagaacatcaatgcctcatctttagtgattgaatctaagtctagctccttaaatgataatttttgcaaacattgtgccaaatatcatgcttcttgttgtctaactaaccatgcaaggaagaatagcccacaggtgaaggtcaaaggaattttgaaaagatgctctagcaatgatgggttaaagaaagttaaacccaagtacaagtccctaaagcccaacaatggaagaagggggcttgggttcaactcatccaaggaaaaccctagcacagtgcataaggggtggagatcccccaagttcatagagggaaccaccctatatgatgccttggggaggattcactcctcaaatgacaagtcacctcaagtaaaggtctactcctctggtgggtcaagttgggtgcttgacagtggatgtacaaatcacatgaccggggagaaagacatgtttcattcattgcaactaactcaagaagcacaagaaattgtgtttggagatagtggcaagagtaaggtgattggtattggtaaaattcctatctctgaccaacaatcactttcaaatgttttattggtagattctttaagctacaatttgttgtccgtttcacaactttgtggaatgggttataattatttattttctgatgtggatgtgaagatccttagaagggaggactcctcagttgcctttacgggtcgcttgaagggcaagctttatcttgttgatttcacaacaagtaaagtgacgcctgagacttgtttagtggcaaagtccgacaagggttggctatggcatcgccggctagcccatgttggtatgaggaatttggccaaacttcaaaaggataatcacatcattcgactaacaaatgttgtatttgagaaagatagggtttgtggcgcatgccaagcaggaaagcaacatggagtcccacataaatcaaagaatgtggtcacaacaaagaggccattggagcttcttcacatggacctcttcggacctatggcttacattagcattggtggtgaaactcaagagatattgaagaaattcatgaggagagctcaaaatgagtttgagctcaaaatcaagaaagtgagaagtgataatgggacggaattcaagaacacaggtgtcgaagaatttttaggcgaagaaggaatcaaacatgagttctcagttccttacactccacaacaaaatggtgttgtggagagaaagaaccgaactttaattgaagcagctagaaccatgttggatgagtacaagacacctgacaattttatgcaatcaaccgtctctatcttcacaagatctacaaaaagactgcttatgagcttctcactgaaagtcaagagctcaaagtttgctcctagagtggatgagggtttcttgcttggttatgcatcaaatgcgcatggatatcgcgttttcaacaataccaccggtcttgttgaaatagcgatagacgtgacatttgatgagtctaatggctcgcaagggcatgtttctaatggcactgcaggaaatgaagaactaccttgtgaggccataaagaaacttgcaataggtgaagtgagacctcaagaaaaggatgatgaggaaggaactttgtggatgaccaatgaggttgttgatgtgggtgcaaaggtggtgggtgacaaatcctccacccaagcaaacccatcaacctcaagtcatccaagtattgaagaaaatcatcaattccaaaggatgccaactatggtagaagatggacacgaaagtgttgatggtgaagtgcctcttgatcaagtgaatgatgaggaggagcaaatacaaagacaaccatcagtgcctcatcctagagtccatcataccattcaaagggaccatccggtggacaacatcctgggtagcatcaggagaggggtaacaactcgatctcgtttagctaatttttgtgaattttactcgtttgtttcctctcttgagccacttaaggttgaagaagcattgggtgatccggattggataatcgccatgcaagaggagttgaacaacttcacctggaatgaagtctggtccttagtccaaagacccaaacaaaatgtgattgtgactaaatgggtctttaggaacaaacaagatgaacatggcgtagttacaagaaacaaagcacggttggttgcccaaggctacactcaagtggaaggacttgattttggtgaaacatatgcgccggtagcaaggttagagtcaattagaatattaattgcctatgctactaaccatgatttcaagctatatcaaatggatgtcaagagcgcatttctaaatggaccactacaagagagggtctatgtggagcaaccaccgggctttgaagagccaaagaagccaaaccatgtttattga

SEQ ID NO: 89555 - DNA, 104 bp, Zea mays
  unsure (1)..(104): unsure at all n locations
  Clone ID: MRT4577_181677C.1
aggcgatcttccagaaccgtgtacagaccagtcgcaaatgcangggtggttgccatgtacgcgaaccacatgagcttcgtgtgacggacctgtagtgcagcaag

SEQ ID NO: 89556 - DNA, 351 bp, Zea mays
  unsure (1)..(351): unsure at all n locations
  Clone ID: MRT4577_181678C.1
agggagtttccgcngggcaccagggggggcacggcagacancngacacaaaccnnaccagggggcggcnncnanccaagnacagaangaagagccnnccagnngnagaagngggaggagaaaagaaagagaacannancacacaanccncngccggacacangcnngcagagngngnngggcggggggggggggagaacngnngaacnaaaaaacncacngaaccggggcccccngncangaaaccancgaaacggggcaaggggagcgaagaacagccagggcngaaagcgnnccaacngangagggaaaagggaggggggggccggccaggcanggacgcgnggggagc

SEQ ID NO: 89557 - DNA, 3879 bp, Zea mays
  Clone ID: MRT4577_181679C.1
atgtctactcaacgggaccatgtggatcctatcctcgaggatattcccgtcacatcctccggtgaggaagtggaccccaaggtcctcgacctcgccatgaagattgccgagaggatgttcctcaagatgaaagaggaagatgctaagaaaaaggccgaagaagaagaatcaagaagaaaggccgaagaagacaaatgtaaaggaaaatttgattacaatgacgacctagtggatcttttggtgtcgaaggtgttgagcaaggtatgtataagcccgcccaaggagaagagtccagaaatgatgcaagaggttcatcgcaatgctcaagcagtgagcataattaaaggaagtctttgttcggaagaataccggaaagttcaaggaagagaagatgcccgtgacatttggaacattcttaaaatgtcacatgaaggagatcccaaagctaagagacatagagttgaagcttttgagagtgagcttgctagatatgattggatcaagggtgagtcgcttcaatcactctttgatcgattgatggtgttagtaaacaagataagagtacttggaagtgaagattggagtgactccaaggtcacaagactattcatgagagcatacaaagaaaaggataagagtctagcaaggatgataagggatcgtgatgactatgaggatatgacgcctcatcaattatttgcaaagattcaacaacacgagtccgaagaagcccccatcaagacaagagactctcatgccttgatcacaaatgaacaagacacccccaagaagaacaaagaccacaaggcaaagaaagtggtcgagacgtcaagtgatgaagatagctcaagtgatgaagacacaactatgttcatcaaaacattcaagaaatttgtaaggaaaaatgacaagtttcaaaggaaaggaaagaagagggcatgctatgaatgtggccaaaccggtcatttcatagcggattgtcctaacaaaaaggaacaagaagccaagaaggaatacaagaaggacaagttcaaaaagggaggcaagaccaagggacatttcaagaagaagaaatatggtcaagcccaaattggtgaagaatggaactccgatgaagagagttctagctccgaagaagaggaagtggtggcaaacgttgccatccaatctacttcaagctcgcaactcttcaccaacctacaagacgactactacactccaacttgcctcatggcaaaaggagataaggatgcacttgaatcaagcatattaagcttgaatgtccaaaatcaagagcttcaattgcaacttgaaaattgcaagaacatcaatgcttcatctttattgattgaatctaagtctagctcctcaaataataccttttgcaaacattgtgccaaatgtcatgcttcttgttgtctaactaaccatgcaaggaagaagagcccacaggtgaaagtcaaagaaatattgaaaagatgctctagcaatgatgggttaaagaaaattgaacccaagtacaagtccctaaagcccaacaatggaagaagggggcttgggttcaactcatccaaggaaaaccctagcacagtgcataaggggtggagatcccccaagttcatagagggaaccaccctatatgatgccttggggaggattcactcctcaaatgacaagtcaactcaagtaaaggtctactcctctggtgggtcaagttgggtgcttgacagtggatgcacaaatcacatgaccggggaggaagacatgttccattccttgcaactaactcaagaagcacaagaaattgtgtttggagatagtggcaagagtaagatccttagaagggaggattcctctgttgcctttacaggtcgcttgaagggcaaactctatcttgttgatttcacaacaagtagagtgacgcctgagacttgtttagtggcaaaatctgacaggggttggctttggcgtcgccggctagctcatgttggcatgaggaacttggccaaacttcaaaaggatggtcacattattggactaacaaatgttgtgtttgagaaagatagggtttgtggcgcatgccaagtagggaagcaacatggagtcccacatcaatcaaagaatgtggttacaacaaaaaagccattggagcttcttcacatggacctcttcggacctatggcttacatcagcattggtggtagtaagtatggtttagtcattgttgatgatttttctcgtttcacctgggttttctttttaagtgataaaggtgaaactcaagaaacattgaagaaattcatgagaagagctcaaaatgagtttgaggtcaaaatcaagaaagtgaggagtgataatgggacggaattcaagaacacaggtgttgaagaattcttaggtgaagaaggaatcaaacatgagttctcggttccttacactctacaacaaaatggtgtcgtggaaagaaagaaccgaactctaattgaagcagctagaactatgttagatgagtacaagacacctgacaacttttgggcagaggcggtcaacaccacctgtcatgcaatcaaccgtctctatcttcataagatctacaagaagactgcttatgaacttctcactggtaacaaacctaaaattgattattttagagtatttgattgtaagtgttttattcttaacaagaaagtcaagagctcaaagtttgctcctagagtggacgagggtttcttgcttggttatgcatcaaatgcgcatgaatatcgtgttttcaacaataccaccggtcttgttgaaatagcgatagacgtgacatttgatgagtctaatggctcgcaagggcacgtttctaatggcactgcaggaaatgaagaaccaccttgtgaggccataaagagacttgcaataggtgaggtgagacctcaagagaaggatgatgatgaaggaactttatggatgaccaatgaggtttttgatgtgggtgcaaaggtggtgggtgacaaatcctccacccaagcaaacccatcaacctcaagtcatccaaatcttgaagaaaatcatcaaccccaaaggatgccaacggtggtagaagatgaacatgaaagtattgatggtgtagtggctcttgatcaagtagatgatgaggaggaacaaattcaaagacaaccatcagtgcctcatcctcgagttcatcacactattcaaagagatcatccggtggacaacatcctgggtagcatcaggagaggggtaacaactcgatctcgtttagcaaatttttgtgaattttactcgtttgtttcctctcttgagccacttaaggttgaagaagcgctgggtgatccggattggataattgccatgcaagaggaattgaacaacttcactcggaatgaagtctggtccttggttccaagacccaagcaaaatgtgattgggacaaaatgggtcttttggaacaaacaagatgagcatggcgtggttacaagaaataaagcacggttggttgcccaaggctacgctcaagtggaaggacttgattttggtgaaacatatgcaccggtagcaaggttagagtcaattagaatattaattgcctatgctactaaccatgatttcaagttatatcaaatggacgtcaagagtgcgtttctaaatggtccactacaagagagggtctatgtggagcaaccaccgggctttgaagacccaaggaagccaaatcatgtctatctacttcacaaggcactctacgggcttaaacaagcccctagagcttggtatgattgccttaaagattttttaattaagaatgggtttacaatagtgtcggggaccataattaggggtaccctcaagactcctaatctcagctggtaa

SEQ ID NO: 89558 - DNA, 323 bp, Zea mays
  Clone ID: MRT4577_18167C.1
attcggctcgagacgccactgagaacgtttttttgtgcggatcgccgctcacactttgggacgggttatcactgaatcgtgtctggagctgttgaccagacggcagacgggctgatgagagacaccggggaaatacgggacaaccgataacgtggctggactcacaatcacgaccgtgaatctacggtctttcgctcggtattgtgccatgccgcaaaagggtttgagcgatccaagcgcgtgaagctgaatgccacttagttttacaccgcgaattggaagcgttgcataaatgaatcgactgaatacccagggtgaggcgg

SEQ ID NO: 89559 - DNA, 2826 bp, Zea mays
  Clone ID: MRT4577_181680C.1
atgccaacagtggtagtagatgaacacgaaagtattgatggtgaagtgcctcttgatcaagtgaatgatgaggaggagaaaatacaaagacaaccatcagtgcctcatcctagagtacatcatacaattcaaagggatcatccggtggacaacatcctgggtagcatcaggagaggggtaacaactcgatctcgtttagctaatttttgtgaattttactcgtttgtttcctctcttgagccacttaaggttgaagaagcattgggtgatccggattggataattgtcatgcaagaggagttaaacaacttcacccggaatgaagtctggtccttagtccaaagacccaaacaaaatgtgattgggactaaatgggtctttaggaacaaacaagatgaacatggcgtggttacaagaaacaaagcacggttggttgcccaaggctacactcaagtggaaggacttgattttggtgaaacatatgcgtcgatagcaaggtttgagatgtctatgatgggcgagcttaaatacttcctgggatttcaagtcaaacagctcaaggaagatacttttctatgccaaaccaaatatacacaagatatgctcaagaagtttggcatggaaaaagcaaaacacgccaagactccaatgtcatcaaatggacatctcgacctaaatgaggaagattatgccggttgcaaagtagatcgaaaaagcactactgggacttgccaattccttgggcggtccttagtgtcatggagttccaagaaacaaaattgtgttgcactttccactgcagaagctgagtacatagcagctggggcatgttgtgcacaattgttatggatgaagcaaacccttagagattttggttgtgagttcaacaaaattccacttttgtgtgacaatgaaagtgccataaaacttgcaaacaatccggtgcaacactctaggacaaaacatactgacatcagacaccatttcttgagagaccacgaagccaaaggagatatcgaattgtttcatgttctatttttgtttcttagaatggtgcgtcggaggaacccgtccgtggttgaatccgactcctcagatgaccaacaaatacatggagatactcccccacgctctcgatccaagcgtgggcgaggaagcggaaatgttatgcaaggtgctgaggcctccgggtctcaaagtgctcgcggtcggacatcccggaatccttccggtcggtctcgacccgcgacgaatccgcaggcgtgggaggctacgagtgatgatgaaggcgggaaggacgatgaagttgatcttcccccggcccacgcccctgtgattcgtgggctggtcctccaccgggtggaggctcggcgtgctggcaatgagccagtaactgatttcactgccagtggaggttctgctctccttcaggatctttgtttccaaaatcctgcattgcgcattcgcgatgccaggattgatggaaaccgcttttggacgcttcatcatgtggacttttataattctgtcattctccccaagaagcatcaacctatcctgctacaacgctatatcaactgggaaggttgtgaggccattggggatccagagatgacacaggcattgagggcctgtgaaaggaaaaagatgaagattattgctcaattctactcaactttgtggataaagccagctgacgaggagagtccatacagctacccttatccgaacttctacattgaaggtagttggtataaggtgagctatcgtcgatttgctcacattcttggtttttctgacaatgatatctctggcgacaagatcaagatacatgatttccgtcagcctactagagatgaagccaaagatcttcatctttctgagtctgggaagtattgggagtctacaaacattcataagtattatcgttacatcaactccctctgcaggatgaccctcattccaaaagggggtaatcagatgaacattcttggggagagcaaggtcttgctctctttcatgaaacccagcagctcagaaagtataaatgtctttgatatgatttggcaggaaatcattcatgccgcctgctttcctttgaaggggtgtcttgatgctccgtttatcatgaagatgattgaggttgtgacccagtttaaatttgacaaaggtacaagacatcagtcatatacccctttctggattgatcccaacaatccagcagggcgcctcaggaaagctccctctagctctcgtgctcatacatctgcgggtccgtctgctggtcctgctgctgctgctgccggtgcctcgcgtccttcccctagccacggatctcccacgccacgtggtcgtggtcgtggtcgaggtcgtggccgagggatgggtgcccgcttggcccacgggtttgcggcattcttctccatgtgccggaacattgctgcggatgtccatgaggtggctcgacgtcagcgggagactgacgacaacctacgtcgtcaagcttcctctttgggtactcccttcgccccccgctctcctgatgtacctctccatcctcctcctccggagatcaacgagtggtaccagcaggcatacggggtgccttttacgacaacagatgacgtcgaagaagaagaagaagcttattttgatgattgtgagcagtttgtccctcctctgtatcatggggatccgggccaatcgtcctcttaccctccgccccagaatccttctggcagtgctcctcagtctggggaggaacactttgcctctgacctggcgcaccacctctttgctcctcatcatcctcctcccaaccggtga

SEQ ID NO: 89560 - DNA, 456 bp, Zea mays
  Clone ID: MRT4577_181681C.1
atgtctacacaacgggaccatgtggatcctctcctcgaggaaatccctgtcacatcttccggtgaggaagtggaccccaaggtcctcgacctcgccatgaagattgccgagagaatgttcctcaaaatgaaagaagaagaatcaagaagaaaggccgaagaagataaagcggattgtcctaacaagaaggaacaagaagccaagaaggaatacaagaaggacaagtttaaaaagggaggcaagaccaagggatacttcaagaagaagaagtatggtcaagcccatattggtgaagaatggaactccgatgaagagagttctagttccgaggaagaggaagtggtggcaaatgtggccatccaatctacatcaagcgcgcaactcttcaccaacctacaagacgactcctacactccaacttgcctcatggcaaagggagataagaatttggcttga

SEQ ID NO: 89561 - DNA, 763 bp, Zea mays
  Clone ID: MRT4577_181682C.1
gatgaaggctgtgttgagatatctgaaattccgaaaatccttgttccaaacagtcaagatagcagccataatatcttttttaatgattgaccagcaagccttatagaaacggcttgtgaacccatcaggccccggggctttgtccggagggagctgtttgatggtattccacacctcctcctcagagaattgttgttcgagtccctgaaggtcaatgtgctgcagtcctatggtgtcaaggttgacagttctggacctttgctgccctgtaccaattaaatcagaataaaaggaccgaaacacctcagccttatcactatgactggtcactagctgctccccgtcatgaattttggctatgaaatttttccttttccgataacgagaccaagagtagaagagttttgtattagcatcaccatctttgagccaggcaattcttgatctagtcctctttactcgcttcccatactgtgtgtatgattgtatgaaatgtatctgatgtattattcgggatcgagttttgagttgataaaaagcgtagatctgatccccacgttatttcaaaaaaaaaaaaaaaaaaacccgacggccactttgccatttgcacaaactgtcagcctcttggtcgtttctctatgacttctatacacccggatctagtcctctttactcgcttcccatactgtgtgtatgattgtatgaaatgtatctgatgtattattcgggatcgagttttgagttgataaaaagcgtagatctg

SEQ ID NO: 89562 - DNA, 4512 bp, Zea mays
  Clone ID: MRT4577_181683C.1
atgtctactcaacgggaccatgtggatcctctcctcgaggaaatccccatcacatcttccggtgaggaagtggaccccaagtttctcgacctcgccatgaagattgccgagaagatgttcctcaaaatgaaagaggaagatgctaataaaaaggtgttgagcaaggtaagtctcaacaccgaaggatcatctaccaaaagcaaaggtaacgaatttagtaaagttcaattcgattactctagaaattttattcccaacttctcttctgccccacttggaaagttaccaactcttagtgagttgaactatgacgagtgggccgacaagatgaagtcacatttaatcgatgtgcatcctagtctttgggagattgttaatgtaggtatgtataagcccgcccaaggagaagagatgactccggaaatgatgcaagaggttcatcgcaatgctcaagcagtgagcataattaaaggaagtctttgtccggaagaataccggaaagtacaaggaagagaagatgcccgtgacatttggaatattcttaaaatgtcacatgaaggagatcccaaagctaagagacatagagttgaagctttggagagtgagcttgctagatatgattggactaagggtgagccgcttcaatcactctttgatcggttgatggtgttagtaaacaaaataagagtgcttggaagtgaagattggagtgactccaaggtcacaagactattcatgagagcatataaagaaaaggataagagtctagcatggatgataagggatcgtgatgactatgaggatatgacgtctcatcaattatttgcaaagattcaacaacacgagttcaaagaagcccccatcaagacaagagactctcataccttgatcactaatgaacaagacacccccaagaagaacaaagaccacaaggcaaagaaagtgaaatttgtaaggaaaaatgataagtttcaaaggaaaggaaagaagagggcatgctatgaatgtggccaaaccggtcatttcatagcggattgtcctaacaagaaggaacaagaagccaagaaggaatacaagaaggacaagttcaaaaagggaggcaagaccaagggatatttcaagaagaagaaatatggtcaagcccatattggtgaagaatggaactccgatgaagagagttctagctctgaggaagaggaagtggtggcaaatgttgccatccaatctacttcaagctcgcaactgttcaccaacctacaagacgactcctacactccaacttgcctcatggcaaaaggagataaggtaaccttatttagtaatgattttccaaatgatgatgatgatgaacaaattgccatgaaaaataaaatgattaaagaatttggcttgaatggatacaatgttatcaccaaattaatggagaagctagataaaagaaaagcaactcttgatgctcaagaagacttgcttatccttgaaaaggaaagaaacctagagcttcaagaattgctactcaataaagatgaaatgctagatgtcttgactaaggaagatgcacttgaatcaagcatgttaagcttgaatgttcaaaataaagaacttcaagtgcaacttgaaaattgcaagaacatcaatgcctcatctttagtgattgaatctaagtctagctcctcaaacaataccttttgcaaacattgtgccaaatatcatgcttcttgttgtctaactaaccatgcaaggaagaatagcccacaggtgaaggtcaaagaaatattgaaaagatgctttagcaatgatgggttaaagaaagttgaacccaagtacaagtccctaaagcccaacaatggaagaagggggcttgggttcaactcatccaaggaaaaccctagcacagtgcataaggggtggagatcccccaagttcatagagggaaccactctatatgatgccttggggaggattcactcctcaaatgacaagtcaactcaagtaaaggtctactcctctggtgggtcaagttgggtgcttgacagtggatgtacaaatcacatgaccggggaggaagacatgtttcattccttgcaactaactcaagaagcacaagaaattgtgtttggagatagtggcaagagtaagatgattggtattggtaaaattcctatctctgaccaacaatcactttcaaatattttattggtagattctttaagctacaatttgatgtccgtttcacaactttgtggaatgggttataattgcttattttttgatgtggatgtgaagatccttagaagggaggactcctcagttgcctttacgggtcgcttgaagggcaagctttatcttgttgatttcacaacaagtaaagtgacgcctgagacttgtttagtggcaaagtccgacaagggttggctatggcatcgccggctagctcatgtcggtatgaggattttggccaaacttcaaaaggataatcacatcattggactaacaaatgttgtatttgagaaagatagggtttgtggcgcatgccaagcaggaaagcaacatggagtcccacatcaatcaaagaatgtggtcacaacaaagaggccattggagcttcttcacatggacctcttcggacctgtggcttacatcagcattggtggtagtgaaactcaagaaatattgaagaaattcatgagaagagctcaaaatgaatttgagctcaaaatcaagcaagtaagaagtgataatgggacggaattcaagaacacaggtgtcgaagaattcttaggcgaagaaggaatcaaacatgagttctcggttccttacactccacaacaaaatggtgttgtggaaagaaagaaccgaactttaattgaagcagctagaaccatgttggatgagtacaagacacctgacaacttttgggctgaggcggtcaacaccgcctgtcatgcaatcaaccgcctctatcttcacaagatctacaagaagactgcttatgagcttctcactggtaacaaacctaaagttgattattttagagtatttggttgtaagtgctttattcttaacaagaaagtcaaaagctcaaagtttgctcctagagtggacgagggtttcttgcttggttatgcatcaaatgcgcatggatatcgtgttttcaacaataccactggtcttgttgaaatagcgatagacgtgacatttgatgagtctaatggctcgcaagggcatgtttctaatggcactgcaggaaatgaagaactaccttgtgaggccataaagaaacttgcaataggtgaagtgagacctcaagaaaaagatgatgaggaaggaactttgtggatgaccaatgaggttgttgatgtgggtgcaaaggtggtgggtgacaaatcctccacccaagcaaacccatcaacctcaactcatccaagtcttgaagaaaatcatcaatcccaaaggatgccaactgtggtagaagatgaacacgaaagtgttaatggtgaagtgcctcttgatcaagtgaatgatgaggaggagcaaatacaaagacaagcatcagtgcctcatcctagagtccatcataccattcaaagggatcattcggtggacaacatcctgggtagcatcaggagaggggtaacaactcgatcttgtttagctaatttttgtgaattttactcgtttgtttcctctcttgagccacttaaggttgaagaagcattgggtgatccggattggataattgccatgcaagaggagttgaacaacttcacccggaatgaagtttggtccttagtccaaagacccaaacaaaatgtgattgggacaaaatgggtctttaggaacaaacaagatgaacatggcgtggttacaagaaacaaagcacggttggttgcccaaggctacactcaagtggaaggacttgattttggtgaaacatatgcgctggtagcaaggttagagtcaattagaatattaattgcctatgctactaaccatgatttcaagttatatcaaatggatgtcaagagcgcatttctaaatggaccactacaagagagggtctatgtggagcaaccaccgggctttgaagatccaaagaagccaaaccatgtttatctacttcacaaggcactctacgggcttaaacaagcccctagagcttgctcaaatacttcctgggatttcaagtcaaacaactcaaggaaggcacttttctatgccaaaccaaatatactcaagaagtttggcatggaaaaggcaaagcacgcgaagactccaatgtcatcaaatggacatctcgacctaaatgaggaagattatgccggttgcaaagtagatcgaaaaagcactactgggacttgccaattccttgggcggtccttagtgtcatggagttccaagaaacaaaattgtgttgcactttccactgcagaagctgagtacatagcagctggggcatgttgtgcacagttgttatggatgaagcaaaaccttagagattttggttgttag

SEQ ID NO: 89563 - DNA, 228 bp, Zea mays
  unsure (1)..(228): unsure at all n locations
  Clone ID: MRT4577_181684C.1
aaaagggccgacgacgcgtccgttcacgtgcactctgcaccccctcgacaggtgctcntaccgccgcatnggccgcggaaatgtcgcggaatctggacgacgtgccgccgctagatctgatgcacgagatgatcacgccgtatgaagtgcagctccaagccatgacacgccgttaaatcgccatgccaccacctggctcttgaaagggaacccattctaccattatta

SEQ ID NO: 89564 - DNA, 463 bp, Zea mays
  unsure (1)..(463): unsure at all n locations
  Clone ID: MRT4577_181685C.1
cccacgcgtccgcgcacaccgtgttgagaagatgctcgccgggctcgacaccaacatcctgtgagtgaaccctgactggggtctgaagacacgcaagtacacggaggtcaagcccgccctgaccaacaaggcataggacaccaagctcccctccactcagcttgtcagcgcgaaatgagaacgtttgatagctccatgagctgacagcgcggaatgagccagttgtcactgaataatttgggtaggacccgctgtcacatggacgaagagttaggttagccgctcaatggtggaatacgccgttacaagatgtgtcctaaggaaagcgagtgtgcgttgttctttgggctatgtgaatagcaggaatgcgcgtactttggttataaacagaaacgacatacgcgtggcttgcaatcgcttcaccaaanaaaaaaaaaaaaaaaaaaataannnaagggcggcc

SEQ ID NO: 89565 - DNA, 5289 bp, Zea mays
  Clone ID: MRT4577_181686C.1
atgaaaaataaaatgattaaagaatttggcttaaatggatacaatgttatcacaaaattaatggaaaagctagataaaagaaaagcaactcttgatgctcaagaagacttgcttatccttgaaaaggaaagaaacctagagcttcaagagttgattcacaataaagataaagaagtaattaacatgaaaacctctattgataattttgcaaatgaaaagaatgcacttgaatcaagcatgttaagcttgaatgttcaaaatcaagaacttcaagtgcaacttgaaaaatgcaagaacatcaatgccccctctttagtatttgaatctaagtctagctctaatgatgattcttgcaagcattgtgccaaatatcatgcttcttgttgtctaactaaccatgcaaggaagcatagcccacaggtgaaggtcaaagaatttttgaaaagatgctctagcaatgatgggttaaagaaagttgaacccaagtacaagtcccttaagcccaacaatggaagaagggggcttgggttcaactcatccaaggaaaaccctagcacagtgcataaggggtggagatcccccaagttcatagagggaaccactctatatgatgccttggggaggatccactcctcaaatgacaagtcatctcaggtctactcctctggtgggtcaagttgggtgcttgacagtggatgtacaaatcacatggccggggagaaagacatgtttcatacattgcaactaactcaagaagcacaagaaattgtgtttggagatagtggcaagagtaaggtgattggtattggtaaaattcctatctctgaccaacaatcactttcaaatgttttattagtagattccttaagctataatttattgtccgtttcacaactttgtggaatgggttataattgcttattttcggatgtggatgtgaagatccttagaagggaggactcctcagttgcctttaccggtcgcttgaagggcaagctttatcttgttgatttcacaacaagtaaagtgacgcctgagacttgtttagtggcaaaatccgacaagggttggctatggcatcgccggctagcccatgtcggtatgaggaatttggccaaacttcaaaaggataatcacatcattggactaacaaatgttgtatttgagaaagatagggtttgtggcgcatgccaagcaggaaagcaacatggagtcccacatcaatcaaagaatgtggtcacaacaaagaggccattggagcttcttcacatggacctcttcggacttgtggcctacattagcattggtggtagtaagtatggtttagttattgttgatgatttttctcgattcacctgggttttctttttgagtgacaaaggtgaaactcaagaaattttaaagaaattcatgaggagagctcaaaatgaatttgagctcaaaatcaagaaagtgagaagcgataatgggacggaattcaagaacacaggtgtcgaagaattcttaggagaagagggaatcaaacatgagttctcggtgccttacactccacaacaaaatggtgttgtggaaagaaagaaccgaactctaattgaagctgcaagaaccatgttggatgaatacaagacacctgacaacttctgggcagaggcggtcaacaccgcctgtcatgcaatcaaccgtctctatcttcataagatctacaaaaagactgcttatgagcttctcactggtaacaaacctaaagttgattattttagagtatttggttgtaaatgttttattcttaacaagaaagtcaagagctcaaagtttgctcctagagtggacgagggcttcttgcttggttatgcatcaaatgcgcatggatatcgtgttttcaacaattccaccggtcttgttgaaatagcaatagacgtgacatttgatgagtctaatggctcgcaagggcatgtttctaatgacactgcaggaaatgaagaactaccttgtgaggccataaagaaacttgccataggtgaggtgagacctcaagaaagggatgatgaagaaggaaccttgtggatgaccaatgaggtagttgatgtgggtgcaagggtggtgagtgacaaagtctccacccaagcaaacccatcaacctcaagtcatccaagccacgaagaaaatcatcaaaggatgccaacagtggtagaagatgaacaagaaaatattgatggtgaagtgcctcttgatcaagtaactgatgaggaagagcaaatacaaagacatccatcagtgcctcatcctagagtccatcaaacaattcaaagggatcatccagtggacaacatcctgggtagcatcaggagaggggtaacaactcgatctcatttagctaatttttgtgaattttactcgtttgtttcctctcttgagccacttaaggttgaagaagcattgggtgatccggattggataattgccatgcaagaggagttgaacaacttcgctaggaatgaagtctggtccttagtccaaagacccaaacaaaatgtgattgggactaaatgggtctttaggaacaagcaagatgaacatggcgtggttacaagaaacaaggcacagttggttgcccaaggctatactcaagtggaaggacttgattttggtgaaacatatgcgctggtagcaagctatatcaaatggatgtcaagagcgctttttttaaatggaccactacaagagagagtatatgtggagcaaccaccgggttttgaagacccaaagaagccaaatcatgtttatcttcttcacaaggcactctacgggcttaaacaagcccctagagcttggtttgagatgtctatgatgggcgagcttaaatacttcctgggatttcaagtcaaacaactcaaggaaggtacctttctatgccaaactaaatatactcaagatatgctcaagaagtttggcatggaaaacgcaaagcacgccaagactccaatgtcatcaaatggacatctcgacctaagtgaggaagattatgccggttgcaaagtaaatcgaaaaagcactactgggacttgccaattccttgggcggtccttagtgtcatggagttccaagaaacaaaattgtgttgcattttccactgcagaagctgaatacatagcagctggggcatgttgtgcacagttgttatggatgaagcaaacccttagagattttggttgtgagtttaacaaaattccacttttgtgtgacaatgagagtgccataaaacttgcaaacaatccggtgcaacactctagaactaaacatattggcatcagacaccatttcttgagagaccatgaagccaaaggagatatcgaactatttcatttaaaccgctcatatgaacgattgaagtgcatgctcaatatcttatgcgtttctactcaaacgtgtttgatccttgctcatcataggttctatttcttatttcttagaatggtgcgtcgaaggaacccgtcggtggtcgaatccgactcctcggatgaccaggaaatccacggagatactccacctcgctctcaatccaagcgagggcgcggaagcggcaatgtcatgccgggtgctgaggcctccgggtctcaaagtgctcgcggtcggacttcccggaatccttccggtcggtctcgacctgcgacgaatccgcaggcgtgggagcctgcaagtgatgatgatggcgggaaggacgatgaagttgatcttcccccggcccacgctcctgtgattcgcggcttggtcctccaccgggcagaggctcggcgtgctggcaatgagccagtcactaacttcactgctagtggaggctctgctcttctccaggatcttcgtttccaaaatcctgtattgcgtattcgcgatgccaggatcgatggaaatcgcttttggactcttcaccacgtggatttctataattccgtcattctccccaagaagcatcaacccatcctgcatcaacgatatattaactgggaaggttgtaaagccattggggacccagaaatgtcacaggcactgagggcctgtgaaaggaaacaaatgaagaatatcatgacattccaatatgattggaatgatgaagtgattgctcaattctactccactctctggataaagcttgctgacgaggagagtcattacaactacccctatctgaacttcttcattgaaggtagttggtacaaggtgagctatcgtcgatttgctcacattcttggcttttctgacgatgatatatctggagacaagatcaagattcatgatttccggcagcccacaagagatgaagccaaggatcttcatctgtctgagtctggaaagtattgggagtcgaccaacattcataagtattatcgttatatcaactccctctgcaggatgaccctcattccaaaagggggaaatcagatgaacatccttggggagagcaaggtcttgctctcttttatgaaacccaacagctcagaaaggattaatgtctttgacatgatatggcaggaaattattcatgcagcctgctttcctttgaaggggtgtcttcatgctccattcattatgaagatgattgaggtcgtgacccagttcagatttgacaaaggtacccgacatcagtcatacacccctttctggattgatcccaacaatccagctgcgcgcctcaggaaagccccctccagttctcgtggtcatacatctgcgggtccgtctgctgatgctggtgctgctgctgctggtgcctcgcgcccttcccctggccgcggatctcacacaccacgtggtcgtggtcgtggtcgaggtcgtggccgtgggatgggtgcccgcctggcccacgggtttgcggctttcttctccatgtgccgaaatattgctgcagatgtccatgaggtggctcgacgtcagcgggagaccgacgacaacctacgtcgtcaagcttccgctttgggtactcccttcgcccctcgctctcctgatgtacctctccaccctcctcctccagatgtcaacgagtggtaccagcaggcatatggggtacctttttcaacagctgatgacgtcgaagaagaagaaacttattttgatgatccggagcagtttgtcccgcccccatatcacggggatccgggccaatcgtcctcttatcctccgccccaggacccgtctggcagtgcacctcctccggcccggtctggagaggaacactttgcctccgacctggcgcaacacctcttcgctcctcatcatcctcctcctcactggtga

SEQ ID NO: 89566 - DNA, 5790 bp, Zea mays
  Clone ID: MRT4577_181687C.1
atgtctactcaacgggaccatgtggatcctatcctcgaggatattcccgtcacatcctccggtgaggaagtggaccccaaggtcctcgacctcgccatgaagattgccgagaggatgttcctcaagatgaaagaggaagatgctaagaaaaaggccgaagaagaagaatcaagaagaaaggccgaagaagacaaaggtaaaggaaaatttgattacaatgatgacctagtggattttttggtgtcaaaggtgttgagcaaggtaagtctcaacaccgaagaatcatctaccaaaagcaaaggtaacgagtttagtaaagttcaattcgattactctagaaattttattcccaacttctcttccgccccacttggaaagttaccaactcttagtgagttgaactatgacgagtgggccgataagatgaagtcgcatttaatcggtgtacatcctagtctttgggagattgttaatgtaggtatgtataagcccgcccaaggagaagagatgactccggaaatgatgcaagaggttcatcgcaatgctcaagcagtgagcataattaaaggaagtctttgtccggaagaataccggaaagttcaaggaagagatgatgcccgtgacatttggaacattcttaaaatgtcacatgaaggagatcccaaagctaagagacatagagttgaagctttggagagtgagcttgctagatatgattggatcaagggtgagtcgcttcaatcactctttgatcgattgatggtgttagtaaacaagataagagtacttggaagtgaagattggagtgactccaaggtcacaagattgttcatgagagcttataaagaaaaggataagagtcttgcaaggatgatcagggatcgtgatgactatgaggatatgacgcctcatcaattatttgcaaagattcaacaacacgagtccgaagaagcccctatcaagtcaagggactctcatgccttgatcactaatgaacaagacaaccccaagaagaacaaagaccacaaagcaaagaaagtggtcgagacctcaagtgatgaagatagctcaagtgatgaagacacaactatgttcatcaaaacattcaagaaatttgtaagtaaaaatgacaagtttcaaaggaaaggaaagaagagggcatgctatgaatgtggccaaaccggtcatttcatagcggattgtcctaacaagaaggaacaagaagctaagaaggaatacaagaaggacaagttcaaaaaggggggcaagaccaagggacacttcaagaagaagaaatatggtcaagcccatattggtgaagaatggaactccgatgaagagagttctagctccgaggaagaggaagtggaatttggcttgaatggatataatgttatcataaaattgatggagaagctagataaaagaaaagcaactcttgatgctcaagaagacttgcttatccttgaaaaggaaagaaacctagagcttcaaggattgctactcaataaagatgaaatgctagatgccttgactaaggaagtatctttagtcaagataactatagaggataaagaaaaggaagtaatcaatatgaaaacctctatagctagtcttgcaaatgaaaaggatgcacttgaatcaagcatattaagcttgaatgtccacaatcaagaacttcaagtgcaacttgaaaattgcaagaacatcaaagcttcatctttattgattgaatctaagtctatctcctcaaataataccttttgcaaacattgtgccaaatatcatgcttcttgttgtctaactaaccatgcaaggaaaaagagcccacaggtgaaggttaaagaaatattgaaaagatgctctagcaatgatgggttaaagaaaattgaacccaagtacaagtccctaaagcccaacaatggaagaagggggcttgggttcaactcatccaaggaaaaccctagcatagtgcataaggggtggagatcccccaagttcatagagggaaccaccctatatgatgccttggggaggattcactcctcaaatgacaagtcacctcaggtctactcctctggtgggtcaagttgggtgcttgacagtggatgtacaaatcacatgaccggggagaaagacatgtttcatacattgcaactaactcaagaagcacaagaaattgtgtttggagatagtggcaaaagtaaggtgattggtattggtaaaattcctatctcagaccaacaatcactttcaaatgttttattagtagattctttaagctataatttgttgtccgtttcacaactttgtggaatgggttataattgcctattttcggatgtggatgtgaagatccttagaagggaggactcctcagttgcctttaccggtcgcttgaagggcaagctttatcttgttgatttcacaacaagtaaagtgacgcctgagacttgtttagtggcaaagtccgacaatggttggctttggcatcgccggctagcccatgtcggtatgaggaatttggccaaacttcaaaaggataatcacatcattggactaacaaatgttgtatttgagaaagatagggtttgtggcgcatgccaagcaggaaagcaacatggagtcccacatcaatcaaagaatgtggtcacaacaaagaggccattggagcttcttcacatggacctcttcggacctgtggcctacattagcattggtggtagtaagtatggtttagtcattgttgatgatttttctcgattcacctgggttttctttttgagtgacaaaggtgaaaatcaagaaattttgaagaaattcatgaggagagctcaaaatgaatttgagctcaaaatcaagaaagtgagaagcgataatgggacggaattcaaaaacacaggtgtcgaagaattcttaggagaagagggaatcaaacatgagttctcggtgccttacactccacaacaaaatggtgttgtggaaagaaagaaccgaactctaattgaagctgcaagaaccatgttggatgagtacaagacacctgacaacttttgggcagaggcggtcaacaccgcctgtcatgcaatcaaccgtctctatcttcataagatctacaaaaagactgcttatgagcttctcactggtaacaaaccaaaagttgattattttagagtatttggttgtaagtgttttattcttaacaagaaagtcaagagctcaaagtttgctcctagagtggacgagggcttcttgcttgggtatgcatcaaatgcgcatggatatcgtgttttcaacaataccaccggtcttgttgaaatagcgatagacgtgacatttgatgagtctaatggctcgcaagggcatgtttctaatgacactgcaggaaatgaagaaccaccttgtgaggccataaagaaacttgcaataggtgaggtgagacctcaagaaagggattttgaagaaggaaccttatggatgaccaatgagatagttgatgtgggtgcaagggtggtgagtgacaaagtctccacccaagcaaacccatcaacctcaagtcatccaagccacgaagaaaatcatcaaaggatgccaacagtggtagaagatgaacaagaaagtactgatggtgaagtgcctcttgatcaagtaattgatgaggaggagcaaatacaaagacatccatcaatgccgcatcctagagtccatcaatcaatacaaagggatcatccagtggacaacatcctgggtagcatcaggagagggccacttaaggttgaagaagcattgggtgatccggattggataattgccatgcaagaggagttgaacaacttcactaggaatgaagtctggtccttagtccaaagacccaaacaaaatgtgattgggactaaatgggtctttaggaacaagcaagatgaacatggcgtggttacaagaaacaaggcacggttggttgcccaaggctatactcaagtggaaggactcgattttggtgaaacatatgcgccggtagcaaggttagaatcaattagaatattaattgcatatgctactaaccatgatttcaagctatatcaaatggatgtcaagagcgcatttctaaatggaccactacaagagagagtatatgtggagcaaccaccgggttttgaagatcaaaagaagccaaatcatgtttatcttcttcacaaggcactctacgggcttaaacaagcccctagagcttggtatgactgtcttaaagaatttttaattaagaatgggtttacaataggaaaagctgactctaccttatttactagaaaagttgacaatgaattatttgtgtgccaagtatatgttgatgacattatatttggtagtactaatgaaaaattttgtgaagagtttagcaaagtaatgacgaacaggtttgagatgtctatgatgggcgagcttaaatacttcctgggatttcaagtcaaacagctcaaggaaggtacttttctatgccaaaccaaatatacacaagatatgctcaagaaatttggcatggaaaaggcaaaacacgccaagactccaatgtcatcaaatggacatctcgacctaaatgaggaagaagctgagtacatagcagctggggcatgttgtgcacagttgttatggatgaagcaaacacttcgagattttggttgtctgtcacctgcaattttttcagtcgcgcaacacctttttgaccggtcgcagcagctgtgcatgcagaaactttttcctttgtcccggatgaccgttctcccgaagggcggaaatcaaatgaacgtccttggggagagtcgcgtcttcttcctcctccttgctccaaacagtcttgcccgcatcaatgtgtttgacatgatctgggaagagatcgtccgtgcttcctggtctcctctcaaagggtgtgttcatgcaccctttatcatgaagatgatcgaagtggtcacccagacccacttcgaaaaacctgtcaaacactcccgctacgtaccctactgggttgattcctccaacccagctgctcgtacgaagcgggctccctcacggtctggaggccctgcctcctccactgagccacctcgccagcctccccatcatccatcctcctctccccccgctgctgcctcgcgtccctctcctggccgcggatctcccatgccacgtgctcgtggtcgtggtcgaggtcgtggccgcgggatgggtgctcgcttggtccatggggttgcgacatttttctccatgtgccgcaacatttctgctgatgtccatgaagtggcacggcgtcagcgggagactgacgacaatcttcgttgtcaagcttcctccatgggcatgccttttgtccctcgttcgcctgatgtgcctctccatcctcctcccccggagatcaatgagtggcaccagcaggcctacggggtgccttttatgtctgcagacgatgaagatgaagaagtctatgttgatgatcgcgaggagtttgccccgcctccctaccatggggatccgggtcaatcatcctcccaccctccgcctccttacccgggtccgggacccattcctggtgaccctaggccatccggctctggttaccaccaccaccctccaccttctcctgatcatcgtacatcttcggcatctgttttttctgcggctgatgagccacctcgggactccacttttgaggaggacgcgatgaggacttttttccctgactacacttcatatcctccatcatatcctccgtcatatcctcctcctggaggatactga

SEQ ID NO: 89567 - DNA, 394 bp, Zea mays
  Clone ID: MRT4577_181688C.1
ccccccccccggcggccccgggggggggggggtccccgcccccggggggccccttcttgggggcccccccccggccccccgctgggggaaaacaggggcctagctggtccccgggggaaaagggtttccccgtcacaattccccccaaaaaccggccccgaagcataaagggaaaaccccggggggccccaggggggggccccccccccttaatgggggggccccccccgccccctttccaaaggggaaacccggcgcccccgcttcattaaaaaaaccccccacccccggggggggggggtttgggatttgggggcttttccgcttcctcgcccacaaacccgggggccccgggccatcggcgggggggggggggtccccccccctccggggg

SEQ ID NO: 89568 - DNA, 6924 bp, Zea mays
  Clone ID: MRT4577_181689C.1
atgtctaagcaaagggaccatgtggatcctcttctcgaggaaacccccgtcacatcttcaggtgcggaaatagaccccaaggtgctcgaccttgccatgaagctcgccgaaaaaaagttcctcaagctgaaagaggaagatggtaggaaaagggcataagaagaagaaacaagaaaaaaggactaagagggaagacggaagggtcctcttagatgtaatgttcagctgctggagcttcccgtgccctcggcgtcaagcagtctgagtgtagcaccagaagggccaagggggaaaaaggagggctctccccaaacaaaggggaatttggtataagttgcagatgatcttggaaaatgcccttgaggagcagagcaaacgtcaaccaggggttggggaggatgctatcgctctcggcttggtacggctatgtcgcacacaagtattattactgcatctccctaggggattagaaatataatttgggacaagtcagcccaacgaaaatagatgatgccataattaataaaaaattataaggtcaaggccaccgaggtgtgtcttatcaaaggaggtctttgtttggaagaccacaggtaacttcatggaagagaagttgctcatgacaattggatcattctcagaatgacacaagaaggagagctcaaagctaaaagacatttagttgtacctttggaaagtgagcttgcacgttatgattggactaagtgtgagtcacttggatcacattttggacggtttatgatgttggtcaacaaaataagagtgcttggtagagaagattcgagtgacttcaaggtcacaaggctgttcatgagagcttataaagaaaaggataatagtcttgcaaggatgataagggaccctgatgcatatgaggacatgactcgtcgtcgactatttgcaaatattcaacaacatgagtctgaggaagcccccatcaagacaagagactctcatgccttaatctcaaatgaacaagataatcccaagaagagcaaagatcacaaagcaaagaaagtggtcgacacgtcaagtgattaagatagttcaagtgatgaagacacatctatgttcatcaaaaccttcaagaaatttgtaaggaagaattgcaaattagaaatgaaaggaaattaaaattgttgcgattcatgtgtctaaacaggtcattgcagagcggatcggccaaacaagagggagcaggaagccaagaaggaataattgaaagaagggtttaaaaagggaggcaagtccaagggttacatgaataagaaaaacaatggacaagctcatattggtgaagaatggaacaccgatgatgagagttctagctccgaggaagaggaagtggtggcaaatgtggccatccaatctacctcaagcgcgcaactcttcaccaaccttcaagacgactcctacattccaacttgcctcatggcaaagggagataaggtaactttgtttagcaatgatttttcaaatgatgatgatgatgatcaagttgccatgaaaaataaaatgattaaagaatttggcttaaatggatacaatgttatcacaaaattaatggaaaagctagataaaagaaaggcaactcttgatgctcaagaagacttgcttatccttgaaaaggaaagaaacctagagcttcaagagttgattcacaataaagatatagaagtaattaacttgaaaacctctattgataaccttgcaaatgaaaagaatgcacttgaatcaagcatgttaagcttgaatgttcaaaatcaagaacttcaagtgcaacttgaaagttgcaagaacatcaatgcccccactttagtttttgaatctaagtctggctctaatgataattcttgcaagcattgtgccaaatatcatgcttcttgttgtctaactaaccatgcaaggaagcaaagcccacaggtgaaggtcaaagaaattttgaaaagatgctctagcaatgatgggttaaagaaagttgaacccaagtacaagtcccttaagcccaacaagggtagaagggggcttgggttcaactcatccaaggaaaaccctagcacagtctactcctctggtgggtcaagttgggtgcttgacagtggatgtacaaatcacatgaccggggagaaagacatgtttcatacattgcaactaactcaagaagcacaagaaattgtgtttggagatagtggcaagagtaaggtgattggtattggtaaaattcctatctctgaccaacaatcactttcaaatgttttattagtagattccttgagctataatttgttgtccgtttcacaactttgtggaatgggttataattgcttattttcggatgtggatgtgaaaatccttagaagggaggactcctcagttgcctttacaggtcgcttgaagggtaagctttatcttgttgatttcacaacaagtaaagtgacgcctgagacttgtttagtggcaaaatccgacaagggttggctatggcatcgccggctagcccatgtcggtatgaggaatttggccaaacttcaaaaggataatcacatcattggactaacaaatgttgtatttgagaaagatagggtttgtggcgcatgccaagcaggaaagcaacatggagtcccacatcaatcaaagaatgtggtcacaacaaagaggccattggagcttcttcacatggacctcttcggacctgtggcctacattagcattggtggtagtaagtatggtttagttattgttgatgatttttctcgattcacttgggttttctttttgagtgacaaaggtgaaactcaagaaatcttaaagaaattcatgaggagagctcaaaatgaatttgagctcaaaatcaagaaagtgagaagcgataatgggacggaattcaagaacacaggtgtcgaagaattcttaggagaagagggaatcaagcatgagttctcggtgccttacactccacaacaaaatggtgttgtggaaagaaagaaccggactctaattgaagctgcaagaaccatgttggatgaatacaagacacctgacaacttctgggcagaggcggtcaacaccgcctgtcatgcaatcaaccgcctctatcttcataagatctacaaaaagactgcctatgagcttctcactggtaacaaacctaaagttgattattttatagtattcggttgcaaatgttttattcttaacaagaaagtcaggagctcaaagtttgctcctagagtggacgagggtttcttgcttggttatgcatcaaatgcgcatggatatcgtgttttcaacaattccaccggtcttgttgaaatagcgatagacgtgacatttgatgagtctaatggctcgcaagggcatgtttctaatgacactgcaggaaatgaaaaactaccttgtgaggccataaagaaacttgccataggtgaggtgagacctcaagaaagggatgatgaagaaggaaccttgtggatgaccaatgaggtagttgatgtgggtgcaagggtggtgagtgacaatgtctccacccaagcaaacccatcaacctcaagtcatccaaatcacgaagaaaatcatcaaaggatgccaacagtggtagaagatgaacaagaaaatattgatggtgaagtgcctcttgatcaagtaactgatgacgaagagccaatacaaagacatccatcagcgcctcatccaagagtccatcattcaattcaaagggatcatccggtggacaacatcctgggtagcatcaggagaggggtaacgactcgatctcgtttagctaatttttgtgaattttactcgtttgtttcctctcttgagccacttaaggttgaagaagcattgggtgatccggattggataactgcgatgcaagaggagttgaacaacttcactaggaatgaagtctggtccttagtccaaagacccaaacagaatgtgattgggactaaatgggtctttaggaacaagcaagatgaaaatggcgttgttacaagaaacaaggcaaggttggttgcccaaggctatactcaagtggaaggacttgactttggtgaaacatatgcgccggtagcaaggttaggatcaattagaatattaattgcctatgctactaaccatgatttcaagctatatcaaatggatgtcaagagcgcttttctaaatggaccactacaagaaagagtatatgtggagcaaccaccgggcttcgaagacccaaagaagccaaatcatgtttatcttcttcacaaggcactctacgggcttaaacaagcccctagagcttggtatgattgtcttaaagattttctaattaaaaatgggtttactataggaaaagctgactctactttgtttactcgaaaagttgataatgaattatttgtgtgccaaatatatgttgatgacattatatttggtagtactaatgaaaaattttgtgaagagtttagcaaagtaatgacgaacaggtttgagatgtctatgatgggcgagcttaagtacttcctgggatttcaagtcaaacaactcaaggaaggtacctttctatgccaaactaaatatactcaagatatgctcaagaagtttggcatggaaaaagcaaagcacgccaagactccaatgtcatcaaatggacatctcgacctaaatgaggaaggtaaacctgtagatcaaaaattatatagatcaatgataggatcactgctttacttatgtgcatctaggcctgatattatgttgagtgtttgtatgtgtgcacgttttcaagcaaatcctaaagactgccatcttgtagccgttaagagaattctaagatacttagtccacacccaaaacctaggattatggtatcctaaaggctcctttttcgatttgcttggctattctgactcagattatgccggttgcaaagtagatcgaaaaagcactactgggacttgccaattccttgggcggtccttagtgtcatggagttccaagaaacaaaattgtgttgcactctccactgcagaagctgaatacatagcagctggggcatgttgtgcacagttgctatggatgaagcaaacccttagagattttggttgtgagtttaacaaaattcctcttttgtgtgacaatgagagtgccataaaacttgcaaacaatccagtgcaacactctagaactaaacatattgacattagacaccatttcttgagagaccatgaagccaaaggagatatcgaactttttcatgtgagcaccgaaaatcaactagccgatatcttcacaaaaccccttgatgagactaggttctatctcttatttcttagaatggtgcgacgaaggaacccagcagtggtagaatccgactcttcagatgaacaggagatccatggtgatacccctcctcgctctcgatccaagcgagggcgcgaatgtggaaatgtcatgccgggtactgaggcctccgggtctcaaagtgctcggggtcggacttcccggactccctccagtaggtctcgacctgccacgaatccgcaggcgtgggagcctgcaagtgacgatgacggtgggaaggacgatgaagttgatcttcctccggcgtcggctcctgtgattcgtggcttggtgctccaccgggccgaagctcggcgtgctggcaatgagccagtcacggacttcacggccagtggaggatctgcacttctccaggatctgcgtttccaaaatccggtattgcgtattcgcgatgccaggatcgatggaaatcgtttctggactcttcaccatgttgatttctataattcagttattctacccaagaagcatcagcccatccttcatcaacgttacattaactgggagggttgcgaagcaattggagacccagagatgtcacaggcactgagggcctgtgaaaggaagcaaatgaagaacatcatgacattccaatatgattggaatgatgaagtgattgcacaattttattccactctctggataaagctggctgatgaggagagccattacaactacccctacctgaacttcttcattgaaggtagttggtacaaggtgagctatcgtagatttgctcacattcttggtttttctgacgaggatatatctggagacaggattaagattcatgattaccgtcagcccacaagagatgaagccaaggaccttcatttgtctgagtctggaaagtattgggagtcaaccaatattcacaaatttgagaaaggcacccgacatcagtcatacactcccttctggattgatcccaacaatccagctgggcgtctcaggaaagctccctccagctctcgtggtcatacatctgctggtccgtctgccggtgctggtgctgctgctactgctgctgctggtgcctcgcgcccttcccttggccgcggatctcccacaccacgtggtcgtggtcgtggtcgaggtcgtggacgtgggatgggtgcccgcctggcccacggatttgcgtccttcttctctatgtgctgtaatattgctgcagatgtccatgaggtggctcgacgtcagcgggagaccgacgacaaccttcgtcgtcaagcttctgctttgggtactcccttcgcccctcgctctcctgatgtacctcttcaccctcctcctctagatgtgaatgagtggtaccagcaggcgtatggggtacctttctcttcagccgatgtcgtcgaagaagagacctattttgatgagccggagcagtttgaccctcccccatatcgcggggatccgggtcaatcgtcctcttaccctccgccccaggacccgtctggcagtgctcctcctccggcccagtctggagaggaacattttgcctacgacctggcgcaacacctctttgctcctcatcaacctcctccccactggtga

SEQ ID NO: 89569 - DNA, 286 bp, Zea mays
  unsure (1)..(286): unsure at all n locations
  Clone ID: MRT4577_18168C.1
cccgcacacgngcagcagnaggaacccagcnccaaccgaagcnggcccagcgagcgncgnccagacgcggcagcgncaagcgggccagngcgcacagccagcagcgggctgaacnangcagngaacgcgcnccnanccagcaacggggggggggcncnccngggcgcgccgaccccggacaacacagngccaggcagcagacaagagcgcggggggnacagnnggacagaccccaaancccncgagggggacccggcnacagnggaacccnaccganggccggaga

SEQ ID NO: 89570 - DNA, 4815 bp, Zea mays
  Clone ID: MRT4577_181690C.1
atgtctactcaaagggaccatgtggatcctctcctcgaggaaatccccatcacatcttccggcgaggaaatagaccccaaggtcctcgacctcgccatgaagattgccgagaagatgttcctcaaaatgaaagaggaagatgctaagaaaagggaagaagaagaagaatcaaggagaaaggtcgaagaagataaaggaaagggaaaaattgaatacaatgacgacctagtggaacttttggtgtcaagggtgatgagcaaggtaagtctcaacaccgaaggatcatctaccaaaagtaaaggtaacgaattcaataaagttcaatttgattactctagaaattttatccccaacttctcttccgccccacttggaaagttaccaactcttagtgagttaaactataacgagtgggccgataagatgaagtcgtatttaatcggtgtacatcctagtctttgggagattgtcaatataggtatgtataagcccgcccaaggagaagagatgactccgaaaatgatgcaagaagttcaccgcaatgctcaagcggtgagcataataaaaggaagtctttgtccggaagaataccggaaagtccaaggaagagaagatgcccgtgacatttggaacattcttaaaatgtcacatgaaggagaccccaaagctaagagacatagaattgaagctttggagagtgagcttgctagatatgattggactaagggtgagtcacttcaatcactctttgattggttaatggtgttggtaaacaaaataagagtgcttggaagtgaagattggagtgactccaagattcaacaacatgaatctgaagaagccccaatcaagacaagagactctcatgcctcgatctcaaatgaacaagacacccccaagaagaacaaaaaccacaaggcaaagaaagtggtcgaggcatcaagtgatgaagatagctcaagtgatgaagacacagctatgttcatcaaaacattcaagaagtttcggattgtcctaacaaaaaggaacaagaagcaaagaaggaatacaaaaaaggacaagttcaaaaagggacgcaagaacaagggatatttcaagaagaagaaatatggtcaagcccatattggtgaagaatggaactccgatgaagagagttctagctctgaagaagaggaagcagtggcaaacgttgccatccaatctacttcaagctcgcaactcttcaccaacctccaagatgactcctacactccaacttgcctcatggcaaaaggagataaggtaactttattttgtgatgatttctcaaatgatgatgatgaacaaattgccatgaaaaacaaaatgattaaagaatttggcttgaatggatataatgttatcactaaattaatggagaagctagataaaagaaaagcaactcttgatgctcaagaagacttgctcatccttgaaaaggagagaaacctagagcttcaagaattgctactcaataaagatgaaatgctagaagcattgactaaggaagtatctttagttaagttaactatagaggataaagaaaaagaagtgacaaatatgaaaacatctatacctaatcttgcaaatgaaaaggatgcacttgaatcaagcatgttaagcttgactgtccaaaatcaagaacttcaaaaagttgaacccaagtacaagtccttaaagcccaacaatggaaaaagggggcttgggttcaactcgtttaaggaaaactctagcatagtgcataaggggtggagatcccccaagttcatagagggaaccaccctatatgatgccttggggaggattcactcctcaaatgacaagtcaactcaagtaaaggtctactcctctggtgggtcaagttgggtgcttgacagtggatgtacaaatcacatgactggggagaaagacatgtttcattccttacaactaactcaagaagcacaagaaattgtgtttggagatagtggcaagagtaaggtgattggtattggtaaaattcctatctctgaccaacaatcactttcaaaagttttactagtagattctttaagctacaatttgatgtttgtttcacaactctgtggaatgggttataattgtctattttccgatgtggatgtgaagatccttagaagggaggattcctcagttgcctttacgagtcgcttgaagggcaagctttatcttgttgatttcacaacaagtaaggtgacgcctgagacatgtttagtggcaaagtctgacaagggttggctatggcatcaccggctagctcatgtcggtatgaggaatttagccaaacttcaaaaggatagtcacatcattggactaacaaatgttgtgtttgagaaagatagggtgtgtggcgcatgccaagtaggaaagcaacatggagtcccacatcaatcaaagaatgtggtcacaacaaagaggccatttgagcttgttcacatggacctcttcggacctgtggcttacatcagtattggtggtagtaagtatggcttagttattgttgatgatttttctcgcttcacctgggttttctttttgagtgacaaaggtgaaacccaagagaccttgaagaaattcatgagaagagctcaaaatgagtttgagcttaaaatcaagaaagtgagaagtgacaatgggacagaattcaagaacacaggtgtcgaagaattcttaggcgaagaaggaatcaaacatgagttctcggttccctacactccacaacaaaatggtgttgtggaaaggaagaaccgaacactaattgaagtcgctagaaccatgttggatgagtacaagacccctgacaatttttgggcagaggcggtcaacatcgtctgtcatgcaatcaaccgtctttatcttcacaagatctacaagaagactgcctatgaacatctcacgggtaacaaacctaaagttgattactttagagtatttggttgtaaatgctttattcttaacaagaaagtcaagagctcaaagtttgctcctagagtggacaagggcttcttgcttggttatgcatcaaatgcacatggatatcgtgttttcaacaataccaccggtcttgttgaaatagcgatagacgtgacatttgatgagtctaatggctctcaagggcatgtttctaatgacattgcaggaaatgaagaaccaccttgtgaggccataaagaagcttgcaataggtgaagtgagacctcaagaaaagaatgatgaggaaggaaccttgtggatgatcaatgaggtttttgatgtgggcgcaaaggtggtgggtgataaatcctccacccaagcaaacccatcaacctcaagtcatccaagtcttgaagaaggtcatcaaccccaaaggatgccaaccatgccacttaaggttgaagaagcgctgggtgatccggattggataattgccatgcaagaggagttgaacaacttcacccggaatgaagtctggtccttggttcaaagacccaagcaaaatgtgattgggacaaaatgggtctttaggaacaaacaagatgaacatggcgttgttacaagaaacaaaacacggttggttgcccaaggctacactcaagtggagggacttgattttggtgaaacatatgcgccggtagcaaggttagagtcaattaaaatattaattgcctatgatactaaccatgatttcaagttataccaaatggacgtcaagagcgcatttttaaatggaccactacaagagagggtctatgtggagcaatcaccaggctttgaagatccaaggaagccaaaccacgtctatctacttcacaaagcgctctacgggcttaaacaagcccctagagcttggtatgattgtcttaaagattttttaattaagaatggatttacaataggaaaagctgactctacattattcactcgcaaagttgataatgagttatttgtgtgccaaatatatgtcgatgacattatatttggtagtactaatgaaaaattttgtgaagaatttagcaaagtaatgacgaacatgtttgagatgtctatgatgggcgagctcaaatacttcctgggatttcaagtcaaacaactcaagaaaggtacctttctatgcaaaaccaaatatacacaagacatgctcaagaagtttggcatggaaaaggcaaagcacgccaagactccaatgtcatcaaatggatatcttgacctaaatgaggaagctaatcctaaagattgtcatcttgttgccgttaagagaatcctaagatacttagtccacacccaaaacataggattatggtatcctaaaggctcccttttcgatttacttggctactctgactcaaactatgccggttgcaaagtagatcaaaaaagcactattgggacttgccaattccttgggcggtccttagtgtcatggagttccaagaaacaaaattgtgttgcactttccactgcagaagctgagtacatagcagctggtgcatgttgtgcacagttgttatggatgaagcaaacccttagagactttggttgtgagtttaataagattccactactgtgtgacaatgagagtgccataaaacttgcaaacaatcctgtgcaacactctagaaccaaacacattgatattagacatcatttcttgagagaccatgaagccaaaggagatatcgaattatttcatgtgagcactgaaaatcaactagccgatatcttcacaaaaccccttgatgagactaggttttgttttctaaggagtgaactaaacatcttggattctcgaaacgtgtcttaa

SEQ ID NO: 89571 - DNA, 267 bp, Zea mays
  unsure (1)..(267): unsure at all n locations
  Clone ID: MRT4577_181691C.1
aattcggccgaggatggcgccaagagtcttggccggaagtggtcgggctcagcctggaagaagccagagggtgatcctgtgcgacgcgcctcctgccggcctctgcctctctgctcgcgcgggccgcgggctgcccctgctgcccgnggccggggccggcgtcgcctccggcggggggcgcgtcggcctcgccgtgccctcccccgtccttctcgccgtggcctgtcctcgccctcgggcgggggccgcgggggcgcgctctggctg

SEQ ID NO: 89572 - DNA, 426 bp, Zea mays
  Clone ID: MRT4577_181692C.1
gggcggaatatggcaaccaaggagtcggtgtcgtgtctcagcaactatacaagtcacttacaagcctccagatgggcaatgttgaggactggatgggttggaccgtgcaactgaatcagtagcaggttctccacagatattgccttggcagatccccagatcattacagctaatgggtgcgatagtttgtttacctgtcagttgagttgggttcctgaggtagactacagacctcacgcatatgtactgtatcagtatctgtttcccttgcgaccacagcatatagtagagcagtaagatgaatgtgctgctgcttactagccctctgagctcctgaccataagaacactgaacagtcttgttgttattttgctgatctgttgtttcaaagcaatgaaataaaatctgtggtttgcaccttgccaa

SEQ ID NO: 89573 - DNA, 426 bp, Zea mays
  Clone ID: MRT4577_181693C.1
gcacgagtctctctctctctctctctctctctctctctctctctctctctctctctctctctctctctctctctctctcctcgtgccgaattcggcacgagcagcgacagcccgggtgaagccgaagggggggggaggtgtgcggtcgtagcgacggcctcggcttgcaactgcaaaggcgcagaaagcaaggcgcaagcgggcacagaccggccaagaccggacagtacggaaccgcgccaagggactcacgtggcatggtgccggcgcggcggacgaaagggccacggccgcagctgcagcagcaccaacaggcgctgcggcaggaggaggggctctaggaaggagtagcacagtactcaagcgcagcagcgcatggaaagctgtctcgtgccagggcacacgtagctggcgcacggaaatgcc

SEQ ID NO: 89574 - DNA, 317 bp, Zea mays
  Clone ID: MRT4577_181694C.1
cggacgcgtgggtccggacgcgtgggcaggagaccaaggacctgctcaagagcatgggtttcgacagcatccccaccaacgttgtcgctgtttcccagcaacaggttgtcgagcgtccccgccgcttcaacgaccgccccggccgttcgtaaatacaaacacgaatacacgatccgacggtcccccttcctccctcttcgatttactgaaagtatggtgtctgggaaagggtttcttctgccacgactatggcatggttttacggctatatacggtggcatgatcaggagtcaatgaaacaaaaaggttatctcccc

SEQ ID NO: 89575 - DNA, 520 bp, Zea mays
  Clone ID: MRT4577_181695C.1
tctcgatcctctcaagtaactaaaccatctagacacgactgaccttcacgataacacgcctttcgaaactacgcgcgaccaaaaacatacacatccacaaacactacaccacctcaacaacatcacacaacatgcctctcgtagtccccggtctgcagtcaaaggacggaaactctggtgacgactggatgagcaagctcatgggcaagaagcttggtgaccagcatgatgagatgaccttcgcgaagaccgatcttccccaacaacaccgcgttctcaagcccgactcgatgcaaaccatggacttccagcccgagaggttgaacgtccatgttgatgaagacggtaccgtcaagaaggttactaagggttagggtccccctgtctggcatagctacgaagacgggacgggcataccagttggaatgcagaaatgaggaatgaaggcatgagcacacatagatcagggttcgggctctcacagaaaccataataggacatgttcaagtcatggaactat

SEQ ID NO: 89576 - DNA, 499 bp, Zea mays
  unsure (1)..(499): unsure at all n locations
  Clone ID: MRT4577_181696C.1
tggtcgcaggaagcatagcgnaggaaatggagttgcactatgaggatagacccgacttgtgaaacctatagtcccttgtgtgctgcttctgtgtgatgctccgttgtcgctctctgccatggcctgtgccatgcacatctactggtcacgcgcttgaactgagtgaatacgactcatacgattgtgatgaaaaaggtgcatacagactctgcacccatcaactgcgtggcaagcccctagctagatctccgacgatggatcacacaacatgataatataaaagctgatgagccatgtccgcctcgatatcatgtcttggcccaccgaattaatgtactgcgcctacaataactatcttcgtgcctgacgtctccgtaaattaccgagaaaaagacctacacaaaggactaggtgcgcaaccacattacaacgaaggcatgcctcaacatgcacgaattcaataaccggacgatcgagaacgtcgtcctcgatgacccca

SEQ ID NO: 89577 - DNA, 2126 bp, Zea mays
  Clone ID: MRT4577_181697C.1
cctcgaggccgtccgggatgaaggacacaaatgcaaaaaaaatcggcccgcactgcaattcggcacgaggcgtagcactgcgtctccgcagcacacactcgcacgcacgagaaggccggagaggcggcgcacccggagaggcaaaggcaagcgatccctctccctccctccctccctccctcgtatcgtatccaggacaacagcccgtgcaatccgatcccgatggcggcccggccggacgcgcgcagcggctactgcgccgcgacgcgcaccttccgtagcaagcgcgcggacgtcccgctccccgccgacgcggacctggacgtcgtcaggttcctcgcgtcccgccgccacgcgggcgtcgtcgcgctcgtcgacgctgccacgggccaccgggtcacgttccaggaactctggcgcgcggtggaaggggcggccaccgcgctcgccgcgccgccgctgtcgctccgcaagggccaggtcgcgctcatcctctccccgaactccgtccacttccccgttgccgccctcgcagccatgtccctcggcgccgtcctcaccaccgccaacccgctcaacacgcccgccgagatcgccaagcaggtcgacgacgcgcggcccgtcgtcgcctgcacggcccggttcgtcctcgacctctcgtctcgcgcatccgccggcgccggcatccgcgtcgtcctcctcgagcccgaccgcctcccctccgaccctagccccgtcgtcgccaccatcggggagatctccgccacgccgcccgaccccacgcgccgccgggaccgcgtcacgcaggacgacccggccacgctgctctactcctcgggcaccacggggcccagcaagggcgtcgtcgccacacaccggagcctcatctccatggtgcagatcatcatgtcgcgcttccgcctcgaggcctccgacaggaccgagaccttcctctgcacggtgcccatgttccacgtctacggcctcgtcgccttcgccacggggctgctcggctgcggcgccaccatcgtcgtgctctccaagtacgagctccccgagatgctgcgcgccatcaacgaatacggggtcacctacctcccactcgtgccgcccatcctcgtcgccatgctggcgcaccccaaccgcctgccgctcgggggcctgcgcaaggtgctctccggcggagcgccgctcagcaaggagctgatcgaggggtttaaggagaaatacccgcaggtggagatccttcaggggtacgggctgacggagagcacggctatcggcgcgtccacggactctgccgaggagagcagccggtacggcacggctgggctgctgtcgccaagcaccgaggctaagatcgtcgacccagagaccggcgaggcgctgccggtgaaccgcaccggcgagctctggatccgggggccatacgtcatgaaagggtatttcaagaacgcggaggcaacacaatcaacattgacacctgatggatggctcaagactggggatctctgctacatagatgaggatggttatctcttcgttgtggatcgtctgaaggagttgatcaaatacaaagggtaccaggtgcctccggcagagttggaagctcttttgctgacacatccagaaatcgaagatgtcgccgttataccgtttcccgaccgtgaggtcggccagttcccaatggcctacgtagtgaggaagaaagggagcaatttgtcagagcgcgaggtgatggagttcgttgcgaaacaggtagcgccttacaagaaggttaggaaggtggcgtttgtggcggagattcccaagaacgcctccggcaagattctgaggaaggatctcatcaagctcgccacatccaaatccaaactatgaaaattgtttttcgtgtttacagtgctggaatacgcttgtcgtccacgagcggcgagccattctctacgctgccccggtagtttggttgtagaatgcttgtataactgaagatcccgtcggctatgtgcttgcttgtgtacagtgctctgttctcgtacaatacaatattgggagggaatactaggcgtctgtacgtaggcttggatggaaataatatccggtaatttcagtgttgtatcacttgaact

SEQ ID NO: 89578 - DNA, 1273 bp, Zea mays
  Clone ID: MRT4577_181698C.1
aggcatgcgatccctctccctccctccctcgtatccaggacaacagcccgtgcgatccgatcccgatggcggcccggccggacgcgcgcagcggctactgcgccgcgacgcgcaccttccgtagcaagcgcgcggacgtcccgctccccgccgacgcggacctggacgtcgtcaggttcctcgcgtcccgccgccacgcgggcgtcgtcgcgctcgtcgacgctgccacgggccaccgggtcacgttccaggaactctggcgcgcggtggaaggggcggccaccgcgctcgccgcgccgccgctgtcgctccgcaagggccagatcgcgcttatcctctccccgaactccgtccacttccccgttgccgccctcgcagccatgtccctcggcgccgtcctcaccaccgccaacccgctcaacacgcccgccgagaccgcaccggcgagctctggatccgggggccatacgtcatgaaagggtatttcaagaacgcggaggcgacacaatcaacattgacgcctgatggatggctcaagactggggatctctgctacatagatgaggatggttatctcttcgttgtggatcgtctgaaggagttgatcaaatacaaagggtaccaggtgcctccggcagagttggaagctcttttgctaacacatccagaaatcgagatgtcgccgttataccgtttcccgaccgtgaggtcggcagttacgtagtgaggaagaaagggagcaatttgtcagagcgcgaggtgatggagttcgttgcgaaacaggtacgtcttctcgcgactgaacggatcagatgatagcccaaacatcacgttcactgtgtgtgtacgcatgcgcgcatccacccggctgaaatttatgcagtttctctgacccgatgcggtgcatgtaatgtaacattcgcaggtagcgccttacaagaaggttaggaaggtggcgtttgtggcggagattcccaagaacgcctccggcaagattctgaggaaggatctcatcaagctcgccacatccaaatccaaactatgaaaattgtttttcgtgtttacagtgctggaatacgcttgtcgtccacgagcggcgagccattctctacgctgccccggtagtttggttgtagaatgcttgtataactgaagatcccgtcggctatgtgcttgcttgtgtacagtgctctgttctcgtacaatacaatattgggagggaatactaggcgtctgtacgtaggcttggatggaaataatatccggtaattct

SEQ ID NO: 89579 - DNA, 2198 bp, Zea mays
  Clone ID: MRT4577_181699C.1
attgagtttcatggttccttactgaaggttagtcctgtaagcatttacagccactcagggctaccatttcctgcagtaagagctaaagtttcttggccacgtaaggcaagcaggggagttgcacttgtaacatgtgctagtggtgaagctgaatttattgtgaaggactgctttgcccttggagttggtggaaggtatgtcaactgtgaggttagtaataagtgggcaaactgtgtctttgtcacagggattccattgcatgtaacagagccagaattgtatgatgcttttcatagtacaacaactaggagaatccttgacatccacttgcttagaggacagcccacagctagctcgtccgtttctgaatgtacagaagcactgatgagagcgatatcactattcatgccaaataggaactttccttgccaaaaattccgtgttcaagtgttccctccagaagagaaagactcaatgatgaaagctaccataacctttgatggaagttttcacagagaggctgcaagagcactggaccatcttcaaggaagtgttcttccttgttgcctaccttggcagataatccagtgcgaacatgtatttcatagtactgtctcctgtccgatgcgcatttacaatgttatcagccaagatgttggtgctctacttgagagcttccgtagccaaaaaggcgtggcatacaatttggagaagaatgagaatggaaatttccgtgttaagcttactgcaaatgccacaaaaacaatagcagatttgagaaggcctcttgagcttctgatgaagggaaaaataataaaccatcctgatctgatgttaagcacagttcaattgctatggtcccgtgatggtatggaacaattgagatcagttgaacgggagaccggcacttatattctgtatgacaggcaaagtctgaatattaaaatttttgggagcactgataatgtggctgcagcggaggaaaaattggttcacgcacttgtacagctccatgagaagaagcctcttgaggtttgtcttcgtggccggaacctcccaccaaacttgatgaaggaagtgattgtaaagtttggggctgatttagaaggactgaagaacgaggtccctgcagtagatcttcagttaaatacacgaaggcagacactttatgttcgaggcagcaaggaggataagcaaagggtggaagggatgatctctgaactgataacctctagtgaccatagtgctcaactgtcgtcagagaatgcatgtcctatttgcctgtgcgagctagaagatccctttaagcttgaatcatgtggccatatgttctgtttagcttgcttggtggatcagtgtgaatctgccatgaaatcacaggatggcttccctcttcgttgcctcgaaagtgggtgcaataagctgttcctcctagctgatctgaggtctctgctgcctgacaagctggacgagctgttcagggcttccttgaatgcatttgttgcatctagcgcagggttataccgtttctgccccacaccggactgcacatccatttaccaagtagctgctgcaggcgcacaaggcgacagaccctttgtctgtggggcttgctctgtggagacctgcaccaagtgccatatcgagtaccatcctttcatctcctgtgaggcatacaaagagtacaaggcagacccggacgcaactctgcttgaatggcgcaaagggaaggagaacgtgaagaactgcccttcatgtggatttacaattgagaagagtgaaggctgcaaccatgttgagtgcaggtgtggcagccacatttgttggaattgcctggagaacttcaagagcagtgaggagtgctatggccatctcagatccgtgcacttatcctatgcagatctgatgtaaatctgtacagattgtaatgaatcacgtggtctataatctggcaagctgaatttgccttccaacagtgattgtctgatcctaaccggttctcagcacaggtagagatgggaaccggttaggatcagacaatcactacctgtgctgagaatattgtaggcgctttatcatttgttactacagcggggaatgctctagtgtgcatcggggacggctcaaaaaaaaactcaacaaaaaaaaaaagggggcccccccagaggcgacctcaccgacccggaaatttttccggg

SEQ ID NO: 89580 - DNA, 169 bp, Zea mays
  Clone ID: MRT4577_18169C.1
ggcagccctccccataaacggctttcctggggctttattttggccgccgggaatttaatgaaaccgggttttgccctgctactgcgggcaaagcccgcacctaattggcttgattgcgccatgggcaaaatacatccagtttttacttgaccctcacctttggcggtac

SEQ ID NO: 89581 - DNA, 432 bp, Zea mays
  Clone ID: MRT4577_1816C.1
cggacgcgtgggcgaatggtgaaatggagttaccaatcaaccactggctgaatcagctcccggcctgcccgggcttatctccatcggtacaggctagtgactgccgccgctgggagcacctcgccaggaacgtgcgtacctccctccagtcctttcctcacgctcttcggtaactaagccaatccatgatcctatccacatcaagcgtggcaatcaatcatcaaatagtatttttctttggtcggttccatcaaccgtggcagtaatgttttgttcttgcaaattatagatataaattcagatcaagtatatgcatttgtggtctatatcacaaagggaaactaaacatttagagctgcacgatcccactgtgtgcattactgtgcgtgtagaacaaaaattgctagtaccacaacatatttgttttagtat

SEQ ID NO: 89582 - DNA, 891 bp, Zea mays
  Clone ID: MRT4577_181700C.1
gtactaattcggcacgaggccccaaacagagcaggactagcactggcagtctagctagcacacccgcactgcgtctccgcagcacacactcgcacgcacgagaaggccggagaggcggcgcacccggagaggcaaaggtaagcgatccctctccccccctccctccctccctcgtatcgtatccaggacaacagcccgtgcaatccgatcccgatggcggcccggccggacgcgcgcagcggctactgcgccgcgacgcgcattccgtagcaagcgcgcggacgtcccgctccccgccgacgcggacctggacgtcgtcaggttcctcgcgtcccgccgccacgcgggcgttgtcgcgctcgtcgacgctgccacgggccaccgggtcacgttccaggaactctggcgcgcggtggaaggggcggccaccgcgctcgccgcgccgccgctgtcgctccgcaagggccaggtcgcgctcatcctctccccgaactccgtccacttccccgtcgccgccctcgcagccatgtccctcggcgccgtcctcaccaccgccaacccgctcaacacgcccgctgagatcgccaagcagatcgccgacgcgcgccccgtcgtcgccttcaccacccgcgacctcctgcccctcccgcgcgccggcgccggcgccggcatccgcgtcgtcctcctcgagcccgaccgcctcccctccgatagcccgtcgtcgatcgggtgccactggccaccgggtcacgttacaggaactctgacgcgcgctggaaggtgcggccacacgtctcgccgacctacctctgtctctccagaagggccagctctctgctatgataattccgaaattcgtccaattacgcgtccgtgctctcgcacgcatgt

SEQ ID NO: 89583 - DNA, 756 bp, Zea mays
  Clone ID: MRT4577_181701C.1
ctggtcttccagggtatttcaggaacgtggaggcaacacaatcaacattgacacctgatggatggctcaagactggggatctctgctacatagatgaggatggttatctcttcgttgtggatcgtctgaaggagttgatcaaatacaaagggtaccaggtaaacgttgccgatgacattctgatatcttgccgtgaagtttcctatcttagaccgtgtccagcaggttacccatacggtcacccaaaacactgagtaaagtttgaaatataagatgggatagaagatatgatgtgtaagctactggagatagtctaaaagttatcgccttaacattaaaactctaaacgcttggttctgcccctagaatttgaagaacgaaaagattaaaaaatgcttcttctgtagtgtgaaccattatttttgggatttttaaatgtgtcccgtagtttagcaataatgcttaattttatccatccctagtagtaatggacaaggcgtaccaaagatggacaaaactgggtattgttactggactagggacacaaatttagaagtccctttttttttagaatagtagtcactgaaccattaagtgctgtttggcatctggaatgtaacttgtatatgtacaggtgcctccggcagagttggaagctcttttgctgacacatccagaaatcgaagatgtcgccgttataccgtaagtgtcagtaaagctccttatggccggcatcttagctgtgccaggtccgta

SEQ ID NO: 89584 - DNA, 471 bp, Zea mays
  unsure (1)..(471): unsure at all n locations
  Clone ID: MRT4577_181702C.1
gggggggggngggggaaaacaaaacaaaagagagggggagggagcacaaggaggcaagaaaaacgccccaaaacaacaaaaaaaacggaaaggggccggcccncccccgcggcccccccgcccaaaaaaaaaaaagggcccccaaatttcccttggttcgccggcccccctgtgttttttctcccnncncaangnncaaccaaaggcacaccnngttttttcagggagaccccccccttttggcaggcttaaagcccccggcggggttcctcttttcctgaccacaaaaaaaaaacactgtttactgcactctaaacgggcagcaaccaaccaaaggtttgattggccgcttaaagggggcgggggtaagccacctgaaggcagaatagacccatcaaccgcacagaggattcaccatgatgggggcatgaaccaggcactaaaacatgttggaaaggccaaagggaacaa

SEQ ID NO: 89585 - DNA, 1253 bp, Zea mays
  Clone ID: MRT4577_181703C.1
cattgggtacctcgaggccggccgggaccgggagcacccgcactccggtccgcagcacacactcgcacgcacgagaaggccggagaggcggcgcacccggagaggcaaaggcaagcgatccctctccctccctccctcgtatccaggacaacagcccgtgcgatccgatcccgatggcggcccggccggacgcgcgcagcggctactgcgccgcgacgcgcaccttccgtagcaagcgcgcggacgtcccgctccccgccgacgcggacctggacgtcgtcaggttcctcgcgtcccgccgccacgcgggcgtcgtcgcgctcgtcgacgctgccacgggccaccgggtcacgttccaggaactctggcgcgcggtggaaggggcggccaccgcgctcgccgcgccgccgctgtcgctccgcaagggccaggtcgcgctcatcctctccccgaactccgtccacttccccgtcgccgccctcgcagccatgtccctcggcgccgtcctcaccaccgccaacccgctcaacacgcccgccgagatcgccaagcaggtcgccgacgcgcgccccgtcgtcgccttcaccacccgcgacctcctccccaagctcccgcgcgccggcgccggcgccggcatccgcgtcgtcctcctcgagcccgaccgcctcccctccgaccctagccccgtcgtcgccaccatcggggagatctccgccacgccgcccgaccccacgcgccgccgggaccgcgtcacgcaggacgacccggccacgctgctctactcctcgggcaccacggggcccagcaagggcgtcgtcgccacgcaccggagcctcatctccatggtgcagatcatcatgtcgcgcttccgcctcgaggcctccgacaggaccgagaccttcctctgcacggtgcccatgttccacgtctacggcctcgtcgccttcgccacggggctgctcggctgcggcgccaccatcgtcgtgctctccaagtacgagctccccgagatgctgcgcgccatcaacgaatacggggtcacctacctcccactcgtgccgcccatcctcgtcgccatgctggcgcaccccaaccggctgccgctcggggggctgcgcaaggtgctctccggcggagcgccgctcagcaaggagctgatcgaggggtttaaggagaaatacccgcaggtggagatccttcaggggtacgggctgacggagagcacggctatcggcgcgtccactgactctgcc

SEQ ID NO: 89586 - DNA, 411 bp, Zea mays
  Clone ID: MRT4577_181704C.1
tttttttttttttttttttttttttttttttttttttttttttttttttttttttttttttttttttttttttttttttttaacccacaaaaacatcagattttacagggggtaaaaatttaagggcccccgtttaaaaggggttgggttttgctccattccattgggaaaaaaaactggcacccctgggcttgaattgcacccacccaacggggccaacatttggaggatttttccaacaacagaaaaaaaagactccggtgttctaaaaccaacaaaaacccacccggtttttttccacctgggaatttcaaccccggggttttttaattaattttcaaactgccttggaaatgccgggatgttttactgcagggtcccgcttttgaaaggatcccccaggttatttac

SEQ ID NO: 89587 - DNA, 223 bp, Zea mays
  Clone ID: MRT4577_181705C.1
gacgcgcgtacagaaaatccaacgccgcgtagccctgcacgccgcaatcctctagccctgcctgccccagctcaagccgtagtcgtgccgctgtacttcgagtccagcaccaccaagatcactgctgccgttctctgcgaacttcgcacaactgtcgtctcactcgcccgcaccatgaccttatcgcgtgctggtcatcacatgccgaagctctgttggccga

SEQ ID NO: 89588 - DNA, 611 bp, Zea mays
  Clone ID: MRT4577_181706C.1
actcctatgggcgattgggaccctcgaggccggccggacagtgaggaagaatcacggtgccgaggacaccgcggcggaaaggattgacgcgatggccgccggtgaattactccggccgagcacaggagatggcgccacgtacgattcacccttttcccggcgttatccttctataccatgcacgaatccggacggtgatcatcgacggcgagcttagctagcggtctgatccatcggggcactgtaccatggcacatcttcgtcagtcgcctggaccgtcccccttccaccaactagctctcatgattcttgtgaataaccgggcaaaattccttaataaggtttgttcttgatttaacagtcttcaatccttatacaggacatttgggtcaaaaccgaggggattcgaagatatggcgcatcaaacttgacctcacctcactggaaccttgttttaaccttaggttcagttttagttttctgaaactgttctgacagagcaacttgtaacaggttttcctctaatttttgtgtcacaactcaagagaatatctgcatcaaagttgttctcctataataggttaacgaaaaaaaaaaaaaaaaaagcggcc

SEQ ID NO: 89589 - DNA, 224 bp, Zea mays
  Clone ID: MRT4577_181707C.1
tctctgccggcggaaaaacgctcagcccacggactgcgacctgccaaggggggaagaacgatttctctggctgagcatacccaatactaggtgcggtctgggtgtccgtggaatttgctttcacctgggtgggctacagtaacctcgggggaccgggagaccacatctactcatccgtggacagacgctaggacgcattggaacaccaagtgtgcatactacgg

SEQ ID NO: 89590 - DNA, 245 bp, Zea mays
  unsure (1)..(245): unsure at all n locations
  Clone ID: MRT4577_181708C.1
ctggatcgagggatgctacttctcacttgcgcacttgagggaccctggggagagatnncggctgggaagatggacgtatgaattctgggtaagaggaagtgagatctccgcttgcaggtcagcccagccttgcaggcgggctggctgactcaagcctgtgagatagagggccagccagccgcaccaagatccctgctctgttgtgatcgttgtgaacattggcgagactgtatttagtaatgctg

SEQ ID NO: 89591 - DNA, 345 bp, Zea mays
  Clone ID: MRT4577_181709C.1
cacgcgtcctctgactcgtgggcggactcgtgggttcgtccagccttctcggtcttctaccccggtggtcatcacatttctcacacttcgcggccacctctcatctcggggtactggtcacgctcctggttaaataatgttgtcttctgcagttgaatttgcctcgtcatctgctcacatcacttcgtcagtttctattcgagatgacgaggtagctgatggataggcgttcatagaagctcttacatacgttaattgtgtgtcgcactgttatggctatcatagatgtgtatagacgattgacaatgataagattgggcacttctcctgttacggccagtactt

SEQ ID NO: 89592 - DNA, 483 bp, Zea mays
  unsure (1)..(483): unsure at all n locations
  Clone ID: MRT4577_18170C.1
cctcgccctntagcagtggtaacaacgcagagtacttttttttttttttttttttttttttttttttaggttttttttttttttttttttttttttttttttttttttttttttttttttcccaccccgggtccggcccctttttgccgggaacccggggcctcatttccaggtttatggttggccggggaattctttggccccntttttggcccccgggttccgcttggcgccccctacccctccgcgggaaaagcctagctttgtttttggtggggccccccggtcccgcgctctccgcgccgggtcccctggtctggggcggttttctgccccctgcgggcccgcgcccgggggtccccccctccccccccgcctggcctccccctccgctcctctccccccccgcgtgctctgggtttccccccccccccccccccngcccccggccccgcgccgcccccgcgggggcccggggggccc

SEQ ID NO: 89593 - DNA, 346 bp, Zea mays
  unsure (1)..(346): unsure at all n locations
  Clone ID: MRT4577_181710C.1
ttnnnnttttttttttttttttttttgtggntgtggttttttttttccccgtaatcagcccatggcaatggcaaaaggagggccatacaaagttcacccgtttaaaaataccgggtccagccgggggacctttaaaaatttaccggtgttttttattcccccgggaaaaaacttcgggggaaataaaaaattcaaatttttccattgcttctggtaactgggaagggggggttaatttaaggtccaaagggccccaaatttattaagcaagggcggaactgcccccattagaacccaaaattttgatttttgcccacaagggttaaaaatattttccaaccttttt

SEQ ID NO: 89594 - DNA, 927 bp, Zea mays
  Clone ID: MRT4577_181711C.1
cctctactcccctctccatccatcgcactcacacactcacacccccgccgtctagccgtttcagctgcagagcctctcgagcggcgcccgcggcaggagctggctacccctcgaccaggtctgggagcggcgccgccgcgcccgcacgagacggcggagctggacgcggaggcggcgctgggcggggagtcggcggaggagcgcaaccgctttctggtgctgcggctgtacgaggcgctgaacgccctggaccaccgcggcttcgtcttctccccgcgctccgtcgacgccttcggctccaccgtcgtcgccgagggcgccgacgacgcgcgccagctctactgggtgcacgcctggaccgtggggccccatggggtgatcacgcagctcagggagtacttcaacaccgacctcacgctcctctccggccagcctgacgtcgttgcaggcgctgctccgcctaagcagaaggacgctgcctcctcctcctcctcctcgtcgccctcggcagcgtcaccctgcagctgcagggtccaagtgcctgtggcagagccgccgcgccgacagcgcgcacaagtcgctgccgggcctcgtcctcgccatctgagactagagacagcaagatccatctaccctccattataagtttataaccttattacaaaagatcctaaaattcgaaactgttattgcataaataatctggaactgcactagttgtatgtactcggagtcggagtcagtcagtgaagacgtaatgacgatgcgcgtatggactgaactgctcgatcctccgtgttgtgacttgtgaggttcaggtgtcgtgtgtgctgctactgtaatgatcgactgttattgtccgagtctgctggatcatggatgtgatgtgatggtatatcgtggtggttaaataaaagtttcatgata

SEQ ID NO: 89595 - DNA, 303 bp, Zea mays
  Clone ID: MRT4577_181712C.1
atccagagcagtaaacctcatcgaggcggccacgatggaggacagcaaagccccggtgtcggagcacggcggggagacctccaaggccgcggtgctcgtgggggtggccgccggcagcgggggacgcaggggcagggcggctacccgcgttctggccgtggtcgacctcatcctccgctccgtcgcggtggtcgccaccgtcggcagcgccatcgccatgggcaccaccaaccagacgctgcccttcttcacgcattcctccggttcaaggcgcagtacagcgatctcccgacccttacgtac

SEQ ID NO: 89596 - DNA, 1119 bp, Zea mays
  Clone ID: MRT4577_181713C.1
aggatcaggcctccccgcgtcctctgctcctctcctcccctctccatccatcgcactcacacggtcacactcacacccccgccgtctagccgtttcagctgcagagcctctcgagcggcgcccgcggcaggagctggctacccctcgaccaggtctgggagcggcgccgccgcgcccgcacgagacggcggagctggacgcggaggcggcgctgggcggggagtcggcggaggagcgcaaccgcttcctggtgctgcggctgtacgaggcgctcaacgcccgcgacgcgcgccgggcgcaggagctgctggcgccggacctcgagtggtggttccatggccctcccgcgcgccagcacatgatgcgcctgctcaccggcgctctggaccaccgcggcttcgtcttctccccgcgctccgtcgacgccttcggctccaccgtcgtcgccgagggcgccgacgacgcgcgccagctctactgggtgcacgcctggaccgtggggccccatggggtgatcacgcagctcagggagtacttcaacaccgacctcacgctcctctccggccagcctgacgtcgttgcaggcgctgctccgcctaagcagaaggacgctgcctcctcatcctcgtcgccctcggcggcggcaccagcagcagggcccaagtgcctgtggcagagccgccgcgccgacagcgcgcacaaatcgctgccgggcctcgtcctcgccatctgactgagactgagactagctagagacagcaagctcgatctgccgccctccattatattatattataaccgtataaaaatcctaaaattccaaaccctctactacttgcataaataatctggaactgcactcaagtcagtgaaaacgtgaagacggacgtatgcctatgcactgaagtactgaactgaactaatccgtgttgtgattcctgtaccagttaattactttagctcgtgccgtgccgtgtgtgtgtgggaatagtagtttgttaagccatgggttatgctgtgcgccgccattgctgctactgtaatgctctgctgttatggtctggtgctatattgcggttgaataaaagttgcatgagttggagggataagcaattaatt

SEQ ID NO: 89597 - DNA, 536 bp, Zea mays
  Clone ID: MRT4577_181714C.1
gccggccggttcgggatacactgctggacgagttcgggaccgatggcacaggcgcaccaccatctctcttcctctgctccttctccagctacggatgttgctcatcgctctctctcctgccgcccccgatgccagaatccacaatcgcagggggctatgtcatgaacctgccaaacgtgtcctgcaacggaagttgaggacttgcagagggagcttcccttctcgtgaaacgcacatcctgattggcgagggtatcgttcctgtgcgaggacagaccatcagggaggcctacctgatgatgcactatgctggacgcgtctgcttgtcggacattcatattgcccgacagagtagcgccattccagcctgcagaggtctctttcaacacgctccgcttctatccggacatcaatagcgacgtcatcctctggcttgtagattcttaaggagcggcggatccctgctatgacgaatcttaccgagatgctctctatctgctccctgcttactgatcccgaccccgacgaccctcttga

SEQ ID NO: 89598 - DNA, 1125 bp, Zea mays
  Clone ID: MRT4577_181715C.1
cctgtgcggccctcgaggccggccggagacacagcagccgtttccactgacagtttctcagaaccacagcctcgatccatcgggggagaggatgggagagcctacgcggcaggagctggcggaggcggcgctcgccggggagtcggcggagcagcgcaaccgcttcctggtgctgcggctgtacgaggcgctcggctcccgcgacgcgcgccgggcgcggaagctgctggcgcccgacctcgagtggtggttccacgggccccccacgcgccagcacatgatgcgcctcctcaccggcgcggaccaccagcgccacatgagcggcggcgggttcgccttctccccgcgctccgtcgacgccttcgggtccaccgtcgtcgcggagggcggcgctgacgacgcgcgccagctctactgggtgcacgcctggaccgtggggcccgacggggtcattacacagctcagggagtacttcaacaccgacctcactgtcaccctcctcgccggcgctgcctccgccaagaaagctgctccgcctaagcagcagcaggacgctgcctcttcttctacctcctcctcctcacccccctcggctgcgtcgtcgtctgcagctgcagggtccaggtgcctgtggcagagccgccgcgccgacagcgcgcacaagtcgctgccgggcctcgtcctcgccatctgagactagagacagcaagatccatctaccctccattataagtttataaccttattacaaaagatcctagaattcgaaaactgttattgcataaataatctggaactgcactagttgtatgtactcggagtcggagccagtcagtgaagacgtaatgacgaggcgcgtatggactgaactgctcgatcctccgtgttgtgacttgtgaggttcaggtaccagttccttgcttagctcgtgtcgtgtgtgctgctactagctgtaaggatcgactgttattgtccgagtctgctggatcatggatgtgatgtgatggtatatcgtggtggttaaataaaagttgcatgataaagacgtgcgcctctgcggttgaataagctttgcatgatcatgaatatttattgattaaaaaaaaaaaaaaaaaaacctcgtgc

SEQ ID NO: 89599 - DNA, 236 bp, Zea mays
  Clone ID: MRT4577_181716C.1
gacagaaaaaacaggattcggaataccggttaggtgacagaaacacgggtggtgtcacatcgcctcaggcactgcagatatcaaaggcatctgattcatctacacagtggccgggttagggtcggagtctatatatacagggtgggagctctggacaacatttgttacagatcagattctacggctaacagaaggatgatatgcccttctttctgatcactatgacagttgactac

SEQ ID NO: 89600 - DNA, 844 bp, Zea mays
  Clone ID: MRT4577_181717C.1
actcctaagggcgattgggatcaacaagggcggccgggaccctccctcctctctcccacctctccttctctctccctcccctcactcgcttcctatccagagcagcccctgccagtggccgacccggccatcccgtgtcggccgagatgcgcgtagctccccacgcccgaagcagccaggccccgatgctcaagccggccgccctacaccgtgccatgcgcgcccgaccctgcgcacgccgcgccgcaacccgacgcgccaggccgaccgctgccaggcaaccgcgccgcgcagagccgccattccacgcccaggtgcccgacgcacagcacccgaagccgcctcgacctgagccacgcccaggcgcgccctgagcccgaccgaaggccgacgtcgcgcacaagcaaggaccgacccgcgcagagccgccccgaagcccgcgtccgttcgtcttcgtgttattggagctttactatgaccgtttctccttccccattactccctccctccatcaatggtgtctttaagccatggccaccgtttctcttctctccccagcgccctctccctataaaatccgccgagctcctctcttcttctccctccccgagctccctctctctcacgcgcttctcactctcttgcttaccacgtcgtcgtcggagtccgtgaagcctcgccagagttcgtgctcaccatccgtgttccccgctggagtttgtacctcgctgtccaacgacgaccgcgctcgttcccctgctcgccgaagacgtccccgaaccccgtccaaacctcgtcgttacctgcctgtcgaacaatccctctcgtcgatgttcatcactcc

SEQ ID NO: 89601 - DNA, 527 bp, Zea mays
  Clone ID: MRT4577_181718C.1
gatctccgcgcctcacaccgcaaccggaagtacagctgacatgccatagctcagcctgaccactagctacgctgagctacagtcaacagcaggtgcgctgactgacatggccgcaaggacatcgaggtatcgaggagacccgaggcgggagagctctcgggctaggactactgcgagcctacacgtcggcgccgctgatcgacgcgcaggagctcacccagtggacactgtaccgcgcggtcatcgccgagtgcatcgccacgctgttcttcctctacatcaccgtggccaccgtgatcgggtacaagcaccagacgtacgcgttagcgtcgggacccgacgctccgtgcgaagccgtcatacttctcgcatgagctggcacctccagtgaagagtgactcatcctcctgtactgtacagcatgcatatatggatatcacactgacccaaacagagacggcgaacacgtgctcatctccaaaacaaggccaaggcattttgggtccctatgctgcagatcaagagct

SEQ ID NO: 89602 - DNA, 1303 bp, Zea mays
  Clone ID: MRT4577_181719C.1
cccaacaaaccttgagttgagagaggagagaggagacagcaagcgacacaacaccccgggctgagttgagagaggagagaggagacagcaggcgacacaacacagaggtaaccggctcacgcctgtctcggtggccgtgggcaatcatggccactgtgggacagtctggggccctgaggagggtcaccgtgcactacgccaactcgcccacaggcagcacggtggcagaggtgagctttgacgaccttgacgacgagctgctcctgtttgtgctcgccgatcttcttcctggccaggaaggtttacaccagtcgatcttggaaggaacatacaacaaccaggagaaccacatgagaggtgcagcacccagtgcaccatatggttattcacggccagaggagtaccgtgcagagagcagcactgctgcagcagcagcaactggttctaggaattcaggcatggatgaagctcagatcgcctcggacttcgagtacgccaagcagctgcagcaggagatggaggacctcagcgtcgacgaagacgacaacgatatcagctgcgtgccgtctccatctgactctgacgatgagcacgagcatcatgacgaagaggaagaggctgaggaggacggtgatggtgggtggaatcatgatgatccagacaacatgacttatgagcaaggacaggcacttgtagaatctgtggggactgagtacagaggtctatccgatgagctcatctcctacctgcagccatggaagtacaaggcagtcaaggcttcagggctcttctcccggaaaacaaaccatgaagactgcccgatctgcctgtccactttcagaaaccgggaaaccatgataacgttgccgtgcaggcatcactaccacgcagcttgtgtcaccagatggctcaaggtcaacaagacatgccctgtatgcaaatacgaactgtttggaccttcctaggatccgaccacgtcgacgatggagctgagaagataatgatgatgacgacgacaacgacagatggttgtgtcatctgctctctttttttagcgccaagaaaactggaaatgaaaaagggaaatcaatccgaaaggagaatagaaattaggaagtataggtagaatatctctcttgccagtgactgtgcgatgaattaagcatacctcgtgctatttatgatgtattggattttttttatatataagaacttccccgtggaaggattatatttttttagttttatatttgggggtgttctaaaaaaaaaaaaaaaaaaaaaaaaaaaaaaaaaaaaaaaa

SEQ ID NO: 89603 - DNA, 401 bp, Zea mays
  Clone ID: MRT4577_18171C.1
aaaaaaaggccaaaaggctcctttttaaaagggcccacccccaggggaaattttaaacttttctggccaaaaaatccaaaaggccccttttgaaaggaccaaccggggattcctgggatttggtttttggggggcgttttacggggtcaagcccaaaagccggggttagccttttgcatttgggtaaaaatggttgaaataaaaggtttccccggaaaaaggttttagaattagaccgggctttaaatttaggccgggtccaaatttggggagacaaatcaccgggaaacctacaaaccccttttttttggaacccccgttttgttagggtgaaccccggaatggggctttggtgcccaaaacattttttccccaaaaggggcaccctgggttttttggaa

SEQ ID NO: 89604 - DNA, 466 bp, Zea mays
  Clone ID: MRT4577_181720C.1
gaatcactagaaccatagaagacggatcccgtatgcgtccgcccgcccgcccatgaggcggggacactgccgggggcgatagaagatatgtccgccgccgccgacgacgctgaacatgcgaccccttcatctagcaaggcccatgcacgggacacggcggagcacgcggttgcactccttttcctgctggaactcaacgattaccatggcgtggaccccggactacatggtgcacaaggctgtgggcgctctgccatggaatatgtccctcccgtaacaggtgcccaccatcccatgtctgattgccacaggaactccgacgactcgtaacgccgggcaatcccctggccgggctggggccgggccgaccccggcgcacaggctggtgagctcatgagcccgctggaccctagcttcgacactacagccgtgccaagcgcctgggtatggacactctcggggcgga

SEQ ID NO: 89605 - DNA, 364 bp, Zea mays
  Clone ID: MRT4577_181721C.1
gcgaccacgcgtccggcatgtcttccctgtgcatgctttctatcagcagcaccccacatgttccgcacggctgcattcgacgatttatcgaccccgactcatataggtccagatcctacctcgtttgccaaagtcacctcccgtccgggccgttgtcaagtgtttgtttcttcgtaggtaggattgttctatttcttaccttctttatattattgtcattttatttatttacaatcttaaattattatcatattatatttttatgatatcttttattcctatgttatattattatttattttttggtggggggtggtttttattttatttttttttatctctgttatatatatatttaatttat

SEQ ID NO: 89606 - DNA, 715 bp, Zea mays
  unsure (1)..(715): unsure at all n locations
  Clone ID: MRT4577_181722C.1
ctgattcgttgcccttttcctggtgatgcagcaagnacaggcacttgtagaatctgtggggactgagtacagaggtctatccgatgagctcatctcctacctgcagccatgngaagtacaagnggcagtcaagggcttcaggnggctcttctccccggaaaacaaaccatgaagagtaggtgtatgcctgcctcttttccttctccagtttgtactactacaagtttgctcttgtttaagaagaagagaggacagatcttcatagatggtcttttctggtttgtttggatgcagctgcccgatctgcctgtccactttcagaaaccgggaaaccatgataacgttgccgtgcaggcatcactaccacgcagcttgtgtcaccagatggctcaaggtcaacaagacatgccctgtatgcaaatacgaactgtttggaccttcctaggatccgaccacgtcgacgatggagctgagaggataatgatgatgacgacgacaacgacagatggttgtgtcatctgctctctttttttagcgccaagaaaactggaaatgaaaaagggaaatcaatccgaaaggagaatagaaattaggaagtataggtagaatatctctcttgccagtgactgtgcgatgaattaagcatacctcgtgctatttatgatgaaaaagggaaatgaaaaagggaaatcaatccgaaaggatttttttatat

SEQ ID NO: 89607 - DNA, 176 bp, Zea mays
  Clone ID: MRT4577_181723C.1
agagcgaaaccatatcatcgatggggatgtgcgtagcatgcaatgcaatacaatgtccctgaggagaagcaaatattacaggtaggcctctgcggcgctgaggttatcgacgatcttgatcttgacgttctgtggaagcgaggcggacagccctggcttggagtaaaactcagcca

SEQ ID NO: 89608 - DNA, 420 bp, Zea mays
  Clone ID: MRT4577_181724C.1
atggagttgccgagcggttcccacggcgtccggctcccagcgctgcgctcctctctcatcccgagctcctgcgcagccagcgcgctcgagtccctctcagccatggccgttcctctgtgcttgggttcaagcttctgcgcgccctcctccctcaaggcgacgctgcggctcctgctcgcacgcatccttgctcgccgaccgcgaccccgccctggtccctatggtgcgctcggcccctgctccagtctctgctcggcgtccaatgcttccctgcgccgtggcttccttcctccctcgctccagctctcggctctggcgctctcccctccctgctcgctctccggtgttgcgcagcgcggctcagccgacggcagggagagtctcttcgtcgctgtccctacttccctttcccagccgtga

SEQ ID NO: 89609 - DNA, 425 bp, Zea mays
  Clone ID: MRT4577_181725C.1
ggggggggggggggtttttaaaatttttttttttttttttttttttttttttttttttttttttttttttttttttatttttctttttttttttcagttcgtttaattctttttttttttttctcccccggtttctccccctctcttcggggggggggggggggtcaccccttatcaaccttaaacgttaattcccttccccccgaaacccgggctttgccgggccagcaacaagccgggcaacggggtccccgggggccccaacgggggaaaccccccgcgcgcgggacccccccaccccgacgcccttggcctcctcaaggcccgggagagtctcaaccgtttccacccattccgcccccccccccgacacccccggtgccctccccctgccgggcggttgcgcggagcccgctgcctccccc

SEQ ID NO: 89610 - DNA, 690 bp, Zea mays
  unsure (1)..(690): unsure at all n locations
  Clone ID: MRT4577_181726C.1
aaaactatgacaagcttttcttctttattcaacattttaacctctattttcccatttgtaactgagatatcttttggatatgacagtttattatggcatcgataattcattctcgggcttgtttccacatgttgcacaggtatgctcgaggaacacatttgataccaaattccctttacttttccataactgtatacctgaatttcattaccatggcaacgaaattacaaagttcacagttttagagttgtaacatgaagaaaaaaccacccgtgctacttcccatagtgatcaccaagggatcatgcgctataccataccaaattcctttcactgctctactaaatctgtgttttgactcatggtcaattttgcagtggttgcttgctgtgcataacactcagatactcttgagtgtatttttggctatattagcactgctccttggtggcttttgtgcttaccatgcacatctttgtttgacaaatacaacaaccaacgaggtgagacttagtgatcttgagcctttgaaaggtagaccaattttcttcccccaactggcttaacacgcaaactgtcccttgtcatggacatgaggatatattttctttatattaattctatttaatgaaaattttatctttgctctaaatattataatcaaaagataacttgtcatacttngaactt

SEQ ID NO: 89611 - DNA, 190 bp, Zea mays
  Clone ID: MRT4577_181727C.1
actcgtacaagatcgcgagcgtgcactctagcagactcaaccttacttccgcgcgcatgggaaatcatagcttatgtacagtgccacctaacatgaatttactgtccggcactttacaaactcctgacttgaaaaaccttgacgatacgaaacttattggccttgcaccaaatctgcgtttcgccaggtt

SEQ ID NO: 89612 - DNA, 631 bp, Zea mays
  Clone ID: MRT4577_181728C.1
ggtacacggcccccctcctcgagttttttttttttttttttttttttttttttttttttttttttttttttttttttttttttttttttttttttttttttttttttttttggccaacccaagggcggaacaacaggggggttgtcccaaaagggaccttgaaagggggcccctgggttttggcccataaaaaatgggggtccccccaaattcctacgggccctaacagtatttttaaaacaccaaacaaaatggaaaacggtttttcccgtttacagggttatcacacccccggggggggcaacgttgtaattgcccccccggcttccggggttaaattggggcccccaatattgtttttttaaaactaatttaggctcccggccggcccataggggggttaaattttttttttataaaaaggccggcccaaacttttccacaatggattgggcaatcaccttcttcagctaaaaggggggggaatcatccttgttttgggccaaggggaactaaaaaaacgggtcggggaaatggaacccctttcgggggtttttaagagggggaaaaacccgatacattgaaggcccccccgcaacacgggggggggggcaaaaaaaagcttttttaa

SEQ ID NO: 89613 - DNA, 405 bp, Zea mays
  Clone ID: MRT4577_181729C.1
aaaaaacaaaggaatgctgaaaatcttcagcagcaggatcctgcaaagatcagggcaaattgggtctagtttttactataaaaaaagaacggggacgcccctttgatctggaatatcccctttaatggggcctactacatcaaaatggggtcaattccaaaaacaggggccccccccccacaatgggaccaatacagatcgggtaaaaacaataccccactggggggggcttcctaaattttaaatctcctaccggatccccatgcttttagcttatttttgaccccgcagcgggggagcacccccccctaccctacgattgggccaaaaaaaaaaataccacccacccgccctaaacctggctggggtatgaaaaaaagaggacagcccccaacaatccttaac

SEQ ID NO: 89614 - DNA, 291 bp, Zea mays
  Clone ID: MRT4577_18172C.1
gccactcgttcgatgtcgcgttagtctggtggccgggggcactactatctgcgtagggggcaagatcgacccaatcactttcacacgtaaacccctacgtactacgggcaccagacctcggcttacagctgagatagcgcagatatttggagataagagtaagcaccatatgacattctacctcgagacaaactgacactgtgggtctcaatccagaaaacgaagcacaggttaggaggaccatatcccaatctgttaccgggaggacaattcaggaaccctttacccgtc

SEQ ID NO: 89615 - DNA, 340 bp, Zea mays
  Clone ID: MRT4577_181730C.1
tccacgcgtacgcacactcttgaccacacgcgttcgtctaccagagacccatcgaaccaggggtgtcaatgcgttcgtgcgacacattaagaacgtcataatccatgccacacctgtcatcttcaacaccctgtaccaaccctaccgagagggagcttactatctacatatataccactataaactcaacatgggtacccacactgctgtctaccactagcctttcactgaacatccctgactattatacacccacacaacttatgaaacctaaagctaagaacgaaacgtaccttgatgctgtaatcacaattcccaatggaaccttgtttaccatgtg

SEQ ID NO: 89616 - DNA, 347 bp, Zea mays
  Clone ID: MRT4577_181731C.1
agcaaatctcccaaaaaaattattgggtgcattgttgatgggtttccatggcctatcatctcgtaacatcacatgagcccttgggagtgagaccactgaaaggtatgccatcatcattgcattgattatgggttaccagggcttcacatagacatacttatttttttctacatccttatcccgagaccaatcagtcactcctgagatataagctgtgcgcttatcaacaagtcattctagacctggggacatgccactttactacccgataggagccgggctagacatgatcaggcgggcatgcatggccttagacacatgagaggaaccgttaggacttgggcaat

SEQ ID NO: 89617 - DNA, 108 bp, Zea mays
  unsure (1)..(108): unsure at all n locations
  Clone ID: MRT4577_181732C.1
gtggtcngtcacttgaagggtagctctcaaagtgggctcttatgacactactagatccaacaaatagtgatgccaaccttgcagatgtcggctatcctggtgagttca

SEQ ID NO: 89618 - DNA, 366 bp, Zea mays
  Clone ID: MRT4577_181733C.1
ggagaggaaaggggtcttttgatcatagcccagcaaatgattgaccttaaatgtttattgggcccccccccgtcccccccccaatccccccccccccgaattgaaattaaattaaaaataaaaaccggggaatctgcggaaagagcccatcctgggactgaaaaaggtttttattagttggagttgaaattgctcttgcgtaacttgccccccaaaaaaaattgcttggcaaagacaactagccactgggcatttggccccccaccggcgcaggactcgaaccgccctggggcaatgttcaccctccccactggctttttgaccagctcctggccgatcgatatcaaaaaccccctgttctccttg

SEQ ID NO: 89619 - DNA, 313 bp, Zea mays
  Clone ID: MRT4577_181734C.1
caagaagctcaagtagaaagaagtggctcgcgcaaatgaacagagagaaagcgagacggctcggggacctgcttacatcaagcatgggcaggggcaaagaaaacgaccagagagaaaggcccctgcagcaaagaccgagcggcagaaacaggggacaaggtaccaacaaacacagagagagagcaaaggcacggcgagaagaagagcctggacagccagggaaagcaagccacacagagtgagccaaaaccccaagcgctggagcaaaaaagagaaacaggaaaaaaaggggccgcaaaataaagaaacggga

SEQ ID NO: 89620 - DNA, 800 bp, Zea mays
  unsure (1)..(800): unsure at all n locations
  Clone ID: MRT4577_181735C.1
actttgggtaccctccgggtcctnccgggttgagtatgagaggcaggtgtacgcccttgatccgtctcagatacttctgagggactcaaaactaaggaatacagcctttatctatggagtggttatcttcactggccatgacagtaaagtcatgcagaactcaactgagtcgccatcaaagaggagcaggattgaggagaagatggatttgatcatatacatcctgtttactgtgcttgtgttgatatcgctcattagttcaattggattcgccgtgaggatcaagttagatttgccccgctggtggtacttgcagccagagaaaagcaataaattagatgatccatcacgcccagctctttctgggatattccatctaatcacagctctcattctttatgggtatctgattccagtctcgctgtatgtctcgattgaacttgtgaaggtattgcaagcacatttcattaaccaggacattcatatgtttgatgaggacactggcaatactgctcaggcacgtacatcaaatttgaatgaggaacttggccaggttcatactatcttatcggataaaactggcactctgacctgcaatcaaatggatttcctgaagtgttcagttgctggagtatcatatggcgtgggttcaagtgaagttgaacgtgctgccgcaaagcatatggcatcaggtgctgatgaccatgatatccctttaccaagatatatgggaggagaacaatgatgatgaaatcgagttggtaggagtcaactttagtgntgggaccaacataaagccc

SEQ ID NO: 89621 - DNA, 266 bp, Zea mays
  Clone ID: MRT4577_181737C.1
ggcggctcacggctcccgctgcggacaacctgatccatgggggaggcctgaggccgagggcccggccgtgggcgcacgcaccttcaaccaggcctggctaccaaggcgcggcgagctcagaaggggcagcctgtctccacccgtcggggacccgctcagcagggagtggcccaagcgaaagatggcaggggagatggtgcttgtgggccggatgtggcattcatgggctggcggactgaggcggctgggtggtgacgggctgaaag

SEQ ID NO: 89622 - DNA, 398 bp, Zea mays
  Clone ID: MRT4577_181738C.1
gcggccgctatttttttgtattttgaattttaccttatgttatgtaccaggtattcttgtcaaagaagaaaacccctttttgatgcatgggttgcgggataggacgagatggggggatacggtgtataaacatgagggtgaaatatccatagaaagatggatatatgtatataaaggggaggagaatacaacccaaatatgtggtgtcactgctctgtatggagaatcacccactatcgggttgagagtatcattgacataatataacctatattactattaaacagcctttgaaactattaaatatgttctatccaattgtatatgttcacaaagaaagactttaattaatggtccaggccatacgcatgcaaataactcttataatctgagtactt

SEQ ID NO: 89623 - DNA, 569 bp, Zea mays
  Clone ID: MRT4577_181739C.1
ggcaattggcccagcggcgttcattattagaattcggttcgttgctgccgagtgattttttcgacacttggcaaagaaaatctttaccgagtgccaaacagagtgttttttagaaatagacaaaaaaaaaattgaattttttgcgactctgagtttgatgagtgtttttagaaaaagcagagacaaattctggtagtggtcgagtctagtcgctttctatccatccatgatggtccgcacgctcatcttcatcttcttcgtaccacgtggagtagcccaataatctgccttgcatacaaccttttatttgctattttttttttcttcttctcccatttgtatataccaccacctccttgaggtctcccttgcgagcagcaacatggagcgggttccagccacggttgtcagcgtcgtggcggctccggaggcggctcatgcactcctccatccctacttatacatccaaccaaacacatcctacatgaccacgggtgagagctagcccatgggctcagtccagtaaagtggcaactggaggcctatgaaaggccatgtatgggcttgcc

SEQ ID NO: 89624 - DNA, 129 bp, Zea mays
  Clone ID: MRT4577_18173C.1
cgttttcatcgttcttcctaccttctattgcggcggcgacaggcagagtttgagagcccgttgcccccgcgcgttgtcccggtactacttggcggcacgcgtgcgagcgaccgcttgcgcaacccagcg

SEQ ID NO: 89625 - DNA, 857 bp, Zea mays
  unsure (1)..(857): unsure at all n locations
  Clone ID: MRT4577_181740C.1
tgggtacctcgaggccggccgggactattgcgctgtctgtgacatctgcttgcctgtcgaattgcgattcgatcgtagtgtggaaagggaagggaacaaatctaccggcaccaccaggcatcacgcgcctccatactatggtggacgccccgtgccgcccatcgacgtcgccatcttcctcaccgatgctcaacaataacctccgcgcgctcggacccggattgaatccctttgcccccttcggcatgggcaactactctcgctagtcgtctcctccgatccctcttctccgattccaatctctgagtgcttccaccacctcccaggccgcttcctacatcggaaccgatccccgctactttccgccccttgctttggatccgagactggagatcctcctctgtcctgctgcccgaggagccaccaaggataccatggtgcaggtgcgcaggtcgctcagcatgagccgcctccggagccaccacgacgctgacgaccgtggctggaacccgctccatgttgctgctcgcaagggagacctcaaggagggtgggcatgttaaaatcatggatgaactactggagcgtcgaaccaaaggggcttgcggctgtggtgctatatacaaatgggagaagaagaagaaaaaaaatagcaaataaaaggttgtatgcaaggcagattattgggctactccacgtggtacgaagaagatgaagatgagcgcgcggaccatcatgtatggatagaaagcgactagactcgaccactaccagaatttgtctctgctttttcgaaaacactcatcaaacttagaatcgcaaaaaaaaaaaaaaaaagcggnccctcgagctcagctt

SEQ ID NO: 89626 - DNA, 259 bp, Zea mays
  Clone ID: MRT4577_181741C.1
gggggggaaaaacccacgcccagccgggctccaaaagttaacttgaatcggcacatacataaaaatggggcactcagcctaaacgggagcagcagcaaaaggaaacccttaaaaaaggtaccaccattttttggcgagcaggggagcccccacggaagccaacagggggggcgccgtaattggaggaaaactcccccccccccgggaggcgagggccattatggctccagtgggaggagcggaatggaatggggtgggc

SEQ ID NO: 89627 - DNA, 518 bp, Zea mays
  Clone ID: MRT4577_181742C.1
gggcgcggcgcggagcaccgggcgggcgcgctggcgtccgtggtggtgggcgcgggcgggtcggaggcgctgcaggcggagccggtccgggcgggggccatggggcggctgctgctgatggtgcagggcgggtgctcggagcgcgccaagcgcaaggcgcagcacctgctgaagctgctccgctccgcctggccgagcgccgactgcgtcgccaactccgacgacttcctccaacactaccactactgatcgtaatcgtcctacctagcattcgcgttctgttccctaaggccgcggaaagatcactcgctcgcttgctcaggggggcaagtgcaaaggctgccggcggcgtgtatgtatgccgggtccgggaccgggacggcagcaggacggagaaaatctctaatgttttgtacgtaacgtaacgttggcagggaggaggaggaggatggatggattcgtggttctggatcgatgaacagtagtagcagtaatagctgcttagcagcaggcatggc

SEQ ID NO: 89628 - DNA, 223 bp, Zea mays
  unsure (1)..(223): unsure at all n locations
  Clone ID: MRT4577_181743C.1
aacgccgggcccccagggcacgcggaancaccgggagtctgccgcgctctccaaaagncccgaaccggagcgcgggcnncgctggccccgctgncgncacaacgccaggggcgnggcgccggcagcngcgcggccgccagaaccaagcaggcgaaacacgcccaccagcaaaagccggaaccaaagggggggggaccaagaancaaaaccccaccccaagcga

SEQ ID NO: 89629 - DNA, 278 bp, Zea mays
  Clone ID: MRT4577_181744C.1
gccaaggagttttcggtggctcagctgggtaaccggggatcaccatggtgggctcattggtggggaagaagatcgtgtctgtaacggggaacgccaagaagctggaggaggtcgttcagattctaggcgataagtttccatgcactttggtggcacagagaattgacctgccggagtaccagggggagccggatgagatttccatgcagtgatgtcaggaggcagttcgccaggtacaggggcccgtgctggttgaggacattgtctgtgcatcaatg

SEQ ID NO: 89630 - DNA, 320 bp, Zea mays
  Clone ID: MRT4577_181745C.1
cctcattgttgtttggggtttttataacttatgtggggtcatgtaggtttttcaatttttgatcgtttaagatgatgtggtctgaaatcaaccaatttttaaacccaaaaaaaacttaacctatcaagaaagaaacccaaagcccgaaggcatggcaaacagaccagaaccagggatgtaagaaaagaggcgggcccctaaaaaataggggggaaaaaatacaaggggaagaatcaaggggccaccttttcgggagcaatataaaaagggggagaaaccgggcgcaaagtaaacccaaggaaatctgtggcccggggagc

SEQ ID NO: 89631 - DNA, 570 bp, Zea mays
  Clone ID: MRT4577_181746C.1
ggatgaacatgtcacatgtgtatttgcacttacaatgtttccatgtacaatttcttcagacgtgttaatacacgtacggacgagtaaaaaattaaatacggattattacatttctccagttatacacaccagttaactgactgatgcacgagaaagactatgcatctccatgcaccagcagcatgcaggcacccgatactagttgcctagtagcacaagacgacccttacttttttgcacgagtcatgatcagaaagaccttccagtgattgcgccctgagcgcggatgtcagaaattatgcccatttctcaccgagaagaacatgctggaaatgcctttgctcctcttggagagtggaagaagaagacatgcttggtttccatcaccaccaccatgccccggcttcatcaccttcttcgccttcttgaccaactcttgctcggtattcatcgtcgtggggcctgcctccattggtgtcattaagaggagcgacaacagtacgtactatctgcagcaactcactcactgccgctatttctttgctgcctaaggacctccggcggcatgat

SEQ ID NO: 89632 - DNA, 467 bp, Zea mays
  unsure (1)..(467): unsure at all n locations
  Clone ID: MRT4577_181747C.1
ccccgggctcgacccacgcgctccgacgatagccctttgntcctctgctcccggggaagcgagctcgcagcacaggccgcgagccatggcactccaccagccgctcggagcgggtaggggaagggcgaagaaggggagcggcccggacgcaagggtccggcgggccgagggaagaagtcagtgtncgagggtcggtgataggccccgggctccagttccccgtgcgggggggtgcggnngcgctacctgaagaagggccccgctacgcgcagnncgcgtcggcaccccggcgctcnnccgtctacctcnngccgccgtccctcgagtacccctcgccgctgaggttnctggagctcgccgggaacgccgccagggacaacaagaagacgcgcatcatcccccgccgcgtgctgctcgcgatccgcaacgacgaggagctcgggaagctgctgtccggtgtggccatt

SEQ ID NO: 89633 - DNA, 643 bp, Zea mays
  Clone ID: MRT4577_181748C.1
tagctttttttctgtgcctaggcagctgatattgtcaatccggtggtggcggtggcagggcagatgctgatgcttcaagtggttgcatgggctgttgttctaattgagaaatcagggaaagatgcttacattgttgaggtgttgtcttcaagagcttcttcatataaagagggtggtgagtacaagaatgtctttactgactgctctatggtgctggatcaagataatgttattgtctcagtgctagtgcatcgtgcttttctttatgaaagaacagataaatataggtcttggttccgttgatcatacgttaggttctgaagattgatcctacaaatagtttttatttttattacaatttatcttcttaacatgtttttattgtcagtttatgtctttatagctcccttttttactattgtactaacacataatttgatacttttgatattttatttttttattttttttttttttctattatttcttcaaagaaataactttttttatttttttttcttttattttttttttttttttttttattttttttttttttttttttaatattttttaccttttttttttatttttttttttcctctttttttttttttttttatatttctttttctattttttt

SEQ ID NO: 89634 - DNA, 508 bp, Zea mays
  Clone ID: MRT4577_181749C.1
acttaaacgaaagcacagtatgcacggaaaaattgcctctactgaaaacaaggggcagcctgtatgaccataaacgtttttggggaccgacgtaaccacctagtgggcaagctacgagtgcttggagatctaagcgctgatccgaaacaaattgaacaaagaatgctgcctgctacatgaatcattaattacttcgctatgaaaagcaaaaacttcaacaggtcctgaatgggaaggaccccttacacacactggttttggtagtcatcatatttttacatttaagcaccggcgaaaccggacttctttccgaagaagaggatctgcagctcgtcctagccagaaaggacaccagctccagccatggcacgaacaatgttagcaccaccacccttgaacacggactttggcgccttccttcttaagaaactgctggaacgcatccaacaagctcttgtacttgacagcctcaccatatgtcatcatgatccttctgccgacggcatca

SEQ ID NO: 89635 - DNA, 250 bp, Zea mays
  Clone ID: MRT4577_18174C.1
gaacacgtaccacgatcagcagtaaaaaccttttgcattactacagcaacaatgacgaacaggatatatgcaatcattaagcggcttgctatttctacatctgtcgctaacgcgacactcttacctcaatgctcacaagctcctatagctaccctacttcacccataccttccatcaattatagcttcagtatgtgaaaacccagctcttcaaccatataggcttcaacaagcaatcgcagcaagcaaca

SEQ ID NO: 89636 - DNA, 164 bp, Zea mays
  Clone ID: MRT4577_181750C.1
actgcattggcattgggatcgcgcactgtccggacgccccggcgccatggccagccttgccagagtgtgttcgctactgcttgttggcgtcgccgtcgtcctgctcctgcccggcacgtacgggtggcacgagagcaattgcccgccgggacatggcggtggtg

SEQ ID NO: 89637 - DNA, 718 bp, Zea mays
  Clone ID: MRT4577_181751C.1
ccggccgggaaacgcgaagcaaacccttttcggcgtccggcgtccccatccccaccccaccaggccaccacggcgggatgaggccggcgtcggacgcgcaccagtcgcggctgctctacgagctctgcgcgctcctgctgaccgtccatgctgctgggggcgtccatggcgctgatgctctgcggctcggtcaccttcatgctcggcttcttcctcatgccctgggttgtcgggctcggtttcctcttcctcttcgtcggcttcatcaccaacctctccgggatctggagggacatcatcctctggccctccgtcgcgtgctccgcatcggactcacccaaggaggcaccctccccatggcatatgttttccaagccttcatccatgtcgacgtgaagccaagtacaaagtaaggctcccacggaggtccatagaagcagggagttgttggaccagcagactcttgccattgccaacctatattttccttcctggacaacccttcttttacatgtgacaccgcagcaagttgccaagttttaaatggttttgtactgtgtctaggaggatacgggatacttgcttgtacatacggaaaagaaggtcgcgtctaaacatcacgtgcagcttataattgtttcagaaatgctgttctttgggctgaacatgaagaaatcccatatgttgtgtgcccaaaaaaaaaaaaaaaaaagcggcc

SEQ ID NO: 89638 - DNA, 632 bp, Zea mays
  Clone ID: MRT4577_181752C.1
ttttgttgctgcaagaattaatgtgaaaaaaaatagattctcctcttcttctttcacttggttggtcgaatggagcaggcagtagtatggcggacgcgtggggccgctgctgccgcgacatgtgacgcccgccggggtggcgtccatgctgctgggggcgtccatggcgctgatgctctgcggctcggtcaccttcatgctcggcttcttcctcatgccctgggttgtcgggctcggtttcctcttcctcttcgtcggcttcatcaccaacctctccgggatctggagggacatcatcctctggccctccgtcgcgtgctccgcatcggactcacccaaggaggcaccctccccatggcatatgttttccaagccttcatccatgtcgacgtgaagccaagtacaaagtaaggctcccacggaggtccacagaagcagggagttgttggagcagcagccattgccaacctatattttccttcctggacaacccttcttttacatgtgacaccgcagcaagttgccaagttttaaatggttttgtactgtgtctaggaggatacgggatacttgcttgtacatacggaaaagaaggtcgcgtctaaacatcacgtgcagcttataattgtttc

SEQ ID NO: 89639 - DNA, 180 bp, Zea mays
  Clone ID: MRT4577_181753C.1
atgctgctcctgtcgtcgatgttcctgctcctcatgcaggcggtggtgctgcctctccaaatggctggactatccggtcacaggacggcgaagcggacgttcagcaaggcgggaggggatatcaaagtcaaggcagggacagaggtctataatccacttagaacgaccattctactctag

SEQ ID NO: 89640 - DNA, 418 bp, Zea mays
  unsure (1)..(418): unsure at all n locations
  Clone ID: MRT4577_181754C.1
gcctttcgcgtcttcgacaggaccanatggtttcatctcggctgctgagctccgccatgtcatgaccaacctcggcgagaagctgactgacgaggaggtcgacgagatgatccgtgaggccgatgttgacggcgacggccagatcaactacgaggagttcgtcaaggtcatgttaggtggtgtagtcatgggaacatggccaagtgaggagcgatccccgttatctatgaatgaattgaagtgaaatatcaggcacacaagctgtactttgccatgtccctttgagtacacatcagtatcatgcaggaggtaatgtctagtagtggtcggctcgacatcagatacctggtctcttttgattgtgatgttatcttgcattattgctcctgctggagcttttaggatttgttgtaagctc

SEQ ID NO: 89641 - DNA, 898 bp, Zea mays
  Clone ID: MRT4577_181755C.1
gccggccggttcgggaacccccatctaaaaaaggccgtcgagccggcggggccgggaaacgcgaagcaaacccttttcggcgtccggcgtccccatccccaccccaccaggccaccacggcgggatgaggccggcgtcggacgcgcaccagtcgcggctgctctacgagctctgcgcgctcctgctgaccgtcctccgggcgtcgcctgacgacggggcggtggcgcggccgctgctgccgcgacatgtgacgcccgccggggtggcgtccatgctgctgggggcgtccatggcgctgatgctctgcggctcggtcaccttcatgctcggcttcttcctcatgccctgggttgtcgggctcggtttcctcttcctcttcgtcggcttcatcaccaacctctccgggatctggagggacatcatcctctggccctccgtcgcgtgctccgcatcggactcacccaaggaggcaccctccccatggcatatgttttccaagccttcatccatgtcgacgtgaagccaagtacaaagtaaggctcccacggaggtccatagaagcagggagttgttggagcagcagactcttgccattgccaacctatattttccttcctggacaacccttcttttacatgtgacaccgcagcaagttgccaagttttaaatggttttgtactgtgtctaggaggatacgggatacttgcttgtacatacggaaaagaaggtcgcgtctaaacatcacgtgcagcttataattgtttcagaaatgctgttctttgggctgaacatgaagaaatcccatatgttgtgtgccatcgcgccagtattgctggttctttcgcctgactgtgctgctgggctccagctttgacttcgagaggaattgctgcgatcg

SEQ ID NO: 89642 - DNA, 838 bp, Zea mays
  Clone ID: MRT4577_181756C.1
ccgggggttctccgtccggtcagaccaatcaacaaagtgacgcgagcacgagcatccatcgtttccccttcttccccatcgcgtgccctcgccgcagccatcttccatggcggaccagctcacggacgagcagatcgcggagttcaaggaggccttcagcctcttcgataaggatggcgacggctgcatcactaccaaggagcttggaactgtgatgcgctcccttggccagaaccccactgaagcagagcagaacctgatggcaaggaagatgaaggacaccgactccgaggaggagcttaaggaggcctttcgcgtcttcgacaaggaccagaatggtttcatctcggctgctgagctccgccatgtcatgaccaacctcggcgagaagctgactgacgaggaggtcgacgagatgatccgtgaggccgatgttgacggcgacggccagatcaactacgaggagttcgtcaaggtcatgatggccaagtgaggagcgatccccgttatctatgaatgaattgaagtgaaatatcaggcacacaagctgtactttgccatgtcccttttgagtacacatcagtatcatgcaggaggtaatgtctagtagtggtcggtttaggtggtgtagtcatgggaactcgacatcagatacctggtctcttttgattgtgatgttatcttgcattattgctcctgctggagcttttaggatttttgtaagctcatattttcagggggttttggatcttttgtgcgagtcttgtatctcgtgtacgttgcattgcattgttgtgttatgcttctgctggcttgtaccgccttgttatgtgaaaag

SEQ ID NO: 89643 - DNA, 591 bp, Zea mays
  Clone ID: MRT4577_181757C.1
ctcgaggccggccgggccgggaatcctctcccagaccgcgcgatggccttatcctcctcgcgagcgccgctgctgccattgttatgcttgctactaacagttgtagctgccgccaaacacccgaagcaggagaagcctactccggcggcgttggcgcccgtcgtcacacttgaaggctgccccgacaagtgcggcaacgtcagcatcccctaccctttcggcaccaaggacggatgcttccgcccaggcttcttcgtcgtgtgcaacgacaccttcgatccccctcgccccttcatcaactccagcctcgcgctcggcaccgacgacacgaggacgcagatcgtcgtcgaggacctgtactacctgaccgccgaggacggcatgccggagacgacaccgacaaggtccgcgtggccgatcgagctcgccggcgtgtctctctcggacgcgaaagcgcggctgctgggcgccttcagctacgagtgcaggctgaacgagacgcaccactcggtgcggcggcagaggatcaacttcggcgtctaccgctcgcccttcctcctgtcggacgccgacaacgtgctcatgggaatc

SEQ ID NO: 89644 - DNA, 701 bp, Zea mays
  Clone ID: MRT4577_181758C.1
acctggttctccgtccggtcagaccaatcaacaaagtgacgcgagcacgagcatccatcgtttccccttcttccccatcgcgtgccctcgccgcagccatcttccatggcggaccagctcacggacgagcagatcgcggagttcaaggaggagcttaaggaggcctttcgcgtcttcgacaaggaccagaatggtttcatctcggctgctgagctccgccatgtcatgaccaacctcggcgagaagctgactgacgaggaggtcgacgagatgatccgtgaggccgatgttgacggcgacggccagatcaactacgaggagttcgtcaaggtcatgatggccaagtgaggagcgatccccgttatctatgaatgaattgaagtgaaatatcaggcacacaagctgtactttgccatgtcccttttgagtacacatcggtatcatgcaggaggtaatgtctagtagtggtcggtttaggtggtgtagtcatgggaactcgacatcagatacctggtctcttttgattgtgatgttatcttgcattattgctcctgctggagcttttaggatttgttgtaagctcatattttcagggggttttggatcttttgtgcgagtcttgtatctcgtgtacgttgcattgcattgttgtgttatgcttctgctggctaaaaaaaaaaaaaactagttctagatcgcga

SEQ ID NO: 89645 - DNA, 846 bp, Zea mays
  Clone ID: MRT4577_181759C.1
tcgaggccggccgggacctggttctccgtccggtcagaccaatcaacaaagtgacgcgagcacgagcatccatcgtttccccttcttccccatcgcgtgccctcgccgcagccatcttccatggcggaccagctcacggacgagcagatcgcggagttcaaggaggccttcagcctcttcgataaggatggcgacggctgcatcactaccaaggagcttggaactgtgatgcgctcccttggccagaaccccactgaaggacaccgactccgaggaggagcttaaggaggcctttcgcgtcttcgacaaggaccagaatggtttcatctcggctgctgagctccgccatgtcatgaccaacctcggcgagaagctgactgacgaggaggtcgacgagatgatccgtgaggccgatgttgacggcgacggccagatcaactacgaggagttcgtcaaggtcatgatggccaagtgaggagcgatccccgttatctatgaatgaattgaagtgaaatatcaggcacacaagctgtactttgccatgtcccttttgagtacacatcagtatcatgcaggaggtaatgtctagtagtggtcggtttaggtggtgtagtcatgggaactcgacatcagatacctggtctcttttgattgtgatgttatcttgcattattgctcctgctggagcttttaggatttgttgtaagctcatattttcagggggttttggatcttttgtgcgagtcttgtatctcgtgtacgttgcattgcattgttgtgttatgcttctgctggcttgtaccgccttgttatgtgacatttggtgtgtgtggattctgggaatcc

SEQ ID NO: 89646 - DNA, 548 bp, Zea mays
  unsure (1)..(548): unsure at all n locations
  Clone ID: MRT4577_18175C.1
catccggacacaacctgtctggcgcagccatgcccaactgccactgtacagaggaagatctatctagacggtctcgagttcgctcacctctatacgtgctcgctcgtccaagctcctgttggagcccgcaagtgtcagatagtggtctacgctacccggggcctgacgtactcccgggaccttcctcggccggatgcacgnacacgggcacgcatgctactgaaagcccgcgcgtcgagccgcggcggcccagcggcgagacgagcagattgaatcctcgagctacctacctctttcgcgatcgcctcgtatgcagaatatgcttgttgcacgtgcgtagcagccagggcgatctccgctgatcccaatgaatcgtctttctatctcagctgtagggtgtgcttatctggcgatataagccattcatatatagagtactcgttggaataaataccatgaatggaaggatgtagcgtgcatgcccaaagattgattagaggccacgaaggtcgagttggctctataaatattgtctgccccaggatagg

SEQ ID NO: 89647 - DNA, 416 bp, Zea mays
  Clone ID: MRT4577_181760C.1
agcagtggtaacaacgcagagtacgcgggcttttactagagatggtgttctgagaactgatgtgaagacacctagtaaggcaagagcaactgtggctcatccgatgagtgaaatgactacagtgggcaatacgagaaaggctatcactccaaatgcagctagaagtagcaagctggaaacaaaaagcaataactacagactgaagggaccttcagcattggatagccactctactaggtcaaacagaatggacttgcaagtgtctggcaagcagaaatcgagttctgttaaccttcctccaaggaaaattttcagttctactgctggagaaccatcagttggaaccatttttaggtcaaaaaaaaaaaaaaaaaaaaaaaaaaaaagtactctgcgttgttaccactgcttaagaa

SEQ ID NO: 89648 - DNA, 1209 bp, Zea mays
  unsure (1)..(1209): unsure at all n locations
  Clone ID: MRT4577_181761C.1
ggcaatatacaaccttggnactgttttgtatggtttagctgaggataccatgagatctgggaagccagatgtctctcctaatgagctttatagtcagtctgctatctatgttgctgctgctcatgctctgaagccaaattactcggtctatcggagtgctttgcgattagtccgctcaatgttacctctgccatatctcaaagttgggtatttgacggctcctccagctaacaattccattgcaccacacaaagattgggagagatcacagttcattttgaatcatgagggactccagcaggttgatgcttctgaccagcctccatcacaatccccagggcatttggacaggggcagaaagcctgtcagaataaacattgcagatattgtttcagtgtcagcatgtgctgatttaaccttaccaagtggcgctggcctctgtatagaaactatttctggtcctacattcttggttgccgatagttgggaggctctcgaaagttggctagacgccatacgccttgtctacactatttttgcaagagggaagagcgacgtacttgccggtattattactggttaaatgtctttctgcaaatgcaaaactgccaccgaagagccgcggggttttggagattcagcggcagccttatcggttgaatgccctctttggtttgtgttattatttttcccgtctgtgatgtcagtcttcctagatttagccatttagggtattaggtatatcatatatattcatttgtaactactttccactgattggctataggtccgttttccttttgtaaaagtggccgtgtgactgtattgtgcattcacagcagatgtatcggacattcttaagtttgtgattttgtttctctgtaaaaaaaaaaaaaaaaaaaaaaaaaaaaaaaaaaaaaaaaaaaaaaaaaaaaaaaaaaaaaaaaaaaaaaaaaaaaaaaaaaaaaaaaaaaaaaaaaaaaaaaaaaaaaaaaaaaaaaaaaaaannccccttgggccgaaccccccttagggggaattttggaaaattcccttaacctgggggcccgttggaccttcctttaaagggcccaattcccccttttgggggggcgtttaaaattcccggggccgggttttaacacggccggggcggggaaaacccggggggtacccaatttaaaccccttgggaaaaaacccccttttc

SEQ ID NO: 89649 - DNA, 241 bp, Zea mays
  Clone ID: MRT4577_181762C.1
gcgtcacgacccagcaaattaccctccatttctataacttttccattctctccacccctacaagaacccaggagcagtgtcactttaagcttgccttcatccacacaaactacctcctacagctaatcgaagccttgatttgaggacaacaacgtacaccacatcggcataaataactatagcttcatcggcagcgcggcgaccatgaacatgtactccatctaccacaacgagatcataa

SEQ ID NO: 89650 - DNA, 688 bp, Zea mays
  unsure (1)..(688): unsure at all n locations
  Clone ID: MRT4577_181763C.1
ggccgggccggngttcatagagagctcacgagaaagcgttcagcgaacggaggtggagcaggcggaggaggagcngngccaagccacaaggggttcnctccgcgacgcgaggcacaagcgccgggccaccggnggaaagcagaagggcgggaggaagaagcgaaagnacgcagccggccgccagccggccaacaccaagnngncaagcaacaagacagngaggagggcccgcggccggggaggcaacgngaaggggagggcccctcgcccngacacaggcaaccacccagggggaagngaagctggcacccgcaagacccgnanccncgacgnggncnacaaggcancaaacaangagcgggggaggacacaaacccncgngaagagngccacngcgcaagnngacgctgccccaancaagcaggggnaccccacgcaccanggagnngacannggnaggaagaagaaaacccccgctgcaaagaagganaaggccgagggacaagaggcngaggcagcagccgaggaaacgaaaaagagcaaccatgncacgaggaagctngagaagcgcaaggagggacgnacccctgacccacacattgaggagcaatttggcagtggacggttgctggcatgcatttccttccgccctggacagtgtggccgagctgatgggtacatcccttga

SEQ ID NO: 89651 - DNA, 778 bp, Zea mays
  Clone ID: MRT4577_181764C.1
gcagacctctgccatggcggaccagctcacggacgagcagatcgcggagttcaaggaggccttcagcctcttcgataaggatggcgacggctgcatcactaccaaggagcttggaactgtgatgcgctcccttggccagaaccccactgaagcagagctgcaggacatgatcaacgaggttgatgctgatggcaatgggaccattgacttcccagagttcctgaacctgatggcaaggaagatgaaggacaccgactccgaggaggagcttaaggaggcctttcgcgtcttcgacaagggccagaatggtttcatctcggctgctgagctccgccatgtcatgaccaacctcggcgagaagctgactgacgaggaggtcgacgagatgatccgtgaggccgatgttgacggcgacggccagatcacggacgagcagatcgcggagttcaaggaggccttcagcctcttcgataaggatggcgacggctgcatcactaccaaggagcttggaactgtgatgcgctcccttggccagaaccccactgaagcagagctgcaggacatgatcaacgaggttgatgctgatggcaatgggaactcgacatcagatacctggtctcttttgattgtgatgttatcttgcattattgctcctgcagtcctgctggagcttttaggatttgttgtaagctcatattttcagggggttttggatcttttgtgcgagtctataaaaaaaaaaaaaaaaaaaaaaaaaaaaaaaaaaaaggggccccca

SEQ ID NO: 89652 - DNA, 888 bp, Zea mays
  Clone ID: MRT4577_181765C.1
cattgggtacctcgaggccggccgggacctggttctccgtccggtcagaccaatcaacaaagtgacgcgagcacgagcatccatcgtttccccttcttccccatcgcgtgccctcgccgcagccatcttccatggcggaccagctcacggacgagcagatcgcggagttcaaggaggccttcagcctcttcgataaggatggcgacggctgcatcactaccaaggagcttggaactgtgatgcgctcccttggccagaaccccactgaagcagagctgcaggacatgatcaacgaggttgatgctgatggcaatgggaccattgacttcccagagttcctgaacctgatggcaaggaagatgaaggacaccgactccgaggaggagcttaaggaggcctttcgcgtcttcgacaaggaccagaatggtttcatctcggctgctgagctccgccatgtcatgaccaacctcggcgagaagctgactgacgaggaggtcgacgagatgatccgtgaggccgatgttgacggcgacggccagatcaactacgaggagttcgtcaaggtcatgatggccaagtgaggagcgatccccgttatctatgaatgaattgaagtgaaatatcaggcacacaagctgtactttgccatgtcccttttgagtacacatcagtatcatgcaggaggtaatgtctagtagtggtcggtttaggtggtgtagtcatgggaactcgacatcagatacctggtctcttttgattgtgatgttatcttgcattattgctcctgcagtcctgctggagcttttaggatttgttgtaagctcatatttttcagggggttttgggatctttttgtccgagtcttgtatctcgtgtacgttgcattgc

SEQ ID NO: 89653 - DNA, 941 bp, Zea mays
  Clone ID: MRT4577_181766C.1
cattgggtacctcgaggccgggccgggacctggttctccgtccggtcagaccaatcaacaaagtgacgcgagcacgagcatccatcgtttccccttcttccccatcgcgtgccctcgccgcagccatcttccatggcggaccagctcacggacgagcagatcgcggagttcaaggaggccttcagcctcttcgataaggatggcgacggctgcatcactaccaaggagcttggaactgtgatgcgctcccttggccagaaccccactgaagcagagctgcaggacatgatcaacgaggttgatgctgatggcaatgggaccattgacttcccagagttcctgaacctgatggcaaggaagatgaaggacaccgactccgaggaggagcttaaggaggcctttcgcgtcttcgacaaggaccagaatggtttcatctcggctgctgagctccgccatgtcatgaccaacctcggcgagaagctgactgacgaggaggtcgacgagatgatccgtgaggccgatgttgacggcgacggccagatcaactacgaggagttcgtcaaggtcatgatggccaagtgaggagcgatccccgttatctatgaatgaattgaagtgaaatatcaggcacacaagctgtactttgccatgtcccttttgagtacacatcagtatcatgcaggaggtaatgtctagtagtggtcggtttaggtggtgtagtcatgggaactcgacatcagatacctggtctcttttgattgtgatgttatcttgcattattgctcctgctggagcttttaggatttgttgtaagctcatattttcagggggttttggatcttttgtgcgagtcttgtatctcgtgtacgttgcattgcattgttgtgttatgcttctgctggcttgtaccgccttgttatgtgaaaaaaaacccccccccc

SEQ ID NO: 89654 - DNA, 136 bp, Zea mays
  Clone ID: MRT4577_181767C.1
caccattacacgcgtgcctcagtgtgtggttggcgtgtgtgcgacgtagggaggcgtgtggaacgcatgaaacgggcacgtacgccattgacgcgcctctcttcgtccctagaagaataagctaagcctctgttct

SEQ ID NO: 89655 - DNA, 894 bp, Zea mays
  Clone ID: MRT4577_181768C.1
gtgggacacacgagtacacgaccacgagagactggtcggtctgcgactgtctctgaccgctgaccgcactgtcctctgcttctgtctttctctctctcccctgtcccccttccagatttcctccattcgccggtttgcctctctgccttcctgcctgcttccctccctccgtcagatccccgctcgggttgccatggcggaccagctcaccgacgaacagatcgccgagttcaaggaggccttcagcctcttcgacaaggacggcgacggctgcatcaccaccaaggaacttggcactgtgatgcgctcattggggcagaaccctactgaggctgagcttcaggacatgatcaatgaggttgatgctgatggcaatggaaccatcgactttcctgagtttctcaacctgatggcacgcaagatgaaggacaccgactctgaggaggagctcaaggaggccttccgtgtgttcgacaaggaccagaacggcttcatctccgctgctgagcttcgccatgtcatgaccaacctaggcgagaagctgacggacgaggaggtggacgagatgatccgtgaagccgacgtggacggtgatggccagatcaactacgatgagttcgtgaaggtgatgatggccaagtgagatatgcccgccgtttttaagctagttcctctcctgatggtagtaactagtctagttttggagactgactgcttttggttgtgtcttacgcctatccttgcgtcaatggacatatccgtttgttttcaaccaagggattttaccatgtcggtaatttcgctcaaatttggttcttgttgtattacatttgtgttatcttggtacaatgatcatgtctttctctttcaaatttaggtgttcagtttcctggt

SEQ ID NO: 89656 - DNA, 421 bp, Zea mays
  Clone ID: MRT4577_181769C.1
agtgggcgtactagtactaaatttagtgtgttgtctaaacgataactgtccattcagtaaaatagattctcttttacatttctcaaagataagaatttctaattattatctagtatattgaaaggtccccttcaactaccttctattgaaccaccatgctttcaaccttacatcctggaattgcaccgataccactattgtgcaagattaatatgatgaaatagagacagcaatttctaatcctactgatgctgccaacaagtcttaacatctcaccgacaatatatctgacgattataaaactatttacaattataaccaactatatttcaaggaatagttattttattcacccaaaacactcaaatagcgttgaatattttaaacagatggatgagtatgtaaaagttatagataaaac

SEQ ID NO: 89657 - DNA, 165 bp, Zea mays
  Clone ID: MRT4577_18176C.1
gaagcacaccggtcaacccgttgtaactacggatcttgtgttcacgcaatgcgacgatagcgcttcatggtctctagccgtttgaatcatcgtttgtactgccgtaggtggatacttgcttggcccgaagataaaaggtctgaaattcaccttttgtaggacctg

SEQ ID NO: 89658 - DNA, 193 bp, Zea mays
  Clone ID: MRT4577_181770C.1
cttccttttgccggtcccgaataaagagcggcagtgcaagaggtcggtggagggagaagaaagcaatggcggccgaaagcttccttatcacctcggagtccgagaacgagggggaccccaacaagctgtgcgaccaggtgtcggacgccatgcttgacgcaagcctagcgcaggaaccccgacagaaaagggg

SEQ ID NO: 89659 - DNA, 303 bp, Zea mays
  Clone ID: MRT4577_181771C.1
cgtcacgtcattagcccgcacctcatctcagcgcacccgcaccaggccgccttcgtcttcgtcccgttccctccagtccggctacataacccgcgcgccctcccatccgccgctccattccgtcgtcgtcgtcagcagcttctgcttgctctggggggaacgacacacacacagcgacacagatctagtacacacgctagctaggtggtcctcgaacgaacatgcttggcggtgttagcgggcacgtggctcgacgtccggcgctactggtggcggcgggcagccggacgcctgtcgccaaga

SEQ ID NO: 89660 - DNA, 261 bp, Zea mays
  Clone ID: MRT4577_181772C.1
aactactaaaacagagttactcacattcgtgagatatcacttgcttaagtccccaatgttttataaaagaattctaagaagaaattacatcttttcaggaatcaaacagaagtttaattcaggttgtactaaaaaaagaatactttcttatctttttaaaagcaaggaattcagattttggattgaatatttctcaatcttaagatagcatgcaatcagcatttcaaaaactaattacttgtgcttatctgaaatacagat

SEQ ID NO: 89661 - DNA, 449 bp, Zea mays
  Clone ID: MRT4577_181773C.1
tatcgcgaagtcctacgggaagctcaagaagctcaggttcttgggcctctccggcaacaacctcggcggcgcgatcccggccgaactgttcgagatgtccgcattggagcagctcatcattggctctaatgagttcacaggcacgatcccggccgcgattggcaacctcgccaacctccagtatctcgacctggcgatcggcaaactggaaggccccatcccgccggaattcggccggttgtcgtacctcaacaccgtctacctatacaagaacaacattggcggcccgataccaagggagatcggcaacctcacctcctgggtcatgctggacatctccgacaacacgctcaccggcacatttccggtggagctgggggcagctcgccaacctgcagctgctcaccttatgtgcaacaggctcaggggagggatcccggcggcaatcg

SEQ ID NO: 89662 - DNA, 314 bp, Zea mays
  unsure (1)..(314): unsure at all n locations
  Clone ID: MRT4577_181774C.1
cccgggncgacccagcgnccggcnccccaacgcnacnaaggccgcgagcgggggcaagagcggcgagcggagccggagaccgggagaggaaannaagaggcgncgancgggcaaggggngcgacgacaagggcgggngcgccgngccgngccccggcggcaaagacngcaggngcacgncagggagcggcgggggaagaaagcacacnacnngcggcngcggggagcacagccagngcagcccgagcacgngnggccgggccacgacgccgaacggccacgagaacaggagggcnaacagccccagcggggcga

SEQ ID NO: 89663 - DNA, 298 bp, Zea mays
  Clone ID: MRT4577_181775C.1
caattaaaaatttttgggggggggccggcccatttccctttggaaaaaaaaagcctaaaggcttaattttttttttaaagggccccccccccctaaaaaaaattgggggggccggaaaagtctaaccctaaaaaaaaatggcccgggaaatttgttttgccccagggtttattttttacccccggcccttttaaaaaggggataaaggggcccgggggaaaaactaattggcccctccagggaaccttttggggttaaacctcggggggctaaataccctttttaaggggaactaaaa

SEQ ID NO: 89664 - DNA, 137 bp, Zea mays
  unsure (1)..(137): unsure at all n locations
  Clone ID: MRT4577_181776C.1
tgcgcattgtttctcacactaggcttgcanacggggggggcctcaaaatttttttaacgtctaggcaccaccactcgctccctgccttgggactaccaaaaatgtccctccacttccgatactatcacaccttatat

SEQ ID NO: 89665 - DNA, 290 bp, Zea mays
  Clone ID: MRT4577_181777C.1
aaaaaaaaaaagggattaaaaaaaaaaaaaaattttccaaaaaaaaaggctaaaaaaaaaccttaaaaaaataattgaaaaaaatccattcattacagaatcttgcaaccgtggccccttcaacaactaaaaaataggtttcaacagtaacattgaatatggataaagggtaaacgttttaacaatcatcgaagcgagaaaccttataaatacgcccattgaaaataaaaaaaaatttttgtgtttaaaaaaatttaaacgccccgaaaaaaaaattttaaaaaaagaaa

SEQ ID NO: 89666 - DNA, 378 bp, Zea mays
  Clone ID: MRT4577_181778C.1
gagacctctacatgacattttatcttgcttctgcgagaggctcattatcccatgatgaaatgccccaagccgggacggaactgtttatggggtttttgttttacatatataatgccataaacaacttcttgagtgattgggatgcggagggatcaatgtacgctacaaacaccatacgggggagacggacccgcgtgggccttggatacgcttacgttcctgatttgtttgcacaatggaatgcccattatggatgcctcatatgcctaattcacgtgaaacatgcgtgccttattgatgccctacactatatggaagcacgcatactgggctaatgcgaccacaatgtaggatgcacacgtgtgcatgccgaagatg

SEQ ID NO: 89667 - DNA, 493 bp, Zea mays
  Clone ID: MRT4577_181779C.1
ggggggggggggggggttataaaaaatttttttttttttttttttttttttttggaacaaaacactttttcactttttacatttcttgccccacaaccgttttttataggagcatggtactttttttttcctatatcattagcaacacggggggggggggggggtgtttttttgttgccccgctgggggcttctttgagggaaaaacaaaggggggaacatttttaggccataacaaggtctgggagggggagaacatggggagggttctggcgggtctcagggaggggaaagggcaggggcccattatatcaggaagaacgggggggcaaaaggggggccaagttgtttctgcccatgttgaagcccgggggggggggccgattcatcacgttaggagggggcaacagagaggattaccctgggggcataacgtctgacgaaccactcggaggggggggggggggaagcttcaaacatggggggaggaagcc

SEQ ID NO: 89668 - DNA, 557 bp, Zea mays
  Clone ID: MRT4577_18177C.1
gactctagcggattttataaacatgtgtaatcagtgatcacaacatcagctaatacctaagagttccatgcgtcaaattggctccccaagaagcaatccccttttgaatcagtacgtcctcgtttctgatcactcacctgaacatccgtttggcgtgaaaccgatcattcccctctcgacatcgaacacaacaccgaagccttgttgctggacgttgccgagcacgttgaggtcgtcgtccgccgcctgtagcccaaggcagaaatacgtccggcgatccccgcccaccacggggatgaggtagttcgcctgaggcagcgccatgtccgcagcagcggcgaagtgcagcacgatgcttggcacgcgagcaccagttccgggcccgttgccgtggaggtcgtagcacgtgtcgaacacggagaatttattccgtagcctgcgcatccccgccgctgccgcgtgcgacacgaaggtgtcgcgaaccgccgcgtacgcgtccctggcgaaccgtgagatggccgtgccagagtctaccacgacgcccccgcttcccgttg

SEQ ID NO: 89669 - DNA, 994 bp, Zea mays
  Clone ID: MRT4577_181780C.1
gtattgggtacctcgaggccggccggggccatcagattgggagactcactcactcgggagtcgggtcctcctcgactcagctcctccacaaacaaagccaccaccatcccaacccaaacacatcggccgaccacgggcgccgccatgtccaccgctgacgcggcgagcccggccctggcgccggacggggacgcgccggcgggcgaaggcctggccctggcccagttcgccgcgggctgcttctggagcgtggagctggtgtaccagcgcctcccaggcgtggcgcgcacggaggtggggtactcgcagggccaccgccacgcccccacctaccgcgacgtctgcggcaacggcacgggccacgccgaggtggtccgcgtgcactacgaccccaacgcctgcccctacgacgtcctcctcgacgtcttctgggccaagcacaaccccaccacgctcaacagacagggcaacgacgtcgggacgcagtaccggtcgggcatctactactacacggcagagcaggagacgctggcgcgcgagtcgctggcggcgaagcagaaggagtggcaggacgcgatcgtcaccgaggtcctgccggcgcggcggttctaccccgccgaggagtaccaccagcagtacctcgagaagggcgggcagtccgccaagaagggctgcagcgatcccatccgctgctacggctgagggctgaccgacccctcgcccggagcaccgaagacgccgtgaatgaactgcactgcatcgttgcgttatactacctctccaccttcgctctcgaatagttattgcccgctagtttattttataactaaacgacgataaataaaaaagaacggagagaagatattgtaactaaagtgtaagatgacttttttgtgttgtgtatcgtactactgcttgttcagagatctacgttgatacaaatgatgcttgtgctggaataaacgcataaaacccgcatgggtcgtgcagaggc

SEQ ID NO: 89670 - DNA, 322 bp, Zea mays
  Clone ID: MRT4577_181781C.1
gatctttcaggactgcacctgatgccgttggccttgggcttgctcaagacggaataggagggacaccatgctgcctatggaaacttaatcctgctacatcagccaattaatgccatggaattttacatatattagcagctgatatttggttatagattaacgactactagggcgttggaccacacaaaaaccgcaaggattggcgcttctgctgacgccattactgacgctttagccacacccctcgatgtcatgaagacatgatcgatgattcaacgaccttcaaaccaacatcatggatctatcgactggcgacaaacta

SEQ ID NO: 89671 - DNA, 467 bp, Zea mays
  Clone ID: MRT4577_181782C.1
taagctcggaattcggctcgagcgggattgtcaccccctgttttatttgccacatctagctccaccaagaaagaggattcttttttcttaatgctggctttctctcatggcacactacgtttaactcatgacgaagctcaagatgtccacctgaagcctacactgccagcttttgtgcatcaggcggacgcaattcatgctgatcggaaccgcacaaaagctaaggctgaccatctagataagatccagaagcccttcggcttgcctactgaacatgcgcagagagtcagtaagggctttacaactacgaagtaatcgactgcgactgaagcctctgctgctcgatggcagaactgtgtacaggatgtccgaggattgaaggaagcacacttccaactacatagctggatggcggagcccttgacagaaagcatttatagcaccactgctgaagagctccttccttc

SEQ ID NO: 89672 - DNA, 377 bp, Zea mays
  Clone ID: MRT4577_181783C.1
ccaccgcaaacaaattaaaattcacccctggaggggggcccttttggaccccggcaacccattgttttaaaaaaaggggcatgggaaccgcctaacccaggggggttccttcaaaggaattttcacgaaccccagggcccccccaggaaatcccccaacttcccccgaagtttccaactaacaggataggggaattggtcaacaaaacagggaccccccttttaaaaatggaaagggggttagggtttaaaacgttcctgggcccccccctggccaccaggggcttaattggccaagatttgggcgggaacccccttcgggtggtgggggaaaaaaaacgggcgggggaaaaaaatgaggggcgggtcccggggggg

SEQ ID NO: 89673 - DNA, 780 bp, Zea mays
  unsure (1)..(780): unsure at all n locations
  Clone ID: MRT4577_181784C.1
tatttcagatatgtgaacaagaagttcagcaatcagtacaaggctacgatcggcgcggatttcctcaccaaggaggtgcagttcgaggacaggctcttcactctgcaagtaagattggttcccctatccatatgctgtgccgtgctcagcgagtagttcggtttctttacgtcaacttcagtactttattaattagtttgcgaactgatcagccatgatgcttaaaaagtatgagaggatgtttgccgttgaacacttgaatgcttgcttgttaggccatagcatcgtgtttgttgcggccgacacagtctacccaatatgctgttttgtttaggcagttcgcttgcacttgaaatatcgagctccggcactagctcttgttgacaaaatgtcagttcatcaattttattgcttcattaatttactgcattggcaaaacaatgcatttaagtattttggctataaaaggcgcctcctaaattgtaaaaactgtactcttcacaacttatgggcatgtacattattttcattaatagtgaatcatatgttggcgtcccgctgcttactgtcgtgatgttgtttagattagcatagggcattttggacaagtgtgtcattaaccctctttttatacttgaccgtaatcttgatctttgcttaattaactgatcactgtccagataatttcaaaccttctagatatctgttatttttttatgcttcntcatcttgatcgtctctattgcgtacataataaatgtagattcagattaatatgtt

SEQ ID NO: 89674 - DNA, 421 bp, Zea mays
  Clone ID: MRT4577_181785C.1
attcggctcgaggggaactgcaaaggcaacttatttctcagttacagacgattcatcggtcatgacgggcgatctccgttacattcaggaagagggaaatcaatcaatagcggatcttctggagggcctgttctaaagcggttcattcccatggtattggctgcacatggacatcgccctgctaaaggatgctcaggattattgagctttcagggatgcggatctggatcatgaggctggtcttgatactactgctctgcttcgagaagaataaagggacatatagaaaacacgcccaacacattgattgcttgcagcatccagatccgccttacattaaggtgttatcggcaagacgacacgtcctgatgatcgatttctcgggcgtcactattctagcgctgcttatattatgcccttg

SEQ ID NO: 89675 - DNA, 481 bp, Zea mays
  Clone ID: MRT4577_181786C.1
tataaactccaattcctgcttgccagggagaacctacttggagtcctacattcaaatgagttctatgggcactttctgaggttaaaaaaaaaaaaaaaaaaaaaaaaaaaaaaaaaaaaaaaaaaaaaaaaaaaaaaaaaaaaaaaaaaaaaaaaatttttttaaaaaaaaaaaaaaaaacaaaaaaaaaaaaaaaaaaaataaaaaagtttaaactttttttataaaaaaacaaaaaattaaataaaatggagggaaatttataaacattttggttggctgaaaaaaccctaagttaccccctcttttaagccttaaaaaaaaattccctttcaaaaaaaggggggggatcttttgaaacagcccaaacatctcttcccccctcaaaaggggggaaatctttttggtgaggggcacgaaccctttaccggggcattaattttaaaaaagggtaaagagaaaaaaaccgggggaccaaaaa

SEQ ID NO: 89676 - DNA, 309 bp, Zea mays
  Clone ID: MRT4577_181787C.1
gtgcaatggggtacgcgctggtgttctctttgccctgcatcttcctctccatcctgctcggcttcaactgctacttgctcggcaagcacaaggaccagcaggagatgctgaccgccgtccacacccacatctacagaacgcctctgccgccgcccgtcgtcaatagagcctcctcacagacacctgagccgttccacagcaagaaacaatggtccgaggctgtttgactaagatttacacttctctccatacatccattctactactactacatatatgacttggtggtaatcttgaatttatatactt

SEQ ID NO: 89677 - DNA, 693 bp, Zea mays
  Clone ID: MRT4577_181788C.1
attcccaccactcatcggtcttcttcttcctcatccgccattaattgatctagaaaagcttcagctatcagcaaatggagcccatccctcttctcacgccgtacaagatgggccagttcgacctcgcccacagggtggttctggcgccgctgacgagacagcgctcctacggcaacgtgccgcagtcacatgccgccgtgtactactcccagcgcgccaccgccggcggcctgctcatcgccgaggccacaggggtctccgacacggcgcagggctacaacgacaccccggggatctggacggcggagcacgtcgaggcgtggaagcccatcgtcgctgctgtgcaccccaagggcgcgctgttcttctgccagatctggcacgtcggccgggtgtccacgttcgagctgcagccaggcggcgccgcaccgctgtcgagcacggagaagggggtgggcccgcagatgagcttcgatgggcatcgggaggagttctcgccgccgaggaggctgacggtcgaggagatacctgccatcgtcgacgacttcaggaaggccgccaggaacgccatcgacgcgggtttcgacggcgtggagatacacggtgcaaacgggtacatcatcgagcagttcctcaaagatagtgccaacgaccgcatagacgagtatggtggtagccttcgaaaccggtgtc

SEQ ID NO: 89678 - DNA, 240 bp, Zea mays
  Clone ID: MRT4577_181789C.1
cctcctttttaaacataagacacgaaatcatcgtgaccttttttgcaatcaaccggtgacatggcgcaagctgttgtggcgcaggagaagaatttgtggctgatcgatacatatgccaaggaaattcaaagagcaagcgctgcatttctgtctccggggggataacaacaggacaaaaccacggacgtggacgtgctcaactggatggattgggattagggttcggtctgggtttttacc

SEQ ID NO: 89679 - DNA, 297 bp, Zea mays
  Clone ID: MRT4577_18178C.1
ttccctcctttttggaacaaaatcttgccatggggggagtttataaaaacagggtgtcgttcaccgcaggaacatggaaacgtggaaccttggaagacacgagggggacaagcaacctggtagatcaccaaacaagagtaaaggtgcaaagcaaccagcagctgctaaccctacaaaagcctactattactattgaagagcaacgaataacgggcaagtggggacatggtacacaataaacagtttaaacatcgtccaatcggcgatggacgccgcagtaatgtaaaatctggggtc

SEQ ID NO: 89680 - DNA, 207 bp, Zea mays
  Clone ID: MRT4577_181790C.1
atgggctggggcctcctggcagcggcatccgccctgaggtcatcgctgccgctgtttggccccccggagcagaagtcgtcgtcgtcgccgctgccggagcgggcgacggcgcgccgttcgtcggtcttccgttgctccgcaggccccccccccgtcgagtggggttgttcgtgcctgcggaggtggaaccggagttctgttttgtaa

SEQ ID NO: 89681 - DNA, 385 bp, Zea mays
  Clone ID: MRT4577_181791C.1
agagtgcatccaaacaggagggctaatagttgtactccctccgtttctttttattagtcgctggatagtgcaattttgtactatctagcgactaataaaaagaaacggagggagtactattttttagctaaaccttgaactagttattagccaactagctagccaacaccagctactttgagctccacatcccaactagtaactagccttagctcatccaaacaagccctaaaacatgaaattgatgcttactatgggcatttggtgagaattttaggcctgatgggattgcagaaatttgagtgcaaacagcaaagtgtttatctctctgttcagctagcttattggtttcattttcatagtcttcttacgagaactattatat

SEQ ID NO: 89682 - DNA, 209 bp, Zea mays
  Clone ID: MRT4577_181792C.1
tggatctagcataatacactaacctcatggtcggaggcaaagagcgtgcggatcgcgacatggagacaagcgggtggaggaggagagcggctgcgcgatcctaccgaagcctgggcacgtgggaactgtgattttggcgccatgtatgatggttgaatgtcgtgcagaggaattatgacatggcacaagggagattcaattgttagggt

SEQ ID NO: 89683 - DNA, 396 bp, Zea mays
  Clone ID: MRT4577_181793C.1
gggggggccacatttttaaaccttgttgattacaaaaaggtttttattacctttcatccacaaggataaaaatacgggtgggaacaaaatttaaaggggcagcttcccccgcccttttggttttttacccaaccattcccaaacttgaaatttccaaaacaacaaaaacttattgaattaacttaattttaacaaaattagggccaataaaacgcttggagtttttaaattttggaaacacccacccccccaaacaatgtttcctccccccggtttttaataatattggctttttcaaagggttttttttttttttttgttttccgataaattttttgaaagggaacctttttccgattaatatttcaggcgcccaatttttttcgggtgttttcc

SEQ ID NO: 89684 - DNA, 631 bp, Zea mays
  unsure (1)..(631): unsure at all n locations
  Clone ID: MRT4577_181794C.1
gcatgccacanatcccaccttcagttggttggacgaatgcaagactttcaacaagactcagatcagagacaagaacgtgcctaggagcggtaaatgtaagtttttttttttttgcttcgtcttcactgagcaattctattgcagtgaaactgtcatcattatcgttaatctcgactcagttgctttggattgtattgtatgacaactgtgaataaattggtgctatttccagtccttctgaggaccaccaaagcaccagttgtaatatcccaaaggcgccgagtaaccgaagaagagaagtgccttgctctcagaaaggcaatggagttcaagtcgaagcaccctttcaccatgcagataatgatcgagtcttatgtctacgtgggatttttcatgaacatcgcctgcgagttcgtcagggagtcgctcccccgcacgagcaagaagatgacgctctgggacccgctggggaagccgtgggacgtcagctacgtctactacggcgaccgcgccgccggctccttcggtggcggctggggtaggttcgctctggggaacaacctggagaagtccgacgtctgcgtcttcgagctcttcgaggaggacaacatgcgggtgcacatatacaggg

SEQ ID NO: 89685 - DNA, 2338 bp, Zea mays
  Clone ID: MRT4577_181795C.1
ccggccggggatgcaccctaaaatctaactgaaggcatctcctgctgatggatccttacataactccaacactccagcagcccactgtccaacagacccaaagcgggggttcagaccatcgcctttccatccattctcccctgttttcgtgaaaaaaggctggcccctctagcctccagcaaccattccttaaaccccgggagtgtcgtcgtcgggatgtcttagaggctccagaaagaggagaggagagagagagagagagagagagagaggaggaggaggacgaggagtttgtttggacgctgctccaaactccgagaaaggcaggcacagccagtgataactgtcaacagtcagtctatttacagcgtctgctgcctgctggctgctgcctcgccccgcgtgaatcaataatcattgaatccattctaccgctgctcctcctccttgctctgccgagaagccggcgatgaggggccgcaagaggcagcaggtgagcgccagctcggccgccgcgctggtgaaggggagggagagcaccaagcagaaggagaaagaagctaggaaggagaaggaggcgagggagaccggcagggagccggcggcgaaggagaggcagatgaggcgcaaggccgggaaggagaaggagacggagacgggcggagaggggaaggagccagccaaggagaaggaggtcagggaagagggcaaggagaacgacaagcacaaggagaaggcgaagacgaaggccaacgtctgcccgcagttcttcaaggtcttcttccccgagcagtccacggagcggctgagaatcccaaccatgttcaaccagcacctcaaggagcagcagccaaccggagcagtttccctgagaggcccgagcggcaacagatggcaggcagcgctcgcttccgagtccgagtcggaggccgcgtggtgcttcgaccagggctggaaggagtttgtcacggaccactccctcaggctaggccacttcctggtcttcacgcgcgacgggcccgcccagttctccgtggcggtgttctcgtcgtcaggcgtcatcgacccggcagccctggacgcgaggcctaccgcgaacggcggcgcggccgtcaagctcgaagagggcgaaggcgtcggcgtccgaggggacgtggacgcaggcggcgacaccagctccgaggtgtcgcttctgcccgcggaagagggcgatggaggagcgacagggaggagaacaggagcgacgagtggtggcgctggcggcgcctctgagatgtcacttgttcttagagaagagggccgtggagtgacagggaagagagcgagagcgacgacgagtgatctcccggcagatgccagtgcgccaaagaagcactctgccctcgcgaagaaagctggtaaaaggaggcctcaagctgccacttcaaaggatgtgtcgatgattgttcacaatcccaccttcagtttgttagacgaatccaagactttcaacaagactcagatcagagacaagaacgtgcctaggagcggtaaattccttctgaggaccaccaaagcaccagttgtaatatcccaaaggcgccgagtaaccgaagaagagaagtgccttgctctcagaaaggcaatggagttcaagtcgaagcaccctttcaccatgcagataatgatcgagtcttatgtctacgtgggatttttcatgaacatcgcctgcgagttcgtcagggagtcgctcccccgcacgagcaagaagatgacgctctgggacccgatggggaagccgtgggacgtcagctacgtctactacggcgaccgcgccgccggctccttcggtggcggctggggtaggttcgctctggggaacaacctggagaagtccgacgtctgcgtcttcgagctcttcgaggaggacaacatgcgggtgcacatatacagggtcgtcccggagattaccccgctcctgcgcgccagcaacaaggactaggcttgcggctttcctgtcgatctgcggctactagagaataacaagaagaccggttggtcattcacaatgctggaatggaattcggtgctcgttcaagagagagagatgctaataatttcccggaataaataactgactatgaacagaggagtctattagtctatgttcgcttagatttaattcgtaccggtttctactgtttatacaatgtttataaattacagttgcagcagtccaattagctggctttaatcgtgcccatattttggttggaagttggaaccctggtgactggtgtgtttgcttaactgatatcgctgtgaacttgcagacaaaaaaaaaaaaaaaaaagcggcc

SEQ ID NO: 89686 - DNA, 486 bp, Zea mays
  Clone ID: MRT4577_181796C.1
gagtggattgagggggattggagaggattaaatcccttcctagtcaaaattgaatagaaagggattcaatccccctcaatcccctccggtgtgggtgaaaccaaacatacgctcattggtatatgccgatcagaccaagaacattacattaaaaatccaagaatttggttagtattcctggttgggatattagccttttacaaagtacacaaattcatatcattaatgatgagaactcatataagtttccagcttgaataaaattggcaacatatgacatagcaaacagtagttatgcttgtacttgttgagcaggccttatggcatcatgctaatatgtcacaattatagtcttaacaaagttcttagtatctgcagggatatatcagagcactgcagaatcgctggggaaagttaacagcataataatatgccttatattatgataaggtacagctcatagcaagtttcttccatctaaatatt

SEQ ID NO: 89687 - DNA, 686 bp, Zea mays
  Clone ID: MRT4577_181797C.1
ccgggaccaatccgccgcaatgcctacccgtttctcccagacccgcaagcaccgtggccatgtctcggccggtaaaggtcgtgtcggcaagcaccgcaagtctcccggtggtcgcggtatggccggtggtcagcaccaccaccgtaccaacatcgacaagtaccaccctggttacttcggtaaggttggtatgaggtacttccacaagctccagaaccagttctggaagcccgtcatcaacctcgacaagctctggtccctcatccccgctgagcagcgcgagaagtacttggccaacaagtcctccgagaccgcccccgtcctcgacctcctctccttcggctactccaaggtcctcggcaagggtcgcatccctgaggtccccatcattgtccgtgcccgctacttctccaaggacgccgagcgcaagatcaaggaggccggtggtgtcgtccagctcgtcgcataagcgacaggccacgactacgcatgacaaaatcgacttcggaaaaagcctggcgttgggaggcgcatgtgcttgcgaaaagctggcgctgcggaaaacagggaggagtgtgcaaggatacctcattatacccatccttctcttcagcgtggtggctgagagatgtctatgtaaacgaaagttgcgcgtaacgccgactcgaatgcaagcatctctgaac

SEQ ID NO: 89688 - DNA, 527 bp, Zea mays
  Clone ID: MRT4577_181798C.1
ccggtcgggatatcgtcaacgactatgctggaactgcaacgtagatcccgccttttatcgattgacgggtgaagaggtgccgcgagtgtcatacggatgtgattacctcgtaagaaatacctagtatcacgctcgtaaagtgtgctggagtagctgagcagcgactagccgcagcggccgtcgggtactcagaaggtcaccattgcgtggcttgctgcatttgcgtagtatgtgagcagctgcactatgctgctgttatcgcctccgacttcccactatgaatgggctctgcacctctggagccttcaaagcggtgccagagtatggcgtgatccccatcacgggatcggtatgctgttgtggaactttcagaggatgctctgtggggagattgacatcaatcgatggctcagcaccacatgctttggaatttgttgtcaactgaacctgctgacattacactcgagggtggtgcctgtaataggatcgctgctactgctctgcactctgcatttttctttgccaat

SEQ ID NO: 89689 - DNA, 261 bp, Zea mays
  Clone ID: MRT4577_181799C.1
agaagcacgtggtgcaaagcatctccacacagcaggaaaaggagacaattgccaagtgcattgcggacctaaagctgctggcaaagaaggctcaagcacagccagttatgtaaatgtatctatcccaattgagacagctagaaacagttgactgactaaatggaaactagtctatttgacaaagtctttctgtgttggtgtctactgaagttatagtttacccttcctaaaaatgaaaagtttgtttcatatagtgagaga

SEQ ID NO: 89690 - DNA, 383 bp, Zea mays
  Clone ID: MRT4577_18179C.1
agaagttccaagacgagtgggctgtctaaactggttaaattgtggattggtatggtacatgaatgaaatatacatagcttgtagcaacaacacaagcaccctatcttcgcggccttgcgatacctattccttttgcggcagcctacttgccacccttatactgtgcagcatggagatggagattttggctcagagctggcaaagtacgaatagcatggaggatggtcttttttacatcaacaacggtgttgcgttcttgctactctgcgagacgaagttggcgggcggcaagaagctgacgctttcggtttacggtcattttccatgattcagggaatgtgtcgtgaatctttggtttgaggtgtttgacgtcaaggggcaca

SEQ ID NO: 89691 - DNA, 413 bp, Zea mays
  unsure (1)..(413): unsure at all n locations
  Clone ID: MRT4577_1817C.1
ccactaatactaatccctcattcctccctcacacacctaacctagctcaccatttcttctggggctggaggatttgaggagacggtgcngtcttctcacatcctcatcaatcactaaggttccctcctcaaggcctccttgaaggacccttactgccgcatcatcttctccaccactcgcggcgactccgcatcgctcctcctggacctcctcaaccagattctctccggccaggccaacttctcctacctctccgctcggcactcctactgctcgtccgctcgactctgttgggacttatgtaccttttttaggatgcatatgcataaacccttctaggacgccacatattccctcaaggtttgtgagctcagctacatccttgacacttacagttggttcacatcatcctt

SEQ ID NO: 89692 - DNA, 669 bp, Zea mays
  Clone ID: MRT4577_181801C.1
cctcgaggccggccgggccgggattcaaagatgcgctatgcaaactgaagaccatttcctgctctcactgaggtagatagatcaagcgaatgactagcattgccatcaccagcagtggctcccaagggtgcgctcgtccttgacgtgagacgcctgaatgctcgccacacgcgtatgagctgcttaacccatctagttctgtgccaggctgcccacgccatgccgcgcgtcgacctccgtgttcgcacagacacgacgagctgtcccgcatcaacgcgctcaactgcaaggggagctgcaacgcgtgaaggataataccggtcgctctaccccagtacctacaacgatgtccgtcgatggagggaatgtcggaacgtccaccctcattgtgatctctgcaccatgatcaagtcctacgtcctagcaatatgcctgatgctgctccttatactctggttcatcgctcaaatactgtgccagcatttgcccaacagcacttacacttgaccaccacttggcttgtgatgtcttgagagtaccatctcgcgattctatttacgagcatgtcggcctcatgcgatattagcgaataagcttgacgactcaaattctttagctgtaccatctacgtgtgtatttgcgcgaatgtatatgttggattttaatgat

SEQ ID NO: 89693 - DNA, 244 bp, Zea mays
  Clone ID: MRT4577_181802C.1
gggaacaaatttccccaataaataaaaaaaattgtgaacctgggggcttcagccctttcaatggaacagggggggttctgggactatcctggtacaaagggagggggggggagtcaaagcttttttttggagccaggcatttttgaacattggggggctggctctcgtattggccatagggaacagggtgactcatgtaatgcggattggcaaaggggggcatgggaccccgattaggggtata

SEQ ID NO: 89694 - DNA, 260 bp, Zea mays
  Clone ID: MRT4577_181803C.1
cacgaacgggccgtaggggctttttcgggccaatttattttttcaaacctcccaaaaaaaggggatcaacccctttaagggtccaaatgacaaggaaatttggggggggaaaagatccaagcttttattcccaggtgtttaaaaaagggggtggttccccaggtcaacatccctgcggggtggcacaaaaggggcatatgtgggggaaccggccccccccgggggaagagccccaaccccacctgggccaccaggggacc

SEQ ID NO: 89695 - DNA, 786 bp, Zea mays
  unsure (1)..(786): unsure at all n locations
  Clone ID: MRT4577_181804C.1
ngactctccaacccaccaaaatagagcttgcttctcaccaccggcggcgggatgggcggcggcgcggcggacgagggccagaccagcgaggaccctcgcgtagatccgggcatcctcgaccaacggcgccgttcctctcctcgtctgctgccgtcgcgagatggcttccaggaaatggcctcgctgccgatccccgacgagctcgtggcggagatcttcctccggctgcccacgccaggcgacgtcatccgcacctctggcgcctgcgtctccttccgtcgcctcgtcgccggccgccccttcctccggcgcttccgcaagctccacgaccctcccctcctcggcttcctcgctctaaccggagccttcttccccgtactcccgccttctccttccgcgtcggcagccagcgccgtcgccctcgccgccgacttctccttctccttcctacccggccccgctcgggactggaaggtccgggacgcccgcggcggccgcgtcctcctcagcagatctcccttggataattctctggcggtgtgcgaccccttgcaccggcggtaccgcctgcttcccctgatccctgaagttgaggggtgggttcctcattcagtggaaaacccataccgggagtccttcctcggcgacgcggaggagaccgcagaagagacatcattcacagggatctccatcgcgcattggggggataaagataagcagggcgctttcgtcttctcttccagcaccggacaatggcgaagcactccatggattggcagctttgct

SEQ ID NO: 89696 - DNA, 149 bp, Zea mays
  Clone ID: MRT4577_181805C.1
ctgagaatgacattgatcgagctaggctagcggcgtcatctgagactgcagtgaaagatgtcagatagaacaccagcatatctgattcatatggatcatagtcgaatcctgaggatggtagccaagcccttgatttgacaatagaagta

SEQ ID NO: 89697 - DNA, 2039 bp, Zea mays
  Clone ID: MRT4577_181806C.1
ctcaattatctgttgcaggcaaggcatctgttgcttttttcctttataatacaaatccgccttcacttcaattcttactgtactagctcgatctgcataccattttctatttgccatgctgttcagggcttcttactcctgctagtgtactggattgcctaatattatcccctgcatttgtcatggtaatgcatcagatttgaagttcccctctgtcatgaaaatatagctttgaacaagatgtgtttattgcaaatttttcagcttagattccaaagatttgaaacgtcagcacactatgaatgagatttagcagggttgtagctatattgccttcaagtctatactggaaccttaattctttgcatgttgccatattctaccagtaggaaatagggaacacatccatagcttgatgccgttatgttgaattttgataggaaattgtaacattaatgttctattcttcatctcttcaggttacctattgagcaccggtaagctgtattatgccctggtgttgcttgggctaacaattcctcaggtgttctttcaggtatacctgagtgttgttgttgcaccttgtttttttgtgggtgggccagtggggatttttttgtttgttccagatgttttcatgtttgaagcaaagtgccttcctccctgtgtgttactaggttcaaactttttgacctgaggattagctttgtgtaaggctgcagaactgcatatcttttggttaccttcagaaaacagtattgaatatatatctctgcttagaatgaaatattggtactaaggacatctttatccacaatgcataaaggaaacaagaactataccacaaagtggaggagagaagaggggctgccataaagggcctaattcattaacatatccacttctatttttgttctccctatatagactatgataatccaactagtttgaacataggtttggtttgtgttaaataaaacattgcagataagcacatttcttatgtctaacactgcatgtctgaaacatgaacaacgtagcggaggtaacagggttgtctgttactctgtttcattaacactgccacttatgtgtttgtgcattctaatacttattttcctggagcagttccagtacttcctgaaggaccctgtgaagtatgatgtcaaatatcaggtgtgcttcagctggttctcccactctcttactacttccgatccagctccagctcttccctttctaaaggtcttaggtagtgtttggttccggagtatggtgggacacgactcctaatttattgttgtttggattgattccatatatgacagagtgactctaaaaagaaaaaaaatgcttaaatattgaaccatccagctctccaggatcttctggacggagccgttctctgatattgaaccgttccatccaattggctccagaaccaaacactagtcagaacttacaagtaggaaacagcttaaagtaaccctaagggcccgttcggttcttacggaaccgtcgactggaatggttcctagttgaattgtttgcctaatttatataagttttggtcaactggaatgatttctggatgaatccgggacaaacgaacaggcttcatctgatctgatccggacaattttactttgctgataggcaagcgcacaaccattcttcgtactgggcctactggtgacagcactggcaaccagccattaatgaaggcaaacttaaacagaacgagcaaccgttctgataccgaagaggcacgtctggtgaccattaataagctagctgcttgtgtgcagggtaggaagagaacgtctttttacttgtagaacacagatcgattttgtaagggttatgtggtgggaggaaaagttagcaatagcactggatgttgttgtagtaggatctgtagttgcacggtaagatcgttacttcgccattgttagcggttgaactggcaatgctttgaacaaacagttttgtgtatcggccgtattgttgtatgatcaaccctggaagattgtacaacc

SEQ ID NO: 89698 - DNA, 2748 bp, Zea mays
  Clone ID: MRT4577_181807C.1
cggacgcgtgggggcgacatcgatgagtccagccctcgctggttgctgaagcaagaggtcccaaaagttgtcaagtctatcaacaggcagttacgtgaaaaatcaatcaagacaaaggttggggcattttcagtactgaaggagcttgtggttgtattaccagactgtcttgctgatcatttcgggtcacttgttcctgggattgagaaggctttgaatgacaagtcttctacctccaacctgaagattgaagcccttgtattaacaaggcttgttatggcttcacattcaccatctgtgtttcatccatacatcaaggctctttctgcacctatactgtctgctatcagagatagatattataaagtcactgctgaggcttagggggtcggtggagagctagtccgtgtccttcgtccaaatctcgagacaacctcagttgattttaagccatacattggtccaatctataatgcaatactgggacgtttggccaatcaagatcaggatcaggaggtaaaagaatgcgccatatcttgcatgagtttggtggtctctacttttggtgatggtcttgaaagagaattaccagcatgccttcccatactcgttgacaggatgggtaatgaaattacaagacttacagctgtcaaggcattttcagttattgcgaattcacctctacgtattgatctctcgtgtgtcctggatcatgttgtttctgagctcacagctttccttcgcaaggccaacagagctcttaggcaggcgacgttgggaactctaaattctttggttgtcacatatggtggtcagattggctcttcttcgtatgagacaataatcgcggaactttcaaccctcataagtgacatggatttgcatatgaccgctcttgcattggaactttgttgcacaataatggttgacagaaaatctattcaaaacgttggtttagctgttagagataaagttttgcctcaggcccttgttttgatcaggagtgccctgttgcaagggcaggcactgcagggctcttcagaggttttttgcatcacttgttcaatctgcaaatactagctttgatgctttgttggagtcccttatttctgctgctaagccatcacattcaggtagtcttgctaagcaagcactgtcttctattgctaagtgtgttgctgttctatgcttagcagctggtgaccagaagtgtgcatctacaattgaaatgcttaaaggcattttgaaagacgacagcactactaactctgctaaacaacacatggccttattatgtctgggagaaattgggaggaggaaggacctcagcaatcatgttcaaattgagaacatcgtcattgaatcgtttcaatcaccttttgaggagattaagtccgcagcatcctatgcacttggaaacattgctgttggcaacctctccaagtatttaccatttattttggatcagattgacaatcaacagaagaagcaatatctgttgctccattcacttaaagaggtaatcgtgcgacaatctgttgatcatactggccagagtgagctacaggattcaaacattgagaagatattggcattgctcttcaatcactgtgaaagtgaggaggagggagttcggaatgttgttgcagagtgtttaggaaaaatttctctaattgaaccaaaaaaactagtccctgctttggaggtacgcacgtctagcccagcagcaaatacaagagctacggttgctattgctataaaatattcaattgttgaacgacctgagaaaatagatgaaatcatgtactccaagatatctactttcttgatgttgattaaagacagcgataggcatgtgagaagagcagcagttctggctttgagcacagcagcgcacaacaagccaaatttgattaaaggtcttcttccagagatattacctcttctatacgaccaaactgttattaagcaagagttaatcaggacagttgatcttgggcctttcaaacatgttgtagatgatggtcttgaactcaggaaagctgcctttgaatgtgtggatactttattggacagttgtcttgatcaagtgaatccatcgtccttcattgtacctttcctcttgtctggtttaggtgaccattacgacgtgaaaatgccttgccatttgattctatcaaagctagcagacaagtgcccttccgccgtccttgctgtcctggactccatagttgaaccaatcgagaaaactataagccacaaacccaagggggatgcagtgaagcaggaggttgatcggaacgaggacatgatccgcagcgctctcagggcaatatcttctctaagccgcataagcggcagcgactacagcatacggttcaagaatctgatgaacaagataacggccacccccgcgctcgccgagaagtacaactcggtgcgcggcgaatgagacctgggttcttgtacatggtagaggaataggttaaacacccagagttgtcgcgcgctcgtcaatcctgttgccgcttccccgcatggttgctgaggcaaaagtctgtactctgatgatgacggtggttgatttttgactgctggacatagttgtcttgtacaaaatctggtggtaaattcagtagaattgccgccgatacatttacctggtggttctcttgtcgcagttcagtttcagttgacctatgaagcgctgatgcagatcagactaaaaaaagcagccgttcttttttc

SEQ ID NO: 89699 - DNA, 533 bp, Zea mays
  Clone ID: MRT4577_181808C.1
gggggtgttttttttttttttattttttttttttttttttttttttttttttttttttttttttttttttttttttttttttttttttttttttttttttttttttttttttttttttttttttggcccccaaaaacccattttaatgggggggggggggcccctgaaaaaaaggaaaatgctggtcgatcaaacgagccaaaaacgggggaaaaaaaaacccactgagggggggaacaaaacataagggcataagctttggggtacaaaccctacactactacataggccgggccttttacagcgacaaatgcaaagcatggcccaaaacaggggggggggtgatcggatcaaaggggttgaaagattttgagcgtttcgccgatgggcttttcgggctggaactgggtgttgtaaacatactggacaaccccctttttgtccaaaacgtacttttgggcccccggaagggtcccaaacagggccaaggggaccccccattttttgggcacgggggtccccttgtcgataaa

SEQ ID NO: 89700 - DNA, 241 bp, Zea mays
  Clone ID: MRT4577_181809C.1
catactcgtgagcacacatctgatactctctataatagcacccaaacaccgacctctacggggtagatgtaataactctcttgaatgcaacttatcttcccaaaaataaaaactaacaaattagtttccatcttctaagcttcatagacaaaataatggaaattttattacacggattgctcaaaaaatgaataccctctattttatgtgccaatactacattatctaacttaactacccc

SEQ ID NO: 89701 - DNA, 663 bp, Zea mays
  Clone ID: MRT4577_18180C.1
atacgtggtattattcacaaggcgccgccggcgtcttcgcgcgcttctgcctgccgggcgccgccccacgttcgcctgctgcgtatccccagcacggcgatccctctgtctccggtgcttcgtgccttagcaccggaacggtccagcagaactagcagacaatcacgagtgcggactcccgatagcgattacttgccggggcaccgatactccagagcgcaccatgaacagagctcaatcgatccttactatggtgcccaatcaagagcgccaccaacccgcctcgatgccgactccgaccacgaccaaccgcatcaacgtgcagagccggggtccaccgtgcctccacacggacgagatcgacggctcctcctctctcttcggcgacggggacagaggcgactacttcacttccgcggacaaccatcactacagggacgacttgcgcgacgttggcgggcatgacggccccttcgtcgcaggagatggagggctactgcggacgcacaaagactaggagaccacgcgccccacgccagggtgcgtaaggatcaccgaggagatgacggacgccgcatccaagacgctcgtcaccgtgcgccagcacgggtagcagatccaacgcacgcacatgagggtcgacgatcatcgaccaggatctct

SEQ ID NO: 89702 - DNA, 313 bp, Zea mays
  unsure (1)..(313): unsure at all n locations
  Clone ID: MRT4577_181810C.1
gtacatatctcttgagttcaagtctgtgtaaacccactccacagccaccgagcatgatgtattttgtgcagggcgtgccaatggcaaccacatcagcatttctcaccctcaccgtggacatgattcctcagaggttgtctcggccgcactgtgcttgttccttactcctcgcacagtaccaagaataagatcctaaagagaagtctactcagcgctattgatccaatgccagatcccatctaaccacttatcacgctagaaaatctcaaatctcctcctgtaataatgagaaatcntatttccttatcttttg

SEQ ID NO: 89703 - DNA, 685 bp, Zea mays
  Clone ID: MRT4577_181811C.1
ttgggaccctcgaggccggccgggaaccatctcgcggccgccccggcatcagacgatcgactttccctcagcgaatcacagcgcctggccctccattcccatgctcactgccacataatcctccccgacatgcccaagccatacccccaaaaggacaagagcaagacgcaccgtatgtgattgaaccggctctcccaccgcacacccaagggtcaaggatcagcaacaaccacctacgcgtgtctacctcgtccaagatgctccactagctgatgctcgatggcttctcggcggcccccatgactatatagccgccgccgatgcgcgaccccagcctcatatctggaggccatgtaagccgtccgcgcgactgcgatgcctactcccacgtgaggctcactaaccgcttccgcctcgcatatctcccgcgtgcgcgccggtatacttggccaccgccgctaggaacgacggcaccgcaaccccggggccatccccgccagacgaatcgggcatagctcgtgtactacacgaacacgcgcactatcgtgaatgtgcgcactccctgctgactatgacctttatgtattactacctaggaatccggctctagcgcactacagcgatccacatgtgcgagcatgactaacgcatggcaatatctagatcctgcctgctactgttctcc

SEQ ID NO: 89704 - DNA, 357 bp, Zea mays
  Clone ID: MRT4577_181812C.1
tgagggcaatgaccagggcccaggataggggggcatttaagaaccagttggatgtctaggctcaatgccacgtctgtcacatctatccatgtctaatgcacaactggaggatggcaactaccaggactcccgagaggaggcggccattgcataaccaattggatgtcctggcgcaatgacccctctatccatgcatgaccaacaaaccgaggacaaccaggaggatcaggcacactcaacgcagactgcaccatctgcatcgacacctctgttttgaggtgctggggcaggtctacttatgttatgagggatggacggactgcgcccgcttaacagtctggatggatcggccttgct

SEQ ID NO: 89705 - DNA, 111 bp, Zea mays
  Clone ID: MRT4577_181813C.1
ggatttatcacgcctgccgttgggtaaggagcgcctaggaggccacccccttgacgcctggcgggaccattgagccaatggacacgaccccggggcgcgctcgccctatcc

SEQ ID NO: 89706 - DNA, 219 bp, Zea mays
  Clone ID: MRT4577_181815C.1
tagggacggccgcctcctggtggagtaccggttcgtattataaggcgtaccataatagcgtgaagtaatcatcataacagctgcctgcaatcagacgtagtcctctgataagaacgcaaaacataagagcctgcggaatcatatagagtaccacccgagggtactgattgatctgcctgacatcattagttgcgtgctgattgctgacttattacgagg

SEQ ID NO: 89707 - DNA, 230 bp, Zea mays
  unsure (1)..(230): unsure at all n locations
  Clone ID: MRT4577_181816C.1
tgtgatggatatctgncagattcgctcgtgagcagtggtaacaacgcagagtacgcggggtgattttgagtcttgttttaaaaaaaaaaaaaaaaaaaaaaaaaaaaaaaaacagaataaaaaactagtggacaccacacnacacgagcgcggaccaagagagcccgcgcgcggctgtctccctctgtccagtgacatgtggcggggggggggggggcgttttttttttt

SEQ ID NO: 89708 - DNA, 653 bp, Zea mays
  Clone ID: MRT4577_181817C.1
ctccgcctcagtctaaatggtcaccagagcagggattcatgaaataggtgacaaaaaccggagaggaccaaaagtactggcatattaatttcagatttttagtaccacttatgtcattaacattagcaatggtaaattcctcttattttgttaacgtatctctcaacatgcttatttatatttatttgctgcagaacatattaaatctttgcttaattttgaattgttcgctataaattagaacttatatgtgcatatacatgtagtcatgtatcaaatccgccgttcagtcattcagtgctctgttcaagtgtaagtgttcagtacccaatttttaatcatgtttagtattactacatcgtggttcatgatgttcacttggaaaatgatgaccttttttgttctttgataggtggatcctgtttcccaccaagtcaaggtttgtgaattcgggagtgctagaatcttgagcattttgataataccaaaaaatgtcctggtgtaccaaaggagggcatgccaatggctgtgaaagctgaccataggagacctcatgccttgtcttgggagcatatcttgttggctcctattgaaggccagcaggaaaaaaaggctagaacttatgtgcttcagctctcccgcttagtctaaat

SEQ ID NO: 89709 - DNA, 3048 bp, Zea mays
  Clone ID: MRT4577_181818C.1
attttctttactccaccctagtagcagcccaccggagaccagacagcgaggctctcctcgcgccttccgcgtttccgttccgctccaaaacctggtggccttgggctggccgcgcccgcgacatatgcctcctactggcgaaccccatccacacgacacgacactgctcagccgccggcctgggttgacttgactcaggcggggacacgcacacgttcgttcttacgtgcttccgccggcgcgggttggcgtgcagcgcaggtgcagcgcagcgcacaagaggggagggaaaagccaaagaagccaccgcttcccttccgcggcttccacaccacctgagctcggccggtggcggtctgcttccgaccgtccgccggtttgcttgcttcatctgcctccgccgcacctcgcctccgtccagccagccagccagccagcgccaagtcaagcgatccggccgcacccagcctcgacctccccggccgacccgtgagggcggtgtgtttggccttcaacggcctcgactcgcctcgagggcggggctcttccaccacctgcaggccgggagaagaaaaaaaaaggcagcagcttggattcttgctaggggcgcgcggttggtcagctcgagagagaagctgaccgggtttgggcgtcgagatttgggttgacttttgaggtacccggggtatagtctacaatacaggttgcttcttcttgcacgctgctttcttggctctgtggctaccgaccttgctggctttccctcccgaattagcggctgagctccatccagaccttgcaaagattggacctttggggggcggttcgctcactcctagcttgcctcgctggctggtctttgagcttctcgtgctacgagccaagggaggccatcttttcctgctcggttctgtcgtgcaaacgggaaagattgagctgatctgctgctagctggggatcctgcagaggctaccgcgttcttcttgtctggggtgcacagtgcatgggcagtgggtgaactggtagagagcaagatggggaattgcatcgacaccacggcgcgggtggatcacagcatgaacaatgctgcctacccatcaaaagtgaccagcaagacaagtttgtcgtcagtcccttccacaattaagagcaactcaagtcgttcaacactgactcttccatcaatgagagatcgaaatgagcttcctactcctcggacagaaggtgaaatcttgtcatcttctaatttgaaggcattcacgttcaatgatctaaaaaatgcaaccaagaacttccgacccgggacagccttcttggggaaggagggtttgggcatgtctacaaaggttggattgatgagcacacgcttgctccttcaagacctgggagtggtatggttgttgctgtgaagaagcttaaaccggaaggttttcaaggacacaaggaatggctgacagaggttgattaccttggccaacttcaccacaagaatcttgttaagctcattggttattgctcagatggtgacaaccggcttctggtgtatgaatttatgcccaagggaagtttggagaaccatctgtttagaagaggcgctgatcctttgtcatgggcaataaggctcaaagttgccattggagctgctaggggcttgtcatttttacatgatgctgaaaaccaagtcatatatcgtgatttcaaggcatcaaacattcttctcgattcggaattcaacgcaaaactttcagattttggcttggcaaaagccggtccaactggggataaaacccatgtatccacacaagtcatgggtactcatggatatgcagctccagagtacattgcaacaggccgcctctctgcaaaggcagatgtctatagcttcggggtggtgttgcttgaactgctcactggaagaagggctctggataaatcaaaaccaggctttgagcagaacctagttgactgggccagacctcacctgggcgacaagcgcagactgtaccgtatcatggacacgaagctgggaggacagtaccccaaaaagggcgcaaatgccattgcaagcattgcctcgcaatgcatttgcggtgacgccaagctgcggcctccaatgtcgcaggtgctggaagagctggaacagctacaagatgccaaatatggtgcaccatcgccattagtcgacatccggaaagcctcgcacgccgcccccaaatcgcccatgagcagcaccccaaaatcgccgctgagcagcaccccaaaatcgccgatgagagctcaaccggcagcacggccttcgccacggcgctcgcttggagcagcagcacctttggcaggataccgcactgcccaagtgcactagaactttgcccaagtgcactagaactggacttattagcggggccaaggccccctgtaggctgtgtgtttgtgggctcaagctgtgagcactgagcatgttgtagcttttgcttctactgatgtttcggcgatggtgtgtgccacgggaatatgaccatgtcaaccttatgataagttgtcaggcctggttcattattgacctgtgtcgtgactgttccgaaattcactcacctggcatcaatgccttgatctattattgtacgttgcaatggaatctcaatcttaacccccgtggcggcccccccgcaggtgaacacggcgtggtcgtcgtcgtcctctggctcagtagtccccaggtcgcccaggaaggcacagccttttcccaaacgcctgtcgggttcggcctccccgttgccagccccagcaaaaggctccccgctgccggggtcatcgagaagtagtagtaggactgcgcaggtgcactaggcgtgcgacagaaaggatgaaagggagcggctatacgtgtgtgtcactgttgttgtcgtaggcatgtaactgttggtttcattccatgtgtacaagctgtatatttttgctgtattgctcattcagtgaacccttgtttcgcccttcccacccagatgagatgagatggaaaactgctaaaaaaaaaaaaaaaaaaaggat

SEQ ID NO: 89710 - DNA, 1941 bp, Zea mays
  Clone ID: MRT4577_181819C.1
cctcgaggccggccgggatttctttactccaccctagtagcagcccaccggagaccagacagcgaggctctcctcgcgccttccgcgtttccgttccgctccaaaacctggtggccttgggctggccgcgcccgcgacatatgcctcctactggcgaaccccatccacacgacacgacactgctcagccgccggcctgggttgacttgactcaggcggggacacgcacacgttcgttcttacgtgcttccgccggcgcgggttggcgtggcagtcgggctcggccctcagatcctccaaagattggattttggaggagtgcgctgttgtgttggtggcggagcttcctggcgttgactccgaccttgctgttcctagcagctcccacccaagaggcatcgcggcgaccggatcggtcgatgtgtcgccggtagattggccggcgtcagcggagggtggagatggggaactgcatggacaaagcggtgccggtggacaacacctcctatcaatcgaaagcagggagcaaatcaatttcatcgtccaacccttcgacggtcaagactggttcgactcggtcgacatggactgtagcctcatacaaagatagtcgagagcttcctactcctaggacagaaggggaaatcttgtcatcaccaaatttgaaggcattctcgtttggtgatctcagaactgcgtcgaggaacttcagatcagacagtcttcttggggaaggaggatttggctatgtgttcaaaggctggattgatgagcaaactcttgccccttcaaagccaggaagcggtatggttgttgccatcaagaagctaaaaccagaaggttttcagggccacaaggagtggctgacagaggttgactaccttggccaacttcaccaccagaatcttgtcaaactcattggttattgcacagatggtgatcaccgacttctggtgtatgagtacatgcctaaaggaagtttggaaaatcatctattcagacgaggtgcggatcctttatcctggggaacaagactcaaagttgcaattggggctgctaagggtttatcatttctacatgatgctgagaaccaagtcatatatcgtgatttcaaggcatcaaacattcttctcgatcaggaattcaacgcaaaactttcagattttggcttggcaaaagctggtccaactggggataaaacccatgtatccacacaagtcatgggtactcatggatatgcagctccagagtacattgcaacaggttagatatttttccctcgcgtactgatgaaatattggggtagtgttgtgcattactctggtttgtgtcttcagcttttaaagggagatgtcaataatacttcctagtactgcaacaactaaggatacctgatcatttcattttctacctaaagcatatttggggatacagggtataacaaagggctatttgtttaagctaaaagaaatcattgtggggccctgccatcaaataactgtatttatatttatagtcgacatccggaaagcctcgcaccccgcccccaaatcgcccatgagcagccccccaaaatcgccgctgagcagccccccaaaatcgcccatgagagctcaaccggcagcacgtccttcgccacggcgctcgcttggaacagcagcccctttggcaggataccgccctgcccaagtgccctaaaactggacttattagcggggccaaggcccctgtaggctgcgtgtttgtgggttaaaagcagtgagcattgagcagtgttgtaacttttgcttctactaatgtttcagcaatggtgtgtgccccgggaatatgaccatgtcaacctaataataagttgtctggcctggttctttattgacctgtgtcgtaactgttccgaaattccctcatctggtatcaatgtcttgatctaattgtacgaagc

SEQ ID NO: 89711 - DNA, 282 bp, Zea mays
  Clone ID: MRT4577_18181C.1
caggtattttattggtctggcaactgcaaatatacaaatttctgaaaggcatctcctgtttgaaagctagcatagctttatatcccaggtcattaattcagacaaatacacagaacacagagaagtcataagtcacacataggaggctcccaaaccaattaacaatgaaacccaatctctacagctttctattgtttatgctccttatacatattaaataaataaatagcacatctgctatcaaaataataaaaaaataaatttcaagtattacaaagaaaa

SEQ ID NO: 89712 - DNA, 658 bp, Zea mays
  Clone ID: MRT4577_181820C.1
acgaggaaaaccaggaatcaatttccgatgctctgaagcagctgaatgaatttgaaaagaagcatcctaagcctgatgacaccatgctgaagaaggcacatgaagacatgcaaagcagacttgattacctgaggaaacaagctgaaggttatgacgataaggggcctgtaattgacattgttacatggaatgatggtgatgtgtggagggttgctgtcgatacccagacccttgagggtaacaatgatggtggaaaactagcagattttgttcctctgacaaactacaggcttgaacgcaaatatgcaattttcagcaaattggatgcttgctcttttgtagcaaatgtttataatgatgggaaccttgtcagtatagtaactgactgctctccccatgctactcatgtcgcgggcattgcagctgcatttcatccagatgaacctctgctgaatggagttgcacctggagcacaattgatttcctgtaagattggagacactcgcttaggatctatggagacagggacggggctggtgagggccttgatagctgcagtagagcacaaatgtgatctgattaacatgagctatggagagcctacccttcttcctgactatggcagattcattgatctcgacagcaacggaattcgagc

SEQ ID NO: 89713 - DNA, 917 bp, Zea mays
  unsure (1)..(917): unsure at all n locations
  Clone ID: MRT4577_181821C.1
gccggccggggtagcgtgagcgtgcagtgcagcgcacaagacaagaggggagggaaaagccaaagaagccaccgcttcccttccgcggcttccacaccaccttagctcggccggtggcggtctgcttccgaccgtccgccggtttgcttgcttgcttgcttcatctgcctccgccgcacctcgcctccgtccagccagccagccagcgccaagtcaagcgatccggccgcacccagcctcgacctacccggccgacccgtgagggcggtgtgtttgcccttcaacggcctcgcctcgcctcgaggtgtgagctcctccgacatctgctgcggcgccgccgtttctgcaagcagggttatcttcccttctcgccgccaggagtgagtctgtgagtgggtcatcactgggcggggctcttccaccacctgcagggagaagggaaaaaaaagggcagcagcttggattcttgctaggggggcgcggttggtcagctcgagagagaagctgaccgggtttgggcgtcgagatttcgattgacttttgaggtacccggggtatagtctacaatacaggttgcttcttcttgcacgctgctttcttggctctgtggctaccgaccttgctggctttccctcccgaattagcggctgagctccatccagaccttgcaaagattggacctttggggggcggttcgctcactcctagcttgcctcgctggctggtctttgagcttctcgtgctacgagccaagggaggccatcttttcctgctcggttctgtcgtgcaaacgggaaagattgagctgatctgctgctagctggggatcctgcagaggctaccgcgttcttcttgtctggagtgcacagtgcatgggcagtgggtgaactggtanagagcaagatggggaattgcat

SEQ ID NO: 89714 - DNA, 1249 bp, Zea mays
  Clone ID: MRT4577_181822C.1
cccacgcgtccgcttgttaagctcattggttattgctcagatggtgacaaccggcttgtggtgtatgaatttatgcccaagggaagtttggagaaccatctgtttagaagtgtgtgcttcatctctatggctctgctttgttaagacccagtttcttataactttcttgttcattccctttaaccatgcaatatttctcctgtttaggaggtgctgatcctttgtcatgggcaataaggctcaaagttgccattggagctgctaggggcttgtcatttttacatgatgctgaaaaccaagtcatatatcgtgatttcaaggcatcaaacattcttctcgactcagaattcaacgcaaaactttcagattttggcttggcaaaagctggtccaactggggataaaacccatgtatccacacaagtcatgggtactcatggatatgcagctccagagtacattgcaacaggccgcctctctgcaaaggcagatgtctatagcttcggggtggtgttgcttgaactgctcactggaagaagggctctggataaatcaaaaccaggctttgagcagaacctagttgactgggccagacctcacctgggcgacaagcgcagactgtaccgtatcatggacacgaagctgggaggacagtaccccaaaaagggcgcaaatgccattgcaagcattgcctcgcaatgcatttgcggtgacgccaagctgcggcctccaatgtcgcaggtgctggaagagctggaacagctacaagatgccaaatatggtgcaccatcgccattagtcgacatccggaaagcctcgcacgccgcccccaaatcgcccatgagcagcaccccaaaatcgccgctgagcagcaccccaaaatcgccgatgagagctcaaccggcagcacggccttcgccacggcgctcgcttggagcagcagcacctttggcaggataccgcactgcccaagtgcactagaactggacttattagcggggccaaggcccctgtaggctgcgtgtttgtgggttaaaagcagtgagcactgagcagtgttgtaacttttgcttctactgatgtttcagcgatggtgtgtgccacgggaatatgaccatgtcaacctgatgataagttgtctggcctggttcattattgacctgtgtcgtgactgttccgaaattcactcatctggtatcaatgtcttgatctattgtacgttgcaatggaatctcacaattgtatgctgc

SEQ ID NO: 89715 - DNA, 736 bp, Zea mays
  Clone ID: MRT4577_181823C.1
gcctcatttttttttttttttttttttttttctgcaattctgttcatataccgtacggggttgcttcctgctttgatcctttgctagctactcgtactgtaccaccgtgcccagcgagaaaccagagatgaacaagcgattcaattcaatcctagacgagcttgtctcgtagtctaccgtgctgtcaaggctcaatatgaggatcagccaggacagccaaacagcaactgaaagaagcgcacatacgtacgtagccgtttgtttatctttcgaacaaatttacatgtcagattttagcttttgtagcttcagacgagcatccatccaatccatgaacacgaggttccgtagaggagtctcggagctcagtgagaagccgagaacagtagcaggtgttgtcggccacttagcaacctccaaggcacagtcagttgtagacctgccctgcggcactagccacctctgccgcggcttcagagcttagctcggtccccagcagctgaggaacatgatcatccttagcgactcctcggcgccgccgccgccgccgatcttgccggccgccgacaaccgcaacgcgccccgcttcgcggccgaggagcaaggcttggccacctgctccttgagctcgatggcggcgcccagcgtcaccggaatgtacgccttgttcgccaccgcaaacctcatcctcttttttttccctgcgttccgaagaaactacgactctgcctcgtgc

SEQ ID NO: 89716 - DNA, 150 bp, Zea mays
  Clone ID: MRT4577_181824C.1
agctggacgctgagaatgtggtaagtagtgtcatggaagtattgcttaatgacaagtttaagcaatggttgtcatccaaatgtgaacagaatattgatggagaccatttgcttcctaagcaataccgcaatattatacatacggttgcag

SEQ ID NO: 89717 - DNA, 448 bp, Zea mays
  unsure (1)..(448): unsure at all n locations
  Clone ID: MRT4577_181825C.1
gaacatatggttgtgaacaactgcagcatacaaaggctcaagccaaccacagcaatatagcagcaatggcaaccaactaatctccgcctccttaagctgcttgatctgtctgcatgtgctgctaacgcgacattaactcgtcactgctcacaaggtcctatagcttgacttctttccccataccttacatcaatgatagggggagtaggcgaaaacccagctgtggaaccctataggatccaacaaggatgggagcagagcaacatacctttatgacccttgccaaaaaatggacagccctatctttcgtgcacacattgcgacaaaccatgagggcacacaagtttgcagcaactatggctacctgggatcaaccaaagaactttgtgaaacctttctacctactctcaccaaaaaaaaaaaaaaaaaaggcccaacaaggcccaan

SEQ ID NO: 89718 - DNA, 262 bp, Zea mays
  Clone ID: MRT4577_181826C.1
tctttcactcgttcgccaacgcgttcgctcatgggctgtggaaccttacattactgaacgtactgaagatcgcaacctctgtgatcactgtgtaagtacaattagctttcaacaacatgtccgccctattttgcacactgtctggtatatccgaacacatagacaggtccaatgagatgatcgtttaggaggtagtagctctttaataccgatgcggttctatatacatttggtggggatattaggtgctgtgtagatgggg

SEQ ID NO: 89719 - DNA, 377 bp, Zea mays
  unsure (1)..(377): unsure at all n locations
  Clone ID: MRT4577_181827C.1
atccccacgccacccgcgcacgcggganacgcaacctggaggagaggaaaaatctgccgccccgtcacgtgtgatcgcctactttctacgcgtccgcntcgtgtcccccnaaatagtgtcctctggctttcgcttcccttttcccctccctgtcgtgggggggggcggtgtcgcacacacgtaagaaaaagaatgagcgctgccattccattcgagtcttttgcggcaaaggggtggtgcttctcctttcttcagcacgtacctcgnagtggggtgtcacaccaaaggacgcggtgtcaagtggacccgctttcctttggtatgcgacaaaacccaagcgatttgccagaagggaaagttccctaaaaacttgcact

SEQ ID NO: 89720 - DNA, 487 bp, Zea mays
  Clone ID: MRT4577_181828C.1
aacaatgcttacctgattatgggacatattagttgaccagtgaccaaaactgcgaataacatgagttgctatctgacacatagaaattgtagtgatgggacaacaatggtaaagcatatataaaaggcctcaaatgttgggggagagacacacaaggaaataccactccacgcaccaatacaagaagaacagtgtgtcatggaaaatgcctaaggagacagacctctcaggtcttgcagtttcttcttggccctcagctaggcgctgggaccacactctgttattgaggtagttgacaatcgtaggtgtggagcagggcaaagaattgggggaagatcatcttgttctggtgagtactagctagcgagcgcctgtagctagtgatcaatgatttcaacgaaggagagtaagcacgcagtgttatcatagactctttttggatgttatagttcgtaagggtgcctgtgatactccagcaggtgccagg

SEQ ID NO: 89721 - DNA, 175 bp, Zea mays
  Clone ID: MRT4577_181829C.1
tcggttcaaggcgcagcacttttcttatatctgacggctacaacaaaaaaagaccatcgggctgccggtgagggccgtgtcaggcgagcggcctgccactcagacgccatggggcgcggcgacgccgggcacaaccagcaacacaaggctggacgactatggcccttgcccccgt

SEQ ID NO: 89722 - DNA, 287 bp, Zea mays
  unsure (1)..(287): unsure at all n locations
  Clone ID: MRT4577_18182C.1
atgtnttaattnanaaaaatnnnttnntttattattaaaatntaatttttttataaaaattnntntaatggggggggggggggggttttgtgtnaaattgttattnnttnagaggggggagagagataagagnnggaagnataaagtgaaaaaantggggtggttaatgagtgatnaattaaaattaattgggtggggttaattggntggtttnaaggggggaaaaatgtggtggggggggggttaatgaattggaaatgtttgggaagagggggtttgnttattgg

SEQ ID NO: 89723 - DNA, 494 bp, Zea mays
  Clone ID: MRT4577_181830C.1
gccggccgggttccggcgtctaggcggccaacatcaaggtctacgcctactggccggcactcttcgccaagctcctgaagaagcgcaacgtccaggacctcatcctctccgccgcatctagcaggggagctgctccatctgctgctgcctcacctggtgccgacgctgcggctgctgctggcccgaatgacaaggagaagaaggtaaagaccaaggaccagtactgatgaccacatgtccttcaacctgctccactgaagagaccccctcacccattcaccagcaaattttacttgagctgtcaaaaactatcttgccctatgtaaagtctctaggctttagacacaactacccaaaacctgactttttgatatgtgcctatgggatgaactcaaaccatcatatgagggtgaaacctgattctaatttctatcttgatgctgatcagcaaaaggcccctaagaaaaggcccctatgtacaagtacggtctacc

SEQ ID NO: 89724 - DNA, 394 bp, Zea mays
  Clone ID: MRT4577_181831C.1
ccctgctctctgcgtctttggacctgcccagaggctgagacattctctgaccataatgggatgctgctgacccgcaccatgaatggctgctcttctaacgctttgttatgtggctgagtctggatgattgctaaccttgatagatgaccagattaattaaagctctgacattgactttttgctactttggagagggtaactccatcagcgatttgatgatccgttgtgacatacggccgagtactgctcttatgtgactctccttaattgtgaacttgatcttcctccaatatatgtgtcgacgagacagctagcaaacacactgctatgtacctgaggcgggatcactctcatggcgacctgtgcggacgtccagttcactcatgcgtcgata

SEQ ID NO: 89725 - DNA, 543 bp, Zea mays
  Clone ID: MRT4577_181832C.1
attcggctcgagactaaaaccgaggttcctataaagattcatagtataggttttcgacttcgtcttcatttttaattctgaattgttgcattccccacgggtctagagtagtagttagttctattatggtctatatatatttctgtctattgtacatgttcatttcatggttggatttccagctcatttccgaaaaggtggcttaattgggttgcttctcagtttatcttcagttttaattctcggtttatatacaatatatgtgatgttatttgcaaatactcgagtttaggataataaacaaagattcaaaaaaattctctcacttgttattcccgtccttttagtatgaattttaatatatattcacttcattaccattacaatcctcacaatgcacaaacattgtactcacttagacgttatttttgtgattttcacattgtattgtaaattgatttgtattagcttaattcctcatttgttggtttcagagaatttataagagggatcgaaatatgcgtacttgttttatgtaacatt

SEQ ID NO: 89726 - DNA, 1292 bp, Zea mays
  Clone ID: MRT4577_181833C.1
gcacgagcctgtttcctgtctcctaccctcttgcggtcttgccagcgccccctcctcccttcgtctccgccgccgcggactcctcgccggaaccctaaatggaccccggcgccggcgcacactactccgcccgtaccgcggaggaagtcttccgcgatttccgcggccgccgcgcgggcatgatcaaggccctcaccaacgatgtggagaagttctaccagctgtgtgaccccgaaaaggaaaacttgtgcctttatggctaccccaacgaaacatgggaagtaactttgccagcagaggaagttcctccagagatccctgaaccagctttgggtataaactttgctagggatggcatgaatgagaaggattggttagcgctagttgctgtccacagcgattcctggttactagcagttgcattctactttgcagcccggtttgggtttgacaaagaggccagacggcggctcttcaacatgataaataacttgcccacgatatttgaagtagtgactggggttgcaaataaacaaaacaaggagaagggccccaatagtaccagcaaaagcaacaaaacaagttcaaaaatgacatcaagacccgagtctcattccaaggcgacaaaagtggcagtgccccctaaggatgacgatgatgagagcggtgaagagtatgaagaagaggaagagcgtgataacaccttatgtggatcctgtggaacaaatgacggcaaggacgaattctggatctgttgtgatagttgcgagcggtggtaccatgggaagtgtgtcaagatcactcctgcacgtgctgagcacatcaagcactacaaatgcccagattgcaacaacaagagggcaggagcctagcgtcaagccctggtgtgaccctggagtgaagtaagcgtcaaatcattgatgtctgcagatatatgcctacttgtctagcttgtagacttgcttttcatttcgcatgaacgctattgattcactcggttgccctctgcagctcatattgctcgggcttaattgtgtttaatgttttataagcggttgttgttgtagtaccaggcagtcttgcagacatgtgatagacgtttttggactcggcttaactgaccgttctacattgctagtctagtactctagtttcagttgatcgttgccatttgacttttcacaatggcataggtgtttcgatttttgactgaccatgtttaggttttaatcctcaaacctttgatcgattgctttgttcaaagccaatatatgtcccaattatacttctgc

SEQ ID NO: 89727 - DNA, 294 bp, Zea mays
  Clone ID: MRT4577_181834C.1
attgtggacaggcttctacaatagcattaacatcatacgtggtgcaatgaaagggtggtaggttcagcatacataaaagggggcggtgtggagtttttctacatcctccaagaaaaagaaggcccttacaaagaagtcaaggcattacacttgcacaagactaaatgtacgacctatctatgtcgatgtcttgtccgaatgataagacacgcaagatgaggcacctactgcaattggatttttgtccgcaaaactccattgctgtcttggtctatggtgcgatactaatttatg

SEQ ID NO: 89728 - DNA, 1024 bp, Zea mays
  Clone ID: MRT4577_181835C.1
atgagctcccgaatggccggagcagcgctcctgcgccacctaggcccccgcctcttcgcggccgagccggtgaccgggctcgcggcgaggggcgtcatgcccgcggccgcgaggattctccccgcacggatgtccagcacggccgcggaggccgccaaagaagctgccgcgccacaacagcgccaaaagcccgaggccgcggccgcggcgccggaggggcaggacaagaaggccgtcgtcagctactggggcatcgagccgcgaaagctcgtgaaggaggacggcacggagtggaggtggttctgcttcaggccatgggacacgtacagagcggacacgtcgatcgacatgaagaagcaccacgagccgaaggcgctgccggacaagctggcctactggctggtcaagtcgctggtcgtgcccaagcagctcttcttccagcgccggcacgccagccacgcgctgctgctggagacggtggcggccgtgccgggcatggtgggcggcatgctgctccacctgcgctcgctgcgccgcttcgagcacagcggcggctggatccgcgcgctgctggaggaggccgagaacgagcggatgcacctcatgacgttcctggaggtggcgcagcccaagtggtgggagcgcgcgctcgtgctcgccgcgcagggcgtctacttcaacgcctacttcgtcgcctacctcgcctcgcccaagttcgcccaccgcttcgtcggctacctcgaggaggaggccgtgcactcctacacggagtacctcaaggacctcgaggccggcatcatcgacaacacgccggcgccggccatcgctatcgactactggcgcctccccgccgatgccaggctcaaggacgtcgtcgccgtcgtgcgcgccgacgaggcgcaccaccgcgatgtcaatcacttcgcatcggacatccattaccagggcatgaagctgagggacacgcctgcgcctctcggctaccactaattagtcaacgtggcctgctagtttagcaatgtcg

SEQ ID NO: 89729 - DNA, 335 bp, Zea mays
  Clone ID: MRT4577_181836C.1
cggggggggtctttcttttattttttttttttttctttttttcaaacgaacacctgcaaatgcgttaaaaatgacgccccgtttttggggggccctaatcccaatttttccaaatccttatgggcgttttttgattgaaggggacctcacacccctttaaaacggagaaaaaactggggaagggaaacgggacttttgggtcctttctttttttctttgggaacagaccactcccaatatttttcttatagccaccccctgaaaaaagcaaacattgttgactgctcttaaaaacaaaacccttccaattttttattggaaagggggcggaagaa

SEQ ID NO: 89730 - DNA, 1358 bp, Zea mays
  Clone ID: MRT4577_181837C.1
ccctcgaggccggccgggagcttggcgtttgccagcacgcatagcgattgcgactattggcgattgtgtaggtgtagtgtgcctctcgaggaacgagagcctcaagacccgagcgtcttcagatatggaggaggcggcggttgcacggacgaccagcgagacccaggtgggcgacctgccggaggtgtgcctggcgcaggccatcgcgcggacctccccgcgcgacgcctgccgctgcgccgccgtgtccccggccttccgcgtcgccgccgactccgaccaggtctggcgcgccttcctccccgagcagctcgaggcggccgaggaccacttggacagccgccgcgtgtctccgccgtcgcaggcggctcacccagcggcgaccgtgcgcggcctcagcaagaaggacgcctacctcagcctctgcgacgctgccggcgcggtggccgtcgacggcagcgggtgcagggtgtggctggagagggccagcggcgccacgtgctacgcgctgtcggctcgcaggctcagcctgccctgggacgacggcgagttctcctggaggttcacgcaccacccacgctccaggttcgcggaggtggcggagctggtggactgcacgtgcctggacatctacgggagcctgccgctggccgcgctgacgccggcgacggtctacgcggcgttcctggtgtacggcaccgcgccggagggggcctaccgcggcctgagctacccggaccaggagacggccgtggccgtgggcgggcgggtcgtcgcgcgccacgccgtgtgcctccgccccgacgacgccgaggcgcgcaagttcaggggccgcggcgccggggaggaggcgaggaggccgagcctgcgggctgacgggtgggaggagatggagatgggacgcctgcgcacgccgcccgtggaaagcggcggcggcggcggcgacgtctgcgtggtgcaggcgagcttcgaggtgctcggctggtaccccaagcgcggcctcgtcgtcgagggcatcgagttcagggccctccacgatgcttcatgactggttgagagttgagaccgcatgaatatacgttgtaaatgagatgcaaactcgattggtaaattgtaacaatcatttagagtgttcttgataggtaaattcatcggagacatgatctttttccctcgtgtgttttctagagagagagagagagagagagagaaaacccacgtgtcgataatttcggttttgcagtacgtgggcagtctgtccgtgcacgtcgtcgtcgtcgatcgtgcggcggtcttcaagcaattgagcgcgctatccttaccgtgtggaccatgtcaaacgaagggaaccaaaacag

SEQ ID NO: 89731 - DNA, 185 bp, Zea mays
  Clone ID: MRT4577_181838C.1
cccctgacagtaaaacacaaggtaggaccctctagaggaggccgccttgcttgtatgtagcggaggaaagagcagattgttttcttttacccctggaaagccagaccgaatcctggagtggagggggaaaatgcggagggctgtcaaaacgagtggagcccatggattagtagtgaacccccttc

SEQ ID NO: 89732 - DNA, 395 bp, Zea mays
  Clone ID: MRT4577_181839C.1
ccggccgggatagtccgacatgcacccgatgtagagaggtgtgattgtaaccgacgtccttgagtctctacgctaataacatcatgtttaacggggcgtcccttgtcatgatcttcggctgaggggccagctgattctccacaatggacgagatatagcgacgtctccactgacttctacgacaatagcctcaagtgctaggacaaagggtgatatattacgtcggggctcgggtgcagctcccgggcggagagtgcgtgatattgaacgtgaccatgaaaacgatcgacgcctcctgcaagcgagacaacctctgcagcctctagcgacgcgctgagctgcggctgcatactgtttcctcgactgcaaggaacactgtgactgctctggcatat

SEQ ID NO: 89733 - DNA, 369 bp, Zea mays
  unsure (1)..(369): unsure at all n locations
  Clone ID: MRT4577_18183C.1
gagcaagcacgcggaacgcaagcgcacaaaagcgctcgagacgcacacaggcgtccgcagcagcggcggggctggtccagggggagggccaggggcccgccgcgcgcncgcccngnacaaagccgaggaccagacacccacgacggagccggccccgggcgaaccagaaggacaaagaggagaggcaaaacgcaggacacgcagagaggcgaccacaacccacaggcggacaaggagagccacaacgcgagcagcaagaacaggaccgcggaccacaaccaaccgcacaagaacaggaccaacgagccaaaaggaccaaggaaccacaanganaaagaccaccaggnccaccagggcaacacaaacggc

SEQ ID NO: 89734 - DNA, 266 bp, Zea mays
  Clone ID: MRT4577_181840C.1
ggaattcatcgccagcgacgtctccgaccgtcgactccccaaggacatcctcctgcgcgtcggggactacgctagcgcctctcatgaccgcgcaactaaactacatgatatcacactgcaagatgaccattacgctggtacagacctggtccacctgccgcaacggtagtcctgccgatcggttcacgctaagcatgaccatgtgcctcgactacgtacactgggatctcacgtacaatgcactgactaccatgatggcaccagac

SEQ ID NO: 89735 - DNA, 687 bp, Zea mays
  unsure (1)..(687): unsure at all n locations
  Clone ID: MRT4577_181841C.1
ctgtgcggcgctcaggcggctgtccgnacattatactgagtgatgttcccacgctcactcgttctcccctacaagtccggacctctggaggagacaagccatggcgtccacctcctgctggctcatcaacaggacaaccgtccgtgtcgaagcgtcggcgggcgtggccgcagcactgccgcgcagagtacagctgctcagctgcaaagcactacaacaagaacccgccgcggaccagagagaccgctcaggccgagacgtgctcgggctcctcggcgcggtaccacccgcaggcgaagccaaggtggcgcccgccgccgcacaatacggacaacaagccaacgcgtatcgaaagcaccgggcgaacacggagtacatggctcacagccgagatcgtccttacaagctgctagatcccgtctcaagagctagatccgatgagcgaggggccatactgcctgcaacgcagttctcactactacggacagctctcaaatatagcggatgcgcgaaccatgatcgttcatacctatgccaatataaatgtccgcgactactattctcccgacgagttactcacctgctgcgaatatatgctactactacagggctactgtgcgaagatcaactgcgagggcatggtctagaccgactgcatgtgcaccggcatgcttctgaaaagctcca

SEQ ID NO: 89736 - DNA, 119 bp, Zea mays
  Clone ID: MRT4577_181842C.1
cgggcgacccacgcgtccaaacagactacgccaggcactcgtctcagatgtgcatagtgctctcacagacgatctggctcgtctgatagtctcctaccgtgattcccccacttgcgccg

SEQ ID NO: 89737 - DNA, 254 bp, Zea mays
  unsure (1)..(254): unsure at all n locations
  Clone ID: MRT4577_181843C.1
ntttattgcttaagaacgagcgcgagccggtcactgaactcactcgcacttgcacagaaaacaagcgctacatgtggttcgagagtgataatgcaatagctcacactaagatggaatcacgcgaacatgctgcgtccagctgaactggaaggtatttatgcgtatgtattatcgatgcaagctggacatgcaatcaataaatagcaactgggtatagcaagagccaatatttgaaggtttatttggacttgaca

SEQ ID NO: 89738 - DNA, 1694 bp, Zea mays
  Clone ID: MRT4577_181844C.1
agaagggtgaagtcctccaaccaaacctgaaaacggcggcacgcgggtcgactggaaacaatacggacgactagtggcctacgccctgcgggatgctgtgccgcggccgacgccgtccggggctgtggcggtggccgacggcgctgcggcggctgtcccggctggcaccgcctgcgcctgcgcctgccgacccggtggtggttcgcgtcgacgcggagagaagggtgaagtcctccaaccaaacctgaaaacggcggcacgcgggtcgactggaaacaatacgagcgaccgcagggcaggaccctctcccaggaaggaaggtggcgccgcgacgcgtgacggcagtgagctgggtgaagcactatttcgccgacgtgccgcaggaggccgtgcaggctcatttcaacaggagaatggttttttctgagtgctatgaccacaaggtttcagctgacagcattcgaactcagaagcatcatctgaaaaagataaaacataatgatgctatggagcctggaatgaggattcaccttcctgtttcagtggctgagagtgacataaagaagcgttatgagaccattccgactgccacactgcatcctaataaagatgagatcgagtacctgaggaggctagtcatctacagggactctgctatattggtgcttaacaagccccccaaagtgcccatgaaaggacatttgccagtacataacagcatggacgtgcttgctgctgcagcactgtcatatggaagcgaggagggtccaaaattggtccatcgactggacagagaaagcagcggtctgattttgatgggcagaacaaaagaaagctttactcggctgcactggcttctcactagtgtaaacttagctagaacatcttctcagacatggaataaagcctgtgaagcatacgcacagaagtattgggcactagtcattggtactcctaaagaaagggaaggagttatatctgctcctatctcaaaggtactccttgatgacgggaaagccgaacgggtcattctggcacatccttctggcatagatggcgcgcaagaggcaataaccgagtaccgggtgatgggaccaaccattaatgggtgctcatggatcgagctacagccattgactgggcggaagcaccagctccgagtccactgtgctgaagccctaggcactcccattgtcggggattacaaatacggttggtttgtgcaccaaacgtggaagcaaaatccccagcctgacttcgaaccgttcactggagagccatacaagctgaggcggccagaaggcttggagattcagaagggcagtgtcctctcaaaagtccctttactacacctgcattgccgggagatggtcatccccaacattgcaaagttcctgagcagcactggaggatggcacgaaaacggcaccccatgggccaaggagaagcccaacctcctaagattcgtcgcgccaatgcctccgcacatgaaaatcagttggaacatcatgtcttcatacctggtgtaatttctgtattttttttcttccatacttctctagcttctcatgttaaccccaagttccatagagtgatttgtttgttcaagattctgagattgtagccaccatttctgaatcaatgcagaaaactacattttctgaaaaaaaaaaaaaaaaaaaaaaaaagggcgg

SEQ ID NO: 89739 - DNA, 853 bp, Zea mays
  Clone ID: MRT4577_181845C.1
gttatatctgctcctatctcaaaggtactccttgatgacgggaaagccgaacgggtcattctggcacatccttctggcatagatggcgcgcaagaggcaataaccgagtaccgggtgatgggaccaacaattaatgggtgctcatggatcgagctacacccattgactgggcggaagcaccaggtaccctcataatgtttggattttgtttgtgtgaacacaatccaccctctagtatatgcctttcatttgttcttagaaacatggaaaataaattcatgtcatgcttaggaatgggcattttcaactgtaagcatcaacctgttctgtttgctctgggttgcagctccgagtccactgtgctgaagccctaggcactcccattgttggggattacaaatacggttggtttgtgcaccaaacgtggaagcaaaatccccagcctgacttcgaaccgttcactggagagccatacaagctgaggcggccagaaggcttggagattcagaagggcagtgtcctctcaaaagtccctttactacacctgcattgccgggagatggtcatccccaacattgcaaagttcctgagcagcactggaggatggcacgaaaacggcaccccatgggccaaggagaagcccaacctcctaagattcgtcgcgccaatgcctccgcacatgaaaatcagttggaacatcatgtcttcatacctggtgtaatttctgtattttttttcttccatacttctctagcttctcatgttaaccccaagttccatagagtgatttgtttgttcaagattctgagattgtagccaccatttctgaatcaatgcacatctcatcgtctcc

SEQ ID NO: 89740 - DNA, 2062 bp, Zea mays
  Clone ID: MRT4577_181846C.1
ggggcggtccctttttgcaaaccaacacaaacgccgaatcgagtcaatcggcattcggccgtccccagtccaccggaaataattgccttgatcagcaacgatggcgggagatccggccgccggggtcggcggcaacgcccaccccgcgtcggggagcaagagctcccgctcgtcgacgcggcaccgtcagttccgcgaccgagccaaggtccgagtcgacgacctacaagagatgttctgcggcctccaatccgctcgcaaggagagccgctccgccgacgccgctgtcctcgaggagcaggtccaccagatgctccgcgagtggcgtgccgagctcagcgtcccatccccggcttcctctctccagaactcgcaggggaacaaccgggaggcttcggatccaccgtcggatacgctgcgactgctgcagctggcggtgcccgaggaggaggacgatgccagcagtaagctcctggtgcccccttctcgtcagacccacgagcacgggcaggacagcaggatggccaatactgatcagcagtgtgaagctatagatgggggcactgctcctgcgcagcactctctaggtcagggagtggatggagattgtggagaagtgtcttctgttgctaatgcaatgttcaatcatcggatgtactatacagactatgaacttaatattgatgattttctgtgtggtgatggttacaaaataaatatttctggttctaatgaagatcagttcaataatctgcatgggattggccagttgggacatcaacagtttgatttgccattagatttgccacctactcattcatatgctgatgcaaataactctgagcaaaatactggagatgtttttgttcacatgtcagacttgcttacaacaatatggccgtcaccctctcagtatttggggccaaaatgtgcactttgggactgtggtaggccagctggagggacagaagactctggagattactgcaacccttaccatgctggtttggctttgaatgatgatggtcttcttgggataagacctgtgatgcgtccaagaggtattgatttgaaagatgggccactgtttgctgctctcattgcaaaagttcaaggaaagaacgttggtattcctgtgtgtggaggcgctgctacgtctaaatccccatggaatgcacctgaacttttcgatctttctcttctggagggtgaatctcttagagaatggttgttctttgatactccaagaagagcatttgagagtggcaaccggaagcagaggtcattgccggattacggtggtcgtgggtggcatgaatcaaggaagctggtaatgaaagatttcgcaggtctgaagaggtcctattacatggacccacaaccatcaagcagccatgagtggcatcttttcgagtatgagatcaatgcttctgatgccctcgccttgtaccgtcttgagtacaagtcctctgaccccaaaaagggtgctgctaagtcaaaactggctagtccactgaatgaaatccggcagcgaatgggcaggctgactgcagacagccctgtggaaaacaagcggactgctaggagcaagccaaaggctaaccagaaccagaaggataccaatgcaaatacccgtccacatgttaacactcccaatcaagttaatgctccaaatgcttatcagacaacgcagcagggatactcagccgaaggaagcagcttcttttggaacccaagtgacgggacttgaagacgcaggcagcatcatgtagctgctcatgcattgcatggcacttatcaagcaaaaacctctaacatcatcgaccaagttggggctgagtagcttggcccttcacatttctaaattctaaatggttggtttctgcacgggggcctggcaggtcggtgtatttgaattttgaaatgcagaggtattacttgcataaactctgtataatatagccggtgtccaagttgccaatctgaatgtaaattagtctgctgtaccagtaaccagttgctgcttgggtatgttagatttgagtcctaagttctttgagcc

SEQ ID NO: 89741 - DNA, 441 bp, Zea mays
  Clone ID: MRT4577_181847C.1
tggttgcgtgggctcctgctggtgccaaggagcgcggggtggtcgagcctggggccgcggcagaggctgctgctcccgaggagctcgccgcggacaagccagaggctcctgctcctgctggtccacatgagccggcccgcgaggcggaggttgctgctcctgaggagcccgagaaggccagcaagtgaggccgcgcgcaagcagcggccgccagggcccaggggatcggcgtgcgcgcgaggcggcagagacgctcgcgcgcgtacatggcacagtatgacacgggattacgctgttcagtacgctacggttactggcgtctgtgtgtgagagtgtacgacatcgtacgtaggccgggacgtagctagcagtgactgtcacgaggacttgaccagcgcgggctgctagagacacgggctaaataaagagcgcgtcaggtgt

SEQ ID NO: 89742 - DNA, 514 bp, Zea mays
  Clone ID: MRT4577_181848C.1
aatcggcattcggccgtccccagtcaccggaaaaattgccttgatcagcaacgatggcgggagatccggccgccggggtcggcggcaacgcccaccccgcgtcggggagcaagagctcccgctcgtcgacgcggcaccgtcagttccgcgaccgagccaaggtccgagtcgacgacctacaagagatgttctgcggcctccgatccgctcgcaaggagagccgctccgccgacgccgctgtcctcgaggagcaggtccaccagatgctccgcgagtggcgtgccgagctcagcgtcccatccccggcttcctctctccaggcaagtcccccgaaccctagccctccgcccgtcccaccgttcccctttcgtctttcgtgcgcagtagattggtgctgacgggtattcatggtgcggcgcagaactcgcaggggaacaaccgggaggcttcggatccaccgtcggatacgctgcgactgctgcagctggcggtgccccgagaggaggacgatgcc

SEQ ID NO: 89743 - DNA, 1098 bp, Zea mays
  Clone ID: MRT4577_181849C.1
atggtgaccaccggttcgatggtggggagaagcaagccgggctgcggcctctgccccgcccttagcttcaaggatcttcatcatccttgccggggcgggggtcgagttgagccggggcctgcctttgcgtgggctggcgtcccgcttcttcctctagcatctgggggtggaaaccatcctccagctctgcggaggaggcgccctccagccatgcggggaaggcgaactgctgttgcctggccagggtgcagcattccgtcctccgtccgggcgactatggtcggctgcgccggggggtcgcacaacacgttgtacgctgcgagggcggtactcgtgttctgggacggtcctgttctcgttttcgtggcgaggacgggagtgaggacctgccggtgcgctttggggcggccggcgctcgctggtgcggtgatggcgggcaggtggatgccgtcgtcggtgctgaagtggtggcagccggagaaggtttctctgccgacgacaccgtcaacgccacccgcgctccgggcctctagctctttggctttaatggtgacgtgtgaggtatccgtatcccggaggcgtaggagtccctcggctcggtcgaccttgccacccaaggcttctcttgctcagttaaagaaccctcggctgctctgcgatgagccagagccggaggcagcggtgtcagcgtggacaaaggcggagtcggctcgagaagaagcttcgttgacccgggagcatgtggcctccctggccgaggaggtgcagcagcggcggctggaacctggccaggttgtccgctggcgggaccaaccctggagtcaggctgccgaggccatgagccgggctgatgtcctcgggggacagctggctgaggctacggagcggccggtcgaggtgtctgccctggccgggacccttacggagaacttggctatgatggcccgagcttggtgctggcctcctccttcgaggtggagatccttccgcccgcgtcgccgtccgaggccgggccagattcctccgaaggtggagacgacgccgaaggtgctgctgctccctctgctgattctgaacctgcagggagagtttgtctga

SEQ ID NO: 89744 - DNA, 343 bp, Zea mays
  Clone ID: MRT4577_18184C.1
cggacgcgtgggcggacgcgtggctgagcctatccataaactcgtgactaggggcaatcgcgacgaaccactcttcagcttttattccccggcgctaactgtgacaagaattgcatgatctcggcaaaaatgctggtacctcacttgcgcctgacaacaccaatgatttctcagtccttgaaggaatgatagccttagtattcgaaaaccctgctcttcaaaactatatgctgaaacaagcagcagcagcaaggaacatacctttataccccttgctgtcacatcaatcgccagccgtatgtttggtgcagccagttgttcaaaccatcacggcacaacagat

SEQ ID NO: 89745 - DNA, 403 bp, Zea mays
  Clone ID: MRT4577_181850C.1
acttctcaaaaagctgtggcctgtagcttctttcattgtttcaaagcattacaacataagcagcaaaaccagaaacagtcctcataagcagaccaccaaaagcttcttactgaaaaaaggccgccttaggcagaaggtttctccgacttgagtggcttcaccacctcccaggtcaagtcagggctcgtcctgcccaagggccagaagctcgttgttcacacgccatcacctggtgagtcagtgagctgatcaggactcttcagaccgctctggttcgcgatgtctccctactgtaccagaaggttcgtccatcagggcgatgcctttggtagcaaggtttttcctgattccctcagatatctcaaactgcttattcttccttgcgacatttctctgcctcaat

SEQ ID NO: 89746 - DNA, 1152 bp, Zea mays
  Clone ID: MRT4577_181851C.1
cggggcgctgctacgtctaaatcccatggaatgcacctgttcttttcgatctttctcttctggagggtgaatctcttagagaatggttgttctttgatactccaagaagagcatttgagagtggcaaccggaagcagaggtcattgccggattacggtggtcgtgggtggcatgaatcaaggaagctggtaatgaaagatttcgcaggtctgaagaggtcctattacatggacccacaaccatcaagcagccatgagtggcatcttttcgagtatgagatcaatgcttctgatgccctcgccttgtaccgtcttgagtacaagtcctctgaccccaaaaagggtgctgctaagtcaaaactggctagtccactgaatgaaatccggcagcgaatgggcaggctgactgcagacagccctgtggaaaacaagcggactgctaggagcaagccaaaggctaaccagaaccagaaggataccaatgcaaatacccgtccacatgttaacactcccaatcaagttaatgctccaaatgcttatcagacaacgcagcaggtgaaccaaatggcatttctgaatggaaacgttgtttatggacctcaccttccacattctgaaagcgtcgtctatggacctcatcttccacattctgaaaacgttgtctacggacctcatcttccacattctgaaaacgtcgtctatggacctcaccttccacagggatactcagccgaaggaagcagcttcttttggaacccaagtgacgggacttgaagacgcaggcagcatcatgtagctgctcatgcattgcatgggcatggcccttatcaagcaaaaacctctaacatcatcgaccaagttgggactgagtagcttggcccttcacatttctaaattctaaatggttggtttctgcacgggggcctggcaggtcggtgtatttgaattttgaaatgcagaggtattacttgcataaactctgtataatatagccggtgtccaagttgccaatctgaatgtaaattagtctgctgtaccagtaaccagttgctgcttgggtatgttagatttgagtcctaagttctttgaaaaaaaaaaaaaaaaaaaaaaaaaaaaaaaaaaaaaaaacaaaaaaaaaaaaaaaaaagcggcc

SEQ ID NO: 89747 - DNA, 306 bp, Zea mays
  Clone ID: MRT4577_181852C.1
ccatggagactttcccattccttgcagtagcgctgcccctggagcccctcgcccccgacacgctgctcattggggaccggctcctctacgtcaagctcgcccccggggaccgttacgacgtccccaggcgcaccaacctaatcagaacggccgcccgcgtgacgatgacgtacaaggaacgccacaaccaggagcagctcccccatgctaccgctgctgccgctcagcagcggccgccggcgaagaaccctccgctcactcatgcgtctgatcaagaaggacaaaccgacaccctgctccgagcga

SEQ ID NO: 89748 - DNA, 279 bp, Zea mays
  Clone ID: MRT4577_181853C.1
aaaagaagatttcaaacacaattttttggggggttaaaagggtcccccgtttttttaaccaggggtccaagcccaaacccataagcttttcaacttgtcaagcttaaaaagcgcatcaaacacaacggttgcctttttaatggggggtggggggggttgctcctgcttttccagtttggcccacctgtggaaaccctggcttttttcatttccaaaaacggaaacattatcggtggaaagatgggttttccctccgcttaaaatagggggtccggtcac

SEQ ID NO: 89749 - DNA, 307 bp, Zea mays
  Clone ID: MRT4577_181854C.1
tgatcgagctcttcctgcaggtgtattgcagacagggcccgatgcccagagggtgcccatagtagccttggcctctataggacatgctcatctagctggtttcaggagttcctatcagactgagattgggcagaccctggacctcctcacagccccccagggcaatgtggatcttgtcagattcactgaaaagaggtacaaatctattgtcaagtacaagacagctttctactccttctaccttcctatagctgcagccatgtacatggcaggaattgatggcgagaaggagcacgccaatgccaag

SEQ ID NO: 89750 - DNA, 344 bp, Zea mays
  Clone ID: MRT4577_181855C.1
cgacccacgcgctcagcccacgcgttccgcccacgcgatccgcccagcgtcatcagctagatgcgtgaggcggacgcgtggggtagatatttcaacgttaacagtggaataccatgtgaaaacagcactggcaaatcacagtattggaacgatgtacagtggcattaaaaaaaggttacgtccacatacacgcaggaaacatagtaaagttaaacaaaaatgtttagagcattgctatagagctcacaatcttgacatttagtcgcatgaacacggctggatatccgataagctcggtgctgtgctgtacgcaaaaatatcatatgcaacaaggttcacggtca

SEQ ID NO: 89751 - DNA, 474 bp, Zea mays
  Clone ID: MRT4577_181856C.1
ggcacggactcgcacctagctgccaccgcgcgaccgcacacgcgcttcgcacgcgtggcgcgcgcctacgaggaaacaagactagcagtcgatccacccgacgaccgtgagcatgagcgtgatgtccgggctgaatatgagtcctggtcctctgctgcggggagaataacccaggtgcatggacagggttcatccgactacttcgtgacacagacgcgagaacatggacgaagcactacgaagaaggtgactcaatccacacacacgcccgtacgtcaagctgcaccctgatgcgaacccacttacactactgcttgatcaggggctgacacgagtcagtgctgctcaacgcgaccgccggaatccaagctgagagtgacgcgtctcccaacctgacgctgtgcggattcggataatcgaccgatcaaggcactgctcgagaaggaacgccccgcgtggtgtactgcgccgaca

SEQ ID NO: 89752 - DNA, 335 bp, Zea mays
  Clone ID: MRT4577_181857C.1
ggggcgaaaaacggattgcttgacagatatatctccagcactacactaatcgtccaaagcactacgtaccaggatctggcagcacactaacattcacacacaccactatatatttcgttaattaattacaccgatcagcgatgttgactatcaggatgatacacagaatttctgaaaaccctaacctgacactcccactctttctgacagttattacaacagcttaagggaaacgaggcatgaaaccgtcaccttcttcctgctccgagttctgcttcttctgatgagctgaacaactccatggaagcgtatgacgtcgcaagggatccggaaca

SEQ ID NO: 89753 - DNA, 330 bp, Zea mays
  Clone ID: MRT4577_181858C.1
ctatatcatccggcccaacactttcacgctcaggcgctcagctctagcaatggctgggtgcaccatggcgatctcctccacggcgatggccagcaccaccatcaaggtgggctcctccacagagggccgcatcaccatgcgcaagaccgtgggctagcccaaagtggcggcgtccagcacacccttgtactgacccaaccggagaaagtacctgtgcccattatccggcgagccaacgagctacctgaccggcgagtctacacgcgactaccgctgcgacacaccctgactgtcctgcaaccccgataccttctccaagaacacggagct

SEQ ID NO: 89754 - DNA, 333 bp, Zea mays
  Clone ID: MRT4577_181859C.1
aaaaacagcccctatggggattaaaaacaggcgggggggaggctgggggggaagaaaaagggccgaaaaagcgaacaccctaccaactaaacaggatcatttgggggacaacactttaaattacaaactcagagggggccctactagtctacagaatttaaaaaaaaaaacagtttccaaaccctacggagaaaaaaagcccgggtaggcccaacaacaaagaaatttccctggtgacggaaagcactggggcagcccaaagtttcgttcttgaaaaaagaaaacatccttggaaaaggctttcgaaggggttcgtttttaaaaaaaccaagg

SEQ ID NO: 89755 - DNA, 377 bp, Zea mays
  Clone ID: MRT4577_18185C.1
gacgcaaccagtcaccattcagtgcatgcgcacgggcgggccatccatggacatgggggttgtcgagagccagccggagttgacggccgcgccggcgccgggacccggcacgggaagcgggacgcacaggccggggcgggggcgggcgcaagcggaagcacctctcctccatcgccagccacgtgctccggcaatgttctctgacactggacaggagcgtggacgatttggtggcagacttcgagctgggcttaaagactgcagcagtggacagctactcaagaaaactggtcgagttctgcagtctccaggcgctgcagatcatcacgttacgcgatataggtgagaagatcagcgagggctcgctaggtcggttc

SEQ ID NO: 89756 - DNA, 1242 bp, Zea mays
  Clone ID: MRT4577_181860C.1
ctattcttgttgttcattgacctcttcaccgactatttcctcttccactggctcttcttcttgaatttccagttcacctggttcagtttctacttctgcatgataggcttgtcctcggttgacagatatgggttgactctttcctgccgaggcctggccttgtttcattggagctggtgtagtgtaggcagccctgttgggacagtagttggcgtagtgtcccggttgtccacatttgaagcatgccctattggtggatgtgttggaagcaacaggtcctgcggaggtgcttgcttttggaggagcagttggtgcctgttgagtttgttgtccagaactgccactagctggtgtacttggagtggtagtatagcgaggacgggaactacttccagcctgcccttggttagcagcctttcttttctctccaaatatactcctcttgttttctacaacaatagctttgtcaagtagcctttggaaggatgggaatgtgtgcgataccagttgatattgcaagggtccaatcaaaccgtccagaaaaagctcctgcttttgctcatcatcctcaacatctctaggagcatatcgagataactggatgaatttgtccctatattcactcacggacatacttccttgcttgagggagagaaactcctttctcttaatcttcatgagtccagcaggaatatggtaattcctgaattgtgtggagaattctgcccaggtaattgtatcgacagcagcatgagcagcgcagtacgcatcccaccaatctgcagcaggaccagcgagacgacctgatgcgtagagtactttctctcggtccgagcactgagctatgttgagcatcttctctatagactttagccagtcatcagcttgtagtggatccgtggagttggagaaggttggtggtttgtggctcatgaattcccgatgcttatctcggggtggaactggtggtggaggtggaggcaatggcacctgttgctgttgctgctgttgttgaagttgttgttgcagctgctgttgttgcacccttctctcctggcgtatctcttcccgctcttggtgcatctcccgacgtgcatcctctctttcctggcgcatttcctggcgttcttgctgcatttgggcgcgcatatctgccatagtgtcagccatttgctgcatcatcctcatttgagctgcaatcagtgggtcaactccgcctggtggaggattaggaggattcat

SEQ ID NO: 89757 - DNA, 636 bp, Zea mays
  Clone ID: MRT4577_181861C.1
ggatcaataacattggggttggttccatattcacaaggaccaatttttgtttttggtgttctacatgaaatgatttgaatatggatgtttgcttaaactaggaatatgcaactggcaaaggaaacaacacatattactcctagacgtaacatacaagctatcataacaagccataactaccagggagctacttatccttaaaactcatctaaccattcacaacttgctaaacaatttcatcctttactaaaacatcaggggctttaactaccgaaagggaaaacttttttcctttattgagcaataattaatttgttaagcaaattttgtccaaacagctccaaattttatccaacgggtcacaagctcaacaaaatcttacaaaaattttcctcaaaatttttagggctctattggtattactaaaaattcagttaagcattttaaggcaccttttattcctttaaaaatatctatttgctaaaaaaattccaaaaatgtatctatcaaaaagcccttgattttaaacacctactaaagggggttctacaaatttaccatttttctttgatttctgaactaatttacaactttttcggggaaagaaaaggcaaaaaggctgaatagtcctggccc

SEQ ID NO: 89758 - DNA, 446 bp, Zea mays
  unsure (1)..(446): unsure at all n locations
  Clone ID: MRT4577_181862C.1
gcctccctttttttttttttttagaaaagtagctttcgttatggggtgggaaaccaaaaacatcaaacaaaaaactttattattgaactataactcataacaaactaaaaaaagcaccacccttattgcctcttgatacaaccaccattacttcccttttctaccaacactcatccncctaaattctggggatgttggggggaaacaactaccctactctnccctctcctccactaatcaattctctttatcaccactttctcccaccaccctactttacccttaaaaccaacattcctttttacacatatcccttcacaccatttcattctcacaccaccaccaattcttaccacttctacaccctttctttccttntcaacccctcctcctttttccattaccccctcctttcttccaaccctttctctcttattaacctcttc

SEQ ID NO: 89759 - DNA, 904 bp, Zea mays
  Clone ID: MRT4577_181863C.1
cattgggtacctcgaggccggccgggatcctatcatcacctcttcacaccaccaaccatctttttaagcttactaactgcataagatagacattccctggtcggatataataattcttttaatttgcacccttatcttcaaccctcaaacaactctcccaatcatcaagatgcagtccagcttgttcttttacgttcttgtcgcatgcagcggtgtcatggccctccctactagccctccccaactcgaagcccgatctgaggctcatcacaacccagatagttacgaatcttacaatcaagcgagcccctcttactcgccgcctccttcgaccgattaccaaccggcctctccgcacgctaccgccccatcgcctcctcctcgtaccatcccatcgcctcctccacgcgtcgcctctccatcgcccccttcgcccgctacctctccattgcctcttccgcacgctacctctccatcgtcccccccgcacgctaacaccccatcgcctccttcgcacgttacccatccgtcgccttctccgcagggtattacaccatcccctcctccgcacgttaataccccatccccttctctgcacgttaacaccccatcgcctcctccgcacgttaacaccccatcgcctcctccgcgcgtcatcactccatcgcctcctccgcgcaccacaggcccattgccctctttgcaccctactattccgtctgccccaccgcgcggtaccatccaagctgagacgtctcgccccggtggacggggcggccttgttggtgccacagaagtcggcaccggcggccttcctatcgttggcgtagcaggaggcgttaacgccaatatcggtgccaccgttcccgctgtcgctgttggccacttgggcgttggtgctggt

SEQ ID NO: 89760 - DNA, 182 bp, Zea mays
  Clone ID: MRT4577_181864C.1
ctgagacgcgcattatgccctaactcagaggatatcccgaaacgcttaatctgcccactatatgaaagtgcattctgcttgcggtagacggagcgtacttaattcccatttccgcttactaagtagtaagcgaagacgaaatgtcctgtctatagctggctattaggcttaggtggcttaca

SEQ ID NO: 89761 - DNA, 305 bp, Zea mays
  Clone ID: MRT4577_181865C.1
atgtagtgttataagccacaatacaagtcactacgatggtgtgaggaacagaaagtttacaatgtcgcggcattggccaattcttactctttttacatgaggaacatatgatgactattttgccgcaccacatgccaataccaatatccgttttgcgctggtcatcggcacctttgggatctatctatttcgccacgatgtcaagaaacaccgttactaccactctttggacctctaccagtttatgcccacatgatccgttcacggtcagaaactggaccaactttaccaagcactggtgctgt

SEQ ID NO: 89762 - DNA, 653 bp, Zea mays
  unsure (1)..(653): unsure at all n locations
  Clone ID: MRT4577_181866C.1
tgaacctttcagttcccgacatctgtcgttcctgaaattcggggtacaccagggatttttacattcaaccttacttggaatgacattagcgatagttctttgaaacccaagatatctagcccattgagtacctactatcttgtaagaaacccgagatacacaaatactgggaagtttgtcaagttctcagactttctggaatatgaatgccgcatttatggcgaagtcattaggatttgatgttctcgagtccctaaccactgccttaaatgatgctggctataataatcaaactaccaaggaagtcatgatccagtcaacagatagcgctgttcttgtgaaattgaagcagcagaaagcaaaatacaagcttgtttacactctccagccaggcattggggatgcttctgcttcctcactagcagatggtaaggagtttgccgaggctgtagntgtccacaggagntctttctttgcacaangtgtgcactttatcatcaaccaanccagccttttgacagatctgcagtccgcgggactaccggtatatgcgnaggtgttccggaacgagttgtatcacaatcttgggacttcttcggagatgaaacagtggaaattaataactatgccccagngcctaatggcgatggctt

SEQ ID NO: 89763 - DNA, 877 bp, Zea mays
  Clone ID: MRT4577_181867C.1
ctcgaggccggccgggatcccgtcttctctcctgccggtgtcaatcaaggtgtacggtagcagccgtttgcttgctccacgtcagccgtcgatcgagctacaaacccaccaagaacctcaagaatctgcccacgatgggtctcttcaacaagaggaacacggctgcgcccgccgatacaactactgctactggcactccccagcaccgcgagaagaagggcatcttcgccagcaaaggccagcatggcagtgcacgagcttggaactcgcgtcctacctttggcgcatggatcaaggccaccgcccttgacatcgtgaccatggctgttctgggagctattggactaggtgtctacttcgctgacccagcaccaagccgcagctttcctgtcaccttcagagatggagagatcgtctaccccgagttcgcctaccctcttcgcaatgagattgttcccatctgggcggctgcgctcatggccttcttcatccccttcgctgtcttccttatctgccagatcagggtccgctcgttctgggatgtcaacaacgccaccattggtctgctctactctctgatcgtggctgccgtcttccaggtcttcatcaagtggctcattggtggttttcgtcctcactttcttgctgtctgtaagcctgtgatccccgccaacctcgccttcgacaccgacaccttcgagtccgctggccctactggcaccaatgtcgcgaacggctaccgctctatcatgttcgaccgtagcatctgcaccggcgacaagaaggagatcaacgattcgctcgagtccatgccctctggtcacaccactgctgcctttgctggcttcgtcttcctgtatctctacctcacgctaag

SEQ ID NO: 89764 - DNA, 330 bp, Zea mays
  Clone ID: MRT4577_181868C.1
gcatgtctccttctgcaatgcatgccgtgggcagagcagacggtgcctcccaatggtcacggcagtggtgcccaagtcgagaagagcgtgccgaaccccgtcgacctaaccactgagcgaaaggaggattgtgactggaaagtcactctcaggggcagagggatctctatcactggcgcaaacagaggcattgaactgtcacttccaagggcgagcctcggaacccacgcgacatagatatattcgctcgagctctgtgaacccggagaggatttccaggcgcttcaaaaggccacgccgaagcgagagcactacctgggctgcgatgcc

SEQ ID NO: 89765 - DNA, 300 bp, Zea mays
  Clone ID: MRT4577_181869C.1
atgcgcgtcggtcgcgtctgtctcgtttcgtccgtctctctctcagcagccatggcgcctagggtttgcgccaccagcgccagccatcgccgctcactccatttgtaggaaacatgtccccattccgagatccattgctgccctccatccccacgcgcccatgaatcaggagtggtcgttctcagccatttacaaccgcgttttaggagccgtatttcgagatcgtatagcgaagaatcgctcgttctcagccacagatcaggagtgatcgttctcagccacggtgcacggatgtagagt

SEQ ID NO: 89766 - DNA, 679 bp, Zea mays
  unsure (1)..(679): unsure at all n locations
  Clone ID: MRT4577_18186C.1
cattgggtacctcgaggccggccgggactgctgtcagcaatagcaaacattcctcatacagacacaacacgctacattcgatccatcgcgtcgtccctctggagaacagagcaaccttttgatcacctctataaccccacagcaataactcacttcaatcatgccttctctcccattcaccgccacctcatccccgtctctcaaacccactcccagccctccatcgatcatcctccatcccgccgagagcacttcgagatcatcctcgatatcttcgacgacttcctcttcgacatcgtcgtcaccgacccgtcaactgttccagtctacggaggacaagcaggccacctatcggaaacggtacgcgcagtatcttgctgcgacctttaacatgagtctcgaagctgccctggccgaggcagaacatcagcttgccccgagacgctcgtcggtcgtttcggaagcggagatgaatcgtgtcagtgttagttgatcacgttgaatgggagggagtaacaggcgttcttgtggcatacgatggaaaaggaaatccatttgctccgtgcatggcgacaaggcaacatcatatgcatatgggtcatggcgttgaattgtcataactttatgaatcanaatgagaagcattctattcttgaaaaaaaaaaaaaaaaaagcggcc

SEQ ID NO: 89767 - DNA, 562 bp, Zea mays
  Clone ID: MRT4577_181870C.1
atttctagattctaaaaaaaaaaaaaaaaaaaaaaaaaaaaaaaaaaaaaaaaaaaaaaaaaaaaaaaaaaaaaaaaaaaaaaaaaaaaaaaaaaaaaaaaaaaatttaaaaaaaaattaaaaaaaaaaaaaaaaaaaaaaaaaaggtttttccctgccccggggggccctttaaaggggcaatttttggggttttccttcaccctggggggcgttggaccttgcttttagggggcccatttccccctttaggggggggttttacatttcattggccggggtttaacaccgtggggccgggaaaaaccctgggtttccccaatttattccctttgcagaaattccccttttccccagttgggtttttatcaaaaaggcccgcacggttcccctttccaaaaatttgcccaccctatttggcaattggcccccccctgtaggggccctttaagcccgggggggggggggtttccccccagggggcccgttccctttgccagcgccttagcgcccgttcttttcgtttttttcctttcttttttcccccctttcgcggtttttc

SEQ ID NO: 89768 - DNA, 326 bp, Zea mays
  Clone ID: MRT4577_181871C.1
gccctgtttgctcatttccagatctctagctggatgaatggggacaaacactgcctccccatacttttgcactcaaatggccctaatgcaggagatcaagaacctttccccatgggttcaaacatcctatccaggtctgggagatcccagacttctcttggtgaagaaaatcaccatgacatccagacagtgttgaccaactgtgacaactcaattccaacggatcttacaatttaggatccaccaagggtactgagtagctgaactgcagcttgctgaattgttaaccacaaacgcccaagttatcacttgttgcagacctattt

SEQ ID NO: 89769 - DNA, 702 bp, Zea mays
  Clone ID: MRT4577_181872C.1
ttttttttttttttttttgtcggagaaaaagacatataattttctactgaagtactgcacaactatttacgttcacaactatattgtagcccaagaacttgacaatcatatgagcgccaggagatacacacagcccagaggaggagaaatataagcaacattcaaaaacaatccgataaataaaaataacaatataatctgtagagccagaggctgcttcgagtgggttaagccttggagaggagcatgacgacctgtttttcgtcgacatgcgcggcggtttcagagcccttagcttgctcattggcctggccacaggttttcaagatctcctgcacggctttctggagagtttgatccggaaggtttttggcaacgaccttgtctttggcattgaccagggacaacttgcaatttccgctgctagctgagtggacattcttctcgcgcaaagtgtcggctgccttggcgcattccgacttggaaaaaacttcagtcacgcccttatcattgatgcagctaaccttgtcggcttcctcacgacgaaagagatgttcggcatcgaggcgggtagcgcggcggttgacgctgtgcgactcggcttcggtggccttcgcgaagtagaggctgtagtaagaagggaagaaggcccccccgtagcaaccgccgaggtagccggcccagttgttgatccacggaaca

SEQ ID NO: 89770 - DNA, 365 bp, Zea mays
  Clone ID: MRT4577_181873C.1
cccacgcgtgcgccgacgcgtgcgctgtctaatactgccatgtgaccgacacgcacttcactcgtatttcgttagagcagagagccagcagcaaaccacaccagctttactgacgctcggatgagcagtgcaacattatgcattgaactcgtgtgcagggggacgactaacgttcacagttgtgagattggacatgatacccatcttgcagtccactcaccagctgggcacggtcatctagcatgctctactgtattgacgggcggctgattgagaggctcctgaattacgttcacacggtgaacatggtagcgttcatgaatctgtcgctgcaagacaagctcatcgctggtcatgggaggagc

SEQ ID NO: 89771 - DNA, 460 bp, Zea mays
  Clone ID: MRT4577_181874C.1
cccacgcgtccgcaccagtttctttaccacggttctgtcggcaacgtcctgagtccgcaccagtttctttaccagggttgtgtcggcaacgtcctggagagctcgatatatatatcggaggggaaggtgaagcaagacatggttgtacggctgaggaacgtagagagcggggaaatagagctccagcttcagtgggtcgacctccctggctctaagggtgtatgagggggggcggctatgagctctgccttgccctgctgttttcgcggatccccaactcttttctacttgaaaagaagaactagtggtttgcgttggcgtttagtaaaatatcgtcagggagatgtatgtgcatgaacatctgaaaatcaagactataaaaatgtgtacaatgcgtgtactaagttcgtttcgtagacatgctcctcatccaagttaaatcaatttctaggattgtctt

SEQ ID NO: 89772 - DNA, 1588 bp, Zea mays
  unsure (1)..(1588): unsure at all n locations
  Clone ID: MRT4577_181876C.1
gccggccgggtcgcgacacctcgactcacctccggtccaccaacctctgccggccatggcggctgcggcggcgcagaagctcctcgaggcgagcacgaagatcatcggcgtcgggcgcaactacatcgcccacgccgaggagctcggcaacccgatccccaaggagcccgtactattcctgaagccgacctcgtcgttcctccacgctggcgtggccaccgccgccgtcgagatcccggagccgctcgaatcgctacaccacgaagtcgagctcgccgtcgtcatctcccggcgtgggcgtgacattcctgaagcgtccgccatggacttcctcggaggctatgcacttgctttgagcttttccaaccactacggcagggcagggcaggggagggcagtagagatacggcgtctcctctcctacagtttctgacttggccagcgcaacggcagctagttcaattgaactagagcgctttatagatagaaaagaatatatatactgtagaatagaaccacagaaatccatcgagaaacaaccgagaagacctgcggctgcggtgaagagagaactcagtggtgaagaagaagggaaaaatcaccatgctggaccatctcgtcgggctgctgaagctgcgcgtggtgaggggggtgaacctcgccgtccgcgacctccgatccagcgatccctacgtcgtcgttcgcatcggcaaacagaaattgaagacacgggtggtaaagaagagtgtcaatccggaatgggacgaagaactcaccctctctatcgaagaccctgctgttcctattagactggaagtttttgacaaggacactttcgtcgatgatacaatgggtaatgcagaggtggacatccgcccattagtcgagattgtgaagatgaaactccaggacgttgccgacagaaccgtggtaaagaaactggtgcccaacagacagaactgcctagccgaggagagctcgatatatatatcggaggggaaggtgaagcaagacatggttgtacggctgaggaacgtagagagcggggaaatagagctccagcttcagtggatcgacctccctggctctaagggtgtatgagtggggggcggctatgagctctgccttgccctgctgttttcgcggatctccaactctttttctacttgaaaagaagaactagtggtttgcgtgcgctcgctcgcgtagagctgtcagttgtatgtaagaagttatgattgcgttggcgtttagtaaaatatcgtcagggagatgtatgtgcatgaacatctgagaatcaagactataaaaatgtgtacaatgcatgtactaaaggagtgtttggtttctatagattaatttttagtccctaaaaagcaaaaaaaaaaaaaaaaaaagacatggttgtacggctgaggaacgtagagagcggggaaatagagctccagcttcagtgggtcgacctccctggctctaagggtgtatgagggggggcggctatgagctctgccttgccctgctgatttcgcggatccccaactcttttctacttgaaaagaanannnnnnnnnaannannaaaaaagtac

SEQ ID NO: 89773 - DNA, 248 bp, Zea mays
  unsure (1)..(248): unsure at all n locations
  Clone ID: MRT4577_181877C.1
ctctaaaaccccgccgtgggtgttggttttttcataaaaaaaacctagccggggattctcaacaaataaatctccatacataataaactcacaaaacgactaactaatttatcttatcatcaaacactggatacaaatacaactcccaaccatcaaaantnacccacttgaggggggtgaggggggcaactaaacaccaaccctcacaccatnccatccttacatctctccacaaccaccccaacccc

SEQ ID NO: 89774 - DNA, 1360 bp, Zea mays
  Clone ID: MRT4577_181878C.1
tcccctcgagccgggggtctgccgggaccgggaaccctcccaccctcgtcgtccgcctccagagaagcagaaaatcgtgtcccgagtccgccgccctacgcctagtcgcctactgctcctcccaccaccaccaaacaaacaccacaccgcgcgccacgcctccgtctgccggcggtgaccgagccagctcatcagcggccaaggagcgggatgccggggccaggagcgcacctgctgtacgctctgtcgggcggtgcggcgctgtctcggctcgccggcccggaccgccgcttcgggccgcaccactgcgccgtctacgcagcgaacgcgttcctcggcccggacctcggctccttcgccgagtggctctgctccttcctcccctcggcctccgccgcgggggacctcgccatggccgccgtgcaccaccccttctactacccgctcctcctcggcctcccgctcgcctgggcctacgcctggctctcccgccgtctgcttcgcgccggcgtcctcgactctccctccggggtaccattaagaaagaggcagtgtttcttgctgatctctgccggctcgctctcccactttttcttggatcacttgtttgaggagaatgggcattctacaatgtacacttggatactgagcactggttggtggaaaggtcgtgctcctatcaatccagatgcagtgctcgtcgtaggacttctttgcacttgcctcatggggggatttgtgtacatcaacagagtgaatcgaaggtctgcagcagaaaaatcaaaccaatctttctttctcattctgatgatagccaccctgtactgtatgtggtgtgccagtcagatatacctgcggcaaccccctcaacctgccataggtgaagaagctgatctcggagtgataatatttcttgcgatttatctttttctcccacatggcctgtgcttcctttcgatgaatcaaaaggattatacagatgcactgaatgaattgccacttcaataatgtgtgtcgttattattcatttttcttccaatctgtgcagaatatcagtttggtaacagtctggtttctgcattatgttgtaattagatttagttactacctggatgattactagtgcacttatgtatagccctgtaattctggaagtatatattattgtggaacaaagttgtatggatggtgctgacaaaaaaaaaaaaaaaatttgccctttttcattggtcgcagaggtggatcatatggatttgtattcaaggcacacatgactatatttttcattcggcactagttggtgtatgctataaagtgatgatgtctgtcaagctacaaaaaaaaaaaaaaaaaagcggcc

SEQ ID NO: 89775 - DNA, 373 bp, Zea mays
  Clone ID: MRT4577_181879C.1
caatcatggaatttgcagcatgtgagaaacgcggagataagatttgatgcatcattagtatatcaatataaaaatgaacctgctttttgttagtaagctgagggatgaccatgtaacggctcaactagtttgaaatttagattcatatttgactgaataaagaggtagatccttccatgttctacattttagtaaatatcatttcaattattttgctcaacacattgttattaaaacggcgtttaaacgacaaaacatggttagagtttgaaccgtcaagtcgttttagcaaaaacacgtagaacgtccgtgtatcacgtttaaacgtcgcttaaacagcgttttctcgttttcggacgttctatgcgtgttc

SEQ ID NO: 89776 - DNA, 460 bp, Zea mays
  unsure (1)..(460): unsure at all n locations
  Clone ID: MRT4577_18187C.1
ggtgaagcatcatttccatcaccttatggttgggataaccctgaatttctacctgatgctattggatgggaaggagtaaagccagggaagggaacaaaagaaatgaaaccaaaagaaatagatcttcaatcaatgaatccagcaagtcaggatgaagaaaaacaattgatgcacttaaagcttatggggtggcgccactttcctgtgaatatagacaggttatcacatgttcgagttcttctcttgggtgctggaactcttggatgcgaagttgctcgccttcttatgacctggggtgtacggaaactaacggttgttgatagtggtatngttgttatgtctgaccttgccaagcaatcactctacatagataaggattgtggaggtccaagagtatctgcaataactccacatctgaaaaaaagatgtcctgcaatggaggttgaaagcattccactgg

SEQ ID NO: 89777 - DNA, 266 bp, Zea mays
  Clone ID: MRT4577_181880C.1
aaaacccggccgacccacgcgtacggggacgatgaggataaaaattttgagattttataacagcatgaggagggattagaggtcgcttataaatacaacggggccgacccaaataatgatgataatgatcaaaatactttatatcttacgccaccaatccctcaccctttaaccatgggtactaaaacttaatcacatttatttgaccatgataattctgaccattacaatgatgacgatcataactatcattatatttatacaaa

SEQ ID NO: 89778 - DNA, 398 bp, Zea mays
  Clone ID: MRT4577_181881C.1
ggaggagagggtgcgagccttgtaatggactgttcttttagaaaaactacttcattatggacatacacaacacagaaccggtgtcaggataaaacagacgaacagggcaggtgcgaccgacccctaaccaaagagaggggggtggggcacatctcccagaataaagagggggaggatgccatgacgattttagagggtgggcaccccattacttattactatctaaatgcaaaagttaccactagctgcatgtgtagaacaagctgggaagtcatccctaaggaatcgaccactgaagcagaagcagaagaagctaattccttcatccctgtgtaagagcattatgggcagtgcaaagggtagctgaccccagggtgcaccaccggggggaaagacca

SEQ ID NO: 89779 - DNA, 460 bp, Zea mays
  Clone ID: MRT4577_181882C.1
gggcaaaaaaagggttttctttcaaggggttttccgggtttggaaaaggccaaccccggccccaagaaacccggggggaaattaatccaccggggtaaaattttaaaaagccccgcaaaatcccccggatttaaaccccctgccttggaaaaaggggtaccaacaatttttccccaaagtcccaaacagatttttttgcaataggagttaaaagggggcgagtttggccttttaaaaatcctaaaaccccccccaccttgaaaggggggggaaattttcctggggtaaagggggcaaaggcaaaccctggggcagttataacccccgtttttgggggggaaaacccccttgtcgggggtcccctaaaaaatccccaaaacacagtttcccccaaaaggggggccaaaatcccaggggtgcccaaaaaacaggcagggtttttttttaataacccccgccc

SEQ ID NO: 89780 - DNA, 303 bp, Zea mays
  Clone ID: MRT4577_181883C.1
ataggaaagcggccacaaagagttaaggttggcttagcaaatggacctttgccgaccaaggcaagccgggggcacaccatcgcttaaacgcaagacagggcctccttcccttaattattcttgaacaccaaggcgtgctacaacgactatactaggctgctgcatacgaccgacgcctgcgcgctctgcgccaaggcgacgtgacgcgaatgcaacatatccatgtacagagggcacacgcccttgtgctgcaagaagtgcctgagagagctcatgcggctcagcgccgttccgaccctgcag

SEQ ID NO: 89781 - DNA, 282 bp, Zea mays
  Clone ID: MRT4577_181884C.1
aacgcggcccaagcgtggtcgttttcggggtactgctgggttggaacaatacgttcgtggtttcatttcaaggggccagtcagctcgttgctcagcgtggcactaacggagtgggcgcaggctcacgggtggcatcgtgatccaggtggggggggggactagataatggccgggagcctgacggtgtcttttctctactgcctcaggacagagaacgctcaaaccctttggtcggccgcgcccgggcgcagtacaagtgcaagatcgctggcgcccggtgct

SEQ ID NO: 89782 - DNA, 265 bp, Zea mays
  Clone ID: MRT4577_181885C.1
ccgacctgctggaacagatcataaagaacgtgctctttctattacaacccaggacagaggaagcccagtgagaatttttgggaagagagatgatctcaccctagagggtataaagcagttatatgagacactggacgaggtgaacacatacctaaagccactgaactgcactacctatatggtcacgctcgcggagacgattccttaacccatgggagccggcactatgcgcacagtgactgagccacacttgccggtgaccctg

SEQ ID NO: 89783 - DNA, 352 bp, Zea mays
  Clone ID: MRT4577_181886C.1
atgccgatccaacgtcttcaagcgtggatagaccaaggcacctgttcgaggtcagccctcccaatgccactaaatccagacccatatcatgtgccttgaccaacctcggaatggcctgcaaacaggttgtataggccctcgggctgaaacgcttaaactctttgaataacagctttgacagcctactctttaccctgccttacacctgcaacactgtaacaattgggtgtgtgtaatcctcctaacatagaacccctcgcagttaacgattgtaccatataacacgctcgctggctcggtcttctcctactacttacgcgtactcctttgctctcaattatcatgaatcgct

SEQ ID NO: 89784 - DNA, 292 bp, Zea mays
  Clone ID: MRT4577_181887C.1
agcacgcctacggccttatccgcgacgtcgacaggtacgtgcgttcgcatcctccctgggatgtacgaaatagcattttctcctaggatcgtatccgccatagtgctggaaaagacttgcgcttacgcggtcgcctgcactaccatcacgaccgtatgaataagcatacaggagaaaggatgtatcaattgggatgttcgcacgatgatctcggccacaagcaacgaggaggaggcgttgttcagtgtcagttaatccaccaatgactatggatatcacatgacgatgggat

SEQ ID NO: 89785 - DNA, 218 bp, Zea mays
  Clone ID: MRT4577_181888C.1
cgccacagacaacagcgaccgaggccacccagagccgaagcagcgcccggaccaaccaccgacgcaacggacgaaaccgcgaacagcagaaggctacacgacaacccgcccccgcaagaacgaacgcatgacccggaacgagcccaggcccacaacaaagacgaccaacacaaaagagagacctaaaggccggcaaaagggtacaagtgccaagccaa

SEQ ID NO: 89786 - DNA, 465 bp, Zea mays
  unsure (1)..(465): unsure at all n locations
  Clone ID: MRT4577_181889C.1
atcgcaggcagtctccttggctagcccgagcggctctcatccaccatgccaggctcgtctcttctatttcttcaacccgactcgttcacgccgccaggaacgaagggaaacggggaacgaacacgcgaagggtgcagatgacaggacgacgatggtcagagaccaattcatgagtttgacggcacttatttgcccctcctccccctgttcatttatttcttgctgcttcagagcacagagtgaagctagagagaggtggctatgcaatggaatacttcctttagttagagctttcttacgtacgatcctccggcagatgcanccaaattaactgacagtatcaacgataaagatgatgcaacattgtatccactaataacagatctagaattgtggcacatggtacatagagtttatactagttcagtactctctcaaataacgcaacatagtgtcatagtgcta

SEQ ID NO: 89787 - DNA, 160 bp, Zea mays
  Clone ID: MRT4577_18188C.1
gactgatattttatgcaaaaagaacttataaaagaaaacaagaaaaaaatacaaagatggaattaaagcaaaacgattatatcaatgatgacatcatagcaaaggcaggaaaacccaaaaggcctgataaaataaaaataagggcccggacaaacaattt

SEQ ID NO: 89788 - DNA, 276 bp, Zea mays
  Clone ID: MRT4577_181890C.1
accgactgaccagctggcatcgctcgttgccggagtgtatcaaagacgggcaaagctggaccccggccgtggtcgggatgcacatgttctaccacgtctacatcatcacaatctccagctatctcaaagtccacccttctgcgcccgcaagcacggtatcatctgcacaacagctgtgcatatcgtccgcaatagccgtgcgcgatctcatgaatacctaccgctccaattggcgacgcattgaatatcagccggtggaatacatgcaaatcaccg

SEQ ID NO: 89789 - DNA, 321 bp, Zea mays
  Clone ID: MRT4577_181891C.1
tttttggggggcaccaacgctgaatgttattggaacatttttttgtacaagatttgcaaaatacatgggggaaaaaggacttgaggtcgagggggccccaaactaaaacagaaattccaatcttttacgattactggacacttaaacccaagtatgaaagaccacgcgtgcgtccagaaatgaaaccaaagcaagaacccctttggacggagggcccctccatggaagcttaaagggggtgacccttctgaaattgggccttgactgggcggggcttccggtgggcggacaaatgttgcccattttgaccctggacttggc

SEQ ID NO: 89790 - DNA, 642 bp, Zea mays
  Clone ID: MRT4577_181892C.1
ctcgaggccggccgggccgggcatgctactctgcctctcttctgctactctgataagatatttgttctcgtagacgacgcctcatgatcacctcccaatgctacagaaatggttcattgaggccccaagggggggggcgaggagcctgcttcggaggtatctccggttgtggtctgccacgtgacgggcacccacgagacgacattcggtgcatgaagacctgcgggaagggcatcgtatgccacacccatgatgttcatggctctcttctgcataatagcgatggcactgaacatatacttaaagaccgcataagctacccaaatatcgatgaaccctctgacgtgacaccggatgcccattacgagaatgatacttgagctagagcagttcggaggcactgcacgtggtcatgtgcctgtcaaacgaattcacattctagatacctgagaatgaggctgactacattgactccatgatagttacactcgactacatagcctgacaaccgcaacatgaatgataaagatgcagttggctgttatagcaaagctatatagtgattaatctctgattatggagataggtcacgttgaagatgcacactaccgtgaccatttggacacatctgctgatgctact

SEQ ID NO: 89791 - DNA, 632 bp, Zea mays
  Clone ID: MRT4577_181893C.1
ctggacgcctgcggtaccggtccggaattcccgggtcgacccacgcgtcagaagccatgcatgtctaagtacgcacggccggtacagtgaaactgcgaatggctcattaaatcagttatggttcctttggtcgctcgctcctctcctacttggataactgtggtaattctagagctaatacatgccgacgggcgctgaccccccttcccggggggggatgcgtgcatttatcagatcaaaaccaacccggtgagctccctcccggctccggcggggggtcgggcgccggcggctttggtgaactcggcgccccgcccgctgcagccctacctgcgcctcatgcgcctggacaagcccataggaacctggctgctgtatttgccatgcacttggagcattggtctggccgctgacccaggttgttttccagactggtacatgttatcactttttggcactggagctattctgatgcgtggagcaggctgtactattaatgacatgtgggaccgtgacttcgataaaaaggttacaaggacagcaaaccgcccaatcgctgctggagacatttcgaccttccagtccttcgtcttccttgggggacagctgaccttggcactgggcgttctcct

SEQ ID NO: 89792 - DNA, 297 bp, Zea mays
  Clone ID: MRT4577_181894C.1
ccttctcgttcgcggacgcgtgggcggacgcgtggggggtgggtatagactgtgaatctggggcctaaagaattcgcctgggccatcgatttgtccaactactcctacgctctgctgcactcctggacgccgcagtttgagttcaataatgtccgaacacatggtgctggaggattcgctgaggaaaggttatgctgaacctgctaagaagattgcggcaggagtcgaagcatttgactaaggcaaccacccggcgcggaaaagtcactcgttttgtgcgcgcaggactgatgcatc

SEQ ID NO: 89793 - DNA, 375 bp, Zea mays
  Clone ID: MRT4577_181895C.1
aggccgcgacgagccgaccagctctactgcccccttccggccttcggcgaccgtgacgagcaacgacgaccacggtgacgatggccgcttcctccctctgccacgggcacttgctcctgtttctcctcgtgtccgtcaagatcgatggcgtgagtgcgaagggctatggtcttccagccaagacatcaaacacaaaagtgatacttaatggcggacagagggttacatttgccaggccggatggctactttgcattccacaacatgccagctggaactcatcttattgaggtctcctcaattggttacttcttttcccctgtccgagttgatataagtgcaaggaatcctggatatattcaagcagcattgactg

SEQ ID NO: 89794 - DNA, 558 bp, Zea mays
  unsure (1)..(558): unsure at all n locations
  Clone ID: MRT4577_181896C.1
attcctgggtcgatcccatcgcgtccgggcgcggaccagtgcgctgcgagagcatcacacaatcattcatgggatatctgctagctcgagagactagctggtgacggagagccagttnaagtgcaggagagatcgtgcatctgaccctgaacagcggtgctgatggaacacctcatgtcaccagtgtaaatagcccgtgcatgctctgcgtgcgcatccgtgagccgaacattcatcgacatgctcaggaccgcattaacgatcacatgtcactcgctccccgagccagagccagtgatgatcctgcgctggagctgagtccaacatgcatggccgtgccgaggatcgattcacgacagcaggaagggagcatacagtcaagggagtacagatgagatcatgtcaggggaggaccgccgaagaatatgtagatatgtatcatccagaccttcgatagtaaattaccagtagtaagaagtgatcaagatgatgggggcttacgctaaagacgggctacctggctagcttcttgacacacgaagcttttgaaaggctgct

SEQ ID NO: 89795 - DNA, 1511 bp, Zea mays
  unsure (1)..(1511): unsure at all n locations
  Clone ID: MRT4577_181897C.1
cattgggtacctcgaggccggccgggttacaaaccgaaaaaggccgcgacgagccgaccagctctactgcccccttccggccttcggcgaccgtgacgagcaacgacgaccacggtgacgatggccgcttcctccctctgccacgggcacttgctcctgtttctcctcgtgtccgtcacatcggcctgcctcggtaccgcggcggcgcatcaagccgggtctggagagggctacacgatcgccggccgcgtcaagatcgatggcgtgagtgcgaagggctatggtcttccagccaagacatcaaacacaaaagtgatacttaatggcggacagagggttacatttgccaggccggatggctactttgcattccacaacatgccagctggaactcatcttattgaggtctcctcaattggttacttcttttcccctgtccgagttgatataagtgcaaggaatcctggatatattcaagcagcattgactgaaaccagaagagttctgaatgagcttgttctggaacctctgaaagaagagcagtactatgaggttagggagccgttctccgtcatgtcacttttgaagagccccatggggttaatggttggttttatggtcttaatggtctttgtgatgcccaagatgatggagaacatagatcccgaggagatgaagcaagctcaagaacaaatgaggaacaaccctgtatcattctctggcttgctcgccagagcgcagggctagagaagtagactgtagacatgaggatactgcaaaggtcaaacattctagaatgtgagtaagagcactattaaagtgcttggcacgtcactcactcggggcaatttcctggggataagaaggaaatcctttccccctgtttttaccgtattttagggctagtttgggaacaccaatttcccaaaagatttatattttcccatgggaaaatgaactaatttcccttgggaaaataaaaatctcttggaaatttggggttccaaactagcccttaagttgtaatttgtctgcggtgtagaaccttctgaaacctctgagctagtgatgcgtcagattgagataaaaaaaaaaaaaaaaaagcggccatgccatgtcactcggagtaatttcctggggacaaggtggaaactctttcccctgtttttactgtattttaacttgcagtttttctgttagggcttgttcggttattttcaatccatatgtattggaggggattgatacggattggaggggattttgactttgaatccccctcaatccatatggattggggcagaaccgaacatggccttatgtagaaccttctgaaacctctagctgagctagtcatttggcacatcatataaccacacattgagatattcttgttcaatttgtattgtatgaatcagctgaaaaaaatgagttaattagtcggcacgtcatataccacacattgagatattcttgttcaatttgtattgtatgaatcagctgatnctaac

SEQ ID NO: 89796 - DNA, 244 bp, Zea mays
  Clone ID: MRT4577_181898C.1
gcgagatttttgtttctctggtagaccacaaagaactgtgttcgacggagggttctcagacatgacccaatgcttttggagaagtcactgttgctagcagcgctcctggtgccgagttgctagatgaaaatatttgttcaaaacagggggatcgaaacgagcacctgccgggtgagcctctcgctctaatccatggaggcctcgcctagcgccatctggcagcaaaggagtacacgcaagagct

SEQ ID NO: 89797 - DNA, 921 bp, Zea mays
  Clone ID: MRT4577_181899C.1
atgatgaccgtaggcctcgtggtggggagaagcaagccgggctacgacctctgccccgccctcagcttcaaggatgttcatcatccttgctgtggcggagggcgagctgagccggggttctacctcccgcatgggccggcaagccgcttcttccttcagcattcaggggagagggcgctcactggccttgcggagggggcgaacttcgacaacgctggaccggtcggccgcaagcgtcgtcagctgcagcgtgcctggcttgctggctcagctggctccggcgcggcctccgacgttgcctcccgccgcttggtccggacgttgctgtccgtccaccgcacgggcagctgtcgcgccgtgcgcaccgggggaccgtacaagacgtcgtacgccgcatgggcgacgttcgtgttcttggattgtcttgtcctcactccggcacgacgcctccgcgcggaggaccttcggccgctctgcgatgagctgaagccggaggcagcagtgtcggcgtggacagaggcggagttggctcgaaaagaggcttcgtcggcccgggagcatgtggcttcccaggccgaggaggtgcagcagcggcgactggagctcggccaggtcatccgcgagtgggaccaaccccggagtcacgttgccgaggccatgagccgggctgaggtcctcaggggacagctggctgaggcgacggagcggccagccgaggcgtccgctcaggccggggcccttgtggagagcctggccgtgagggcccgagcgcggtgctggcgtcctccttcgaggtggagatccttctgcccgtgtcgccgtctgaggctgggccaggttctgccgagggtggaaacgtcgccgaaggtgctgctgctccccctgcctatgtctgaaccggcaggaacaatttgtttgtag

SEQ ID NO: 89798 - DNA, 190 bp, Zea mays
  Clone ID: MRT4577_18189C.1
ggtgccactccatattacatctcaagatattcctggagagaggacctgggcttccgcttaccctttgctaccctcattctcttcttcttcatcatgccatcaagctctatctttgggttatcctcaacccaacttggctctactactgacattgacgggttcttctttatgccaccctgatgcccaaccc

SEQ ID NO: 89799 - DNA, 442 bp, Zea mays
  unsure (1)..(442): unsure at all n locations
  Clone ID: MRT4577_1818C.1
ccggcccaaaaaaaaaaaaattcttcccagcccccgcggggacgctggctacaacaactaacccgacacggcagcggccaagggccagaacaggggagagagggggggggggtcggaaccccccccccctctggggcggaacttgggaagggggggaaaaaaaaccgccccccccgccgcccccggggaccttggggggaagcccaaaagggcaggggcccgggggagctagctaaagcaattctacgggcgggcccttaaaggggagggaaagcttcagggctggggctttgggttcgggttcggcttcggccgcaacggggggggttggcccacaggcaaaactcacccccactggcgcgggtgcaaggggacccatcccccccgggcaaagtnggggaacgggacccccgggtgaaaaacctcgcgggggccccccccc

SEQ ID NO: 89800 - DNA, 623 bp, Zea mays
  Clone ID: MRT4577_181900C.1
aattcggcacgaggagcaagtttgccatcattggaggaaggtaaaacttgtgggttttggcttttgactggtgttggtgatgcatctctttaccggtcgcaacagaatgaagcaagtcaacactggaatttggttactgaattctgtcaggcacactatctcccactaagtacaaaatatcttgcattactggccaatgacaatgattgggttggttttttaacagaagctcagatagctggattttctattgaagctgttattgaagtggcagccaaagagatcagggattcaagactgagggcccacatactgactgttctaaaaaatatgatatcacttcgaaggaaatcatctggtaatgtaccttcaggaagcagtgatccatctttctcttctgttgatggcaataatcccatggaacttttctgcattcttggagtctgtgaaaagcaaaaaaaccctggggaggcactcctaattaaagcaaaacaaatgcagtggtctttgcttgccatgattgcctcatgctttccggatgtaactcctctcacatgcttaagtgtttggcttgagattacagccgcaagggagatgtcctcgatcaaggtggatgatgtttc

SEQ ID NO: 89801 - DNA, 313 bp, Zea mays
  unsure (1)..(313): unsure at all n locations
  Clone ID: MRT4577_181901C.1
ggcaaaaaaaagatgagaacaattctgaacaaagacgtcggatattacaaacgatctcgacaggtgcaagtttgtgagtattcgcaacctctctgcagggagggggtgattaacatacatagggcacgcactaaccctttttggggccgtcaagtgttagtgcgtgccctntgtntgtnnnntcccccctccctgcgggggggttgcgnntnctcncnnccttgcccctgtcggggtcgtttgtnntttccggcgtcttgttncgnnttgttctccctcttttttttgccnnnnnnnnnnnnnggggcggccg

SEQ ID NO: 89802 - DNA, 320 bp, Zea mays
  unsure (1)..(320): unsure at all n locations
  Clone ID: MRT4577_181902C.1
gcctttcgagaaggtaaccctaagggtggtgctattgctttcggtcatcctttgggttgtactggtgcccgtcaaatcgccactctcctccctgagttgaagcgtcaaggtaagaagatcggtgtcacttccatgtgtattggttcaggcatgggtatggctgccgtcttcganagcgagtaaatttgcaatcaaaacaacctatatccccactttatnaatgtaaaaaaaagccatgaagaaagaagagcataaagcttttgctttttttgttgagtaatatttgaaaataaataaatctctgtacattttgnncatnc

SEQ ID NO: 89803 - DNA, 448 bp, Zea mays
  Clone ID: MRT4577_181903C.1
aaaaaattgccttataaaacgcccttttttttaaaaccgtgcttgcccacaggaggccatttcttgggttgaacccccggtccccagcgggccccttttttttttttttttggaagccgaaaaacaattttatccaaacataagtgtttagacggaaaccattatagctgttgtttggcactggggggatcaaacctgacaatgaatggggggatttcctttggccccaggtaaacgacaagctttgaaggatccccagggcccccccgaaccaccttttggttaggcggaaaaccttgggcctttcatttaaaacgctttttttccatgggtgggcctttttggtttgccgataagcttgtctcgataaccttgccaatttttttttccgggaacacttttttgagggccattctccctaaaaacaaaagatccttggcctccccgg

SEQ ID NO: 89804 - DNA, 463 bp, Zea mays
  Clone ID: MRT4577_181904C.1
ctatgcgttcgttttcattcattttgtttttgactttcacccattgttttgtttgatgcgcctttttagtggtgacgtgaggagcgcgagctcttttaaaaactagccgccctgtctcagtcgaaagacgggggtgcgctcttggtcttgggacatctaacagaaggtggtttctctaaggacaccactttttggggaaagaaacccgccgatagtgtgttaattctctggatttttgccctttttagcatgggacacattctatttcgaaagatcgcagagatcacctgaaggcttgaacactttcttggaaattgggaaaaatacaccattgtttttgcaaacagtgtgacaacattggttatttggttgccttattcggacaaaaataccgaggcataatgcccaaaagagggacaaccgccccctttgggatatcaagaaatggggattcttgtggttg

SEQ ID NO: 89805 - DNA, 282 bp, Zea mays
  Clone ID: MRT4577_181905C.1
ggtgctcctactttgactttcagccttgggggctcaagcttaggcgcggctgcatgcaacgtgctggcgtttatatgtcctgccctaagttaaaggcactgcacgttatttaacaagctaaggactggggaagcctatgagtggccctgcttgagctccttggaggacatacgggtttaagaaggtggtgcaatatgggagacggccggagctggagctctttccaactattgtacccacggcatggagattgggactgcgcgttcagtggggccatgacct

SEQ ID NO: 89806 - DNA, 687 bp, Zea mays
  unsure (1)..(687): unsure at all n locations
  Clone ID: MRT4577_181906C.1
cctcgaggcggcgggaccccctattgaccgggcgaccaccaccccgaccggaccctccacaacaatgtgccaccgcgcctgggaagcccccgcgcgccggccttcgtcttttcgtcggcctccctccgcgccgagccggcgcctaccgccgtggcgctgcctgcggacaaggagggcatcatggaacaaagcgccagcaacatcgcgcatgctgtgcgcgcacgccacctacaacgtgaagctgatcaccccacaagcggaagtggagctgcaggtgcccgaccacgtgtacatcctgcaccacgccgagagaggacggcatcaactcgtgccctactcctgacgcgcgtggacctgatcctcgcgagacggaaagggcgtctccggttccgaggaccagtccagaccagagcatacctcgaccacggccagatcgccgtcgagtgagtggtcacctgtcacgcctaccccacctctgacagccactatccagacgcacaaggaggaggagctcaccgcggcataatcattcatgaccatctatgcctatctctatgtctgggcgccggtgagtgtaatttngagacgcgcgtacacgaactgtactgcttgttgttcatctgaaagtactggtcatgtaagagcgaagttgtcctgacatcgtatctctctctctacatctctact

SEQ ID NO: 89807 - DNA, 130 bp, Zea mays
  Clone ID: MRT4577_181907C.1
agtaaatcatgacagtactgccatcagtcgttagcagaagcgcacatgaagatgagaaatttcggcagcataagctacggcctcacaatgctgcagaaggcttatgtgagggtaaccacagccctgagtt

SEQ ID NO: 89808 - DNA, 446 bp, Zea mays
  Clone ID: MRT4577_181908C.1
gtggtctcgtcgtccgcagctagctatggccagcttctagctgctgagaaatccgtcgctagctaagctagcagccaccgagacgagtgcaacctgattctgcaccctaataagtaccctagctacatctaccatgccttaatatcgcttgtgttcttttgtttgattttgtgttttgagaccggaagacgaaggagatcgccaggagatatatagagtgatcacatgtccaaggcggacgacaataattatgcgaaaaactctcgctagccaggaattagtaattttctaccataagagtgagccttttaatttcaccctttttcagttcttcggctaattatatattcaagtccactatatgctatgtaactttctttgttccttaatttgtattacttatatatgtactggatcatcggagctaaataaaaatattgaggatt

SEQ ID NO: 89809 - DNA, 245 bp, Zea mays
  Clone ID: MRT4577_181909C.1
actagacattgttgaatggacgtgtttgttcattcccgaataaaaaagaaatggacttgtatagatgatggtgatagaactacggctaagaagaatgtaacttacgagaacacggagattcatctgggttcctgcatccggtcttgtgttgtgtaacatagcagttgttcttggtacccacctccattgtgaccttcgaaattatggcaatcatgttgaaagatgtatacacttttcactgtatt

SEQ ID NO: 89810 - DNA, 394 bp, Zea mays
  Clone ID: MRT4577_18190C.1
gggcggacgaccatttttttattataaatatttttaatttagacacgtgggcaacgcatgggtaaactttaaagaccaaagttaatactcagcaagcgattaatatctttcttatgtgaaactaaattaaattatggccgtgttaacaacatgtaactgggaaaacttggatgtactaaatatatgactaataatcaaagaaattataatcatatatattattagaataataaatcagtataatattattcttttaataatattgatttatacataaaattttttttttactcaataccattaatatattaattttataaattcggattactattaatatatattcattagatataaaatactaacataaatatatctaatttaatatatatta

SEQ ID NO: 89811 - DNA, 687 bp, Zea mays
  unsure (1)..(687): unsure at all n locations
  Clone ID: MRT4577_181910C.1
ccggccgggctctctagctccgcgcagcggacaattgtgcggttcgttaagctgccttggttgacaagatccctctgcataccgcttggatctccctggaaaagttactggtattcttgtgttcatatgttttgcaatcggctaaccatgggcattattttgtgatattcatggtcattctaaggagattggactttatgcgtaatgggtcgtgcaagtatacttgcgtttatttgcttgattaattcgcgctacagtgcgacgacgcccagggccaaggtgctgaaggaggtgaggaacgtcgcagtaatgatctccatggagaagggtgcgatggccagaggtagtgggcatcaccagcacggcggccacaggcacgatggctagcagcaacagcaattgctgcttcaacgacaagcgtgcgcgagctctgagcagactcaagcgatcctatcatgtagttcattgtatttcaccattcatttttctttttttacgtccatgtgagatgaggttgttcgttcggcgagtggagtggtgggaaagccacagaggtatacgagatttatgttaatcccccaccccaaagagtcttccctatccatctcgctgaaatgtggcgacgcttagatatcgngtcatcatactgggacgcctttattgcacgcaccgtgtgatcctgtttcc

SEQ ID NO: 89812 - DNA, 742 bp, Zea mays
  Clone ID: MRT4577_181911C.1
cattgggacctcgaggccggccgggccgggcatcccaacgagcacgcagcgcagcactgaggcaccacttcctgcactcactgctagctgctcacaccgtagtagtaacagtccatcaccccaggcaccacaaatggctcccaaggttgcgctcttccttgccctcggcctcctcttcgctgccgccgcccatggctgcgaaccctactgtcgtggcccagtcgtcccaacgccgccagtcatgccgacgccatcgtcgcacagtcacgggcgctgcccgatcgacgcgctcaagctcaaggtgtgcgccaacgtgctcggcctcgtcaaggtcggtctgccccaacacgagcaatgctgcccgctgctggaggggttggtggacctcgacgccgcactatgcctctgcaccgccatcaaggccaacatcctcggcatccacctcaacgtgccccttagcctcaaccttatcctcaacaactgcggcaagatttgcccaaaagacttcacttgccccaactaagcttgggatctcttgtgtgctccatctcgtgattatatttacaagcatgttggcctcttgcaatattagcgaataagtttgtcgtttcaaattctttcgctgtacctttgacgattgtatttgtgtggaaatatatttgaaattttaatgatcaaaaaaaaatattcatgttttttattttgagaaaaaaaaaaaaaaaaaaaaaaaaaaaaaaaaaaa

SEQ ID NO: 89813 - DNA, 1571 bp, Zea mays
  Clone ID: MRT4577_181912C.1
atcttcctctctcccagccgccgcaaaccccactcccccctcgtgcccccaattcccacctcccagatcccaccgccagatcaccgcaatgcagccgccacgagaccccatcaccgcgcgagccatccccggcgtcgacgcctcctccacggctgtagtcgccaccgcgcccaccgaggtcccgctagcatggcccccgacctcgtcgctcagtgttggtgcgagatcgaggccatcagccccaccacgccgcgatccgccaacactgctgacccgggctcctcgccctctgccttcgactctgacaccggctcgtcgctcggccacatcggctgcctacgctcgatccgtcgtgccgcctctccgtccttattcgtcgcgttcgtcctcggcttcctcttctgccttccccgcgatgcctccccgcgtcatcgcccaccagcgtcatcgcgtaggcctcactcgagacagacatggcagtggattgggtgtttggttctctttgcagcaattggaggcgaacaggaagacactgtagaggcactctcgcgcgctgttcaacagaggtggcatcaaggggcaccgatggcggcaacacgctgtcgcagcgtgtggcggagagacagtgtaggtcagacctggcaaacaggataggggagacggacatgatctccatgcaggagaacatgtctgccaggacactcacgctctctagctccgcgcagcggacaattgtgcggtttgttaagctgccattggttgacaagatccctccgcacaccgcttggatctccctggaaaagttactggtattcttgtgttcatatgttttgcaattggctaaccatgggcattattttgtgatattcatggtcattctaaggagattggactttatgcgtcatgggttgtgcaagtacacttgcgtttatttgcttgattaattcgtgatattgatgaagaaattccagatccagaggaatagaaacactttttcacaaagggagaagatcatttggtatggtagtatcttcattgaaaataatatgaaaaaaataaaaaattaaacagattattcgttgaggcaaacctatgatcaatcatacatcataggttggtcttctcctttgtagcgctacagtgcgacgacgcccagggccaaggtgctgaaggaggtgaggaacgtcgcagtaatgatctccatggagaagggtgcgatggccagaggtagtgggcatcaccagcacggcagccacaggcacgatggctagcagcaacaacaattgctgcttcaacgacaagcgtgcgcgagctctgagcagactcaagcgatcctatcatgtagttcattgtatttcaccattcatttttctttttttacgtccatgtgagatgaggttgtttgttcggcgagtggagcggtgggaaagccacagaggtatacgagatttatgttaatcccccacccccaaagagtcttccctatccatttcactgaaatttggcgacgcttagatatcgtgtcatcatattgggacgcttttattgcacacaacgtgtgatcttatttc

SEQ ID NO: 89814 - DNA, 257 bp, Zea mays
  Clone ID: MRT4577_181913C.1
ccgctctttttttttttttttgagatcgcttgaggtgtttttttatatttttttagtagaagatcaggtgaggtgaggtgagttgacggtggaatgtgtgattcttagtgggccgccgtcgtgccggtgcagattgcttcccggctggcagaactaccgccgctcacgatgtatgtggctgtctatcgttttctggtctcgacgacgcggtccttctctcacaggaactccctggagctcgccctctccacctcccg

SEQ ID NO: 89815 - DNA, 539 bp, Zea mays
  Clone ID: MRT4577_181914C.1
ggttgtttttttttttttttttttttttttttttttggttttttttttttttttttttttttttttttttttttaacaacgaccggttacaggagggagccattgacattggtgggggggcacacatgggtcatgggcatacgccggggggggggggtactacacgcctaccatttgaacaagggggggccagagaagaccacactggtcactcgacgggcgggcgaacgaaggggggggtctgggggggggacacatggacgggggtgctcaatcagttaggtgccggggaccaaattcggggggtatgcccaggcgttgttggggacggggtcggggaccggggcaaagagggtctcgagggggcccttggcggggacaatgggctgcacaaaaaagcccaacatggggaacatgggagggggggcggtcttgggccccttcaccttgagcccggggggggggtccgggtcgtcggggaggcccaacgggtcaaagggccccccggggtacaccttggggaggccttccccgggggg

SEQ ID NO: 89816 - DNA, 610 bp, Zea mays
  Clone ID: MRT4577_181915C.1
cgcaatgcctcccccttccgcctccgcctcccgcttggcgacccactggatagctgacgccctcgccgacgacgagtccctcgacttctccgtgctgaagggttggaagctccggagaattggagaaggatttgcttccacctttaagtcaagacatccaggaatatatatgtaccaaggaaatttacactaccagaaacttctttccagttgcttggaagttttggagaattggaggatttgcttccacctttcagtcaagacatccaggaaaatatatgtacaaagaaatttacactaccagaaacttctttccagttggcacccccgaatcccctgcgtccagcacctcatccaaccatcccgttctgtaggttcaaagaagtaaaaaacggatgtcattcgtcagttgtggaaatgaagcactacgacttgtgcacaatgaatttgaatgaagtgttgtcgagagtagaagagatgtcacaagaagaagcatctgtttgcggtcttatggatatggatgagcctagtcctcccagttgtgatgattcagttgaggttgaggacgacagttgctatgaaggtttaactgatgcagagtgggcagctg

SEQ ID NO: 89817 - DNA, 651 bp, Zea mays
  Clone ID: MRT4577_181916C.1
aattcggcacgaggcaaggtaccatttcatacgtgattgtgttgatagaggagaggtcgacattgaacatgtgagcactgcagaacaattggcagacattctgaccaaggctcttgggcgcgtcaggtttgctgagttgcgacagaagcttggggtaatcgaaggcgggtgaagcggggggcattctgttgattctaatcactagctgtccatgttctattatgtaataaggcctagctgcatactcagttatttaaattccaagcttagttagctgtagaaagaagaacacctggtgtaaaggtctgaaccgtgctgctgtcacggcgtggcctagcgacattctcgccacgctccgcatgtaacgttctcgcgcaaaaggcgggcacgacgcagcgtgagcgggtgtggcggggaaagcggatcgcattctgttgtgaacatcagaggaataaaggagaaagtgcagggcgcagttgcgcagtctgcggcaaagtattttctgcgcgttccgtagcctctgctctgtccagtttttccgtcaggtgaaaacagagtagccactgatcgctgtcgagcttcacattccggtggccggcgccaacaaactcgaccagctgctcgttggacatcaccgtgacgctcccgaag

SEQ ID NO: 89818 - DNA, 1133 bp, Zea mays
  Clone ID: MRT4577_181917C.1
atgcagtgctcgaggccggccgggaaagtcgggttactctgtcaaaaaaaaaaaaaatcggggtcctccgcctcccgcaatgcctcccccttccgcctccgcctcccgcttggcgacccactggatagctgacgccctcgccgacgacgagtccctcgacttctccgtgctgaaggctctgtttggggactcgtcgaagtccctcgcgggagccccggaggccacgcgtgagcgggtcgcgctccggtgcattcaggaggtgtcgtccgtgatagcctctgggggtgatgccgcggccccggcgggggtgcctagggttgatggcgcttggtcatgcgaggatgtgttgtttcggcttatcagagacgttggaagctccggagaattggagaaggatttgcttccacctttaagtcaagacatccaggaatatatatgtaccaagaaatttacactaccagaaacttctttccagttgcttggaagttttggagaattggaggatttgcttccacctttcagtcaagacatccaggaaaatatatgtacaaagaaatttacactaccagaaacttctttccagttggcacccccgaatcccctgcgtccagcacctcatccaaccatcccgttctgtaggttcaaagaagtaaaaaacggatgtcattcgtcagttgtggaaatgaagcactacgacttgtgcacaatgaatttgaatgaagtgttgtcgagagtagaagagatgtcacaagaagaagcatctgtttgcggtcttatggatatggatgagcctagtcctcccagttgtgatgattcagttgaggttgaggacgacagttgctatgaaggtttaactgatgcagagtgggcagctgagaattatgcagattgggaggaactttataaccgtagtatgtgatctaggaaaactataaagtgtcatgagaagtactattgctgtagtacctgatccaagttgtgaggacttctattatgttgtagtatgtgcttgtgcttctagttgtggtgacttctattatgttgtactacctccgttctcgaatatttatcgtccgctattttatttttaaactaaaccgtgacaaataaaaaaactgagggagtagtatgtg

SEQ ID NO: 89819 - DNA, 542 bp, Zea mays
  Clone ID: MRT4577_181918C.1
ctatcaggtctgtgaccctctcctctatatgtagagatgctcccccggtctacttctacttcatcttcctgaaatatatagcactcacatcgcaaatcggcactgatgctcattctctttgtttgattggtgcaggtataattattcaactgagtgcatcaacagcagcgatgcagagtagatactgaatacctgttgtgttgacatacgctgtgaacgacagcccctacgttgacgatatgactgccattctggactcagatggcgtgcgtaagttgacaatgaaaagatggaactcctgctgtaccaagtgagcgccaaggacatcagcgagctcattgccgcgctcaggtagaagtttgcttcaatcccatgcggtgacgggtacgtcaatgatgcggcagctgcacctgatgctgacggaagtgctgctgcatgtgaggtaaagagagaagagaacgtggaagagaaggaagagagcgatgatgatatgggcttcagcctcttcgactacgctggacagagcatcacagtattgtttt

SEQ ID NO: 89820 - DNA, 705 bp, Zea mays
  Clone ID: MRT4577_181919C.1
atgcaccaagagagtctttgtaaaggctacgtagtgtatccatggccattcacctcggtagtgaagatcgggtctgtacaacccaggctggaaagggatcacgactcgtgggtaaaatggctcgtcttaggtgcacttcacgtcagtccagtcacctggagagactgcatcattgcctgcacgaggagcaggagcgccgatgccaggagcaggaccaggagcaggagcagcaggactcttcccctcgcttcagcaggaggtggagtctgggagggtgtagaggccttctcagagcactattctattactgagaggggtactgccgaggcagccatgcaagatgcagcacgacgtgcactttctcagtattgctcgttgtttagtggggtagctgatgacctcgacctaaagtactaccctcgccgttcgaccgacagtgctggaggtgtgattgtctcacctgttggtgagggcaatcccaggctgaacagcatggtcaacctggccatcgtgctcaacatcgagttggaccacgtccttgacgagttgggcaaggttcgggcgaaggttgcgaaattgcgtgctgagtgtgcaacacaccactatttggatggtggttctcccgcccctgtcgggattcagcacccttaccgttcgccgccccgtggtcgctttgattatggcacccctgactacaggacctag

SEQ ID NO: 89821 - DNA, 726 bp, Zea mays
  Clone ID: MRT4577_18191C.1
attacaaaaaacttcttccccgtcttcgtcctagctagggtttcctctgctgacctccgtcgtgcttccggccgctacttgcatctctccgccctccattcattccactcctctagcctatgagatatggcgagcacagcatgctttgtgattgtcagtaagaatgatatcccaatctatgatgctgaagttggatccgctccaaaaaaagaagatcaggcttatcagcatcagttcattttgcatgctgcattagatgttgttcaggaccttgcatgggctacaagtacaatgtttctgaagtcagtagatagattcaacgatcttgtggtgtctgtttatgtaactgctggtcatactagatttatgttgcttcatgattcacggagtgaagatggtataaaaagcttctttcaggaagttcacgaactttacatcaagatattccttaatccactctacttgcctggttctcgcatcacatcctctcatttcagtaccaaggtcaggtctcttgcaaggaaatacctgtagcagtgtagcatacgctcaggtggaagaccttgtgagctccacataagtgatttgtttcggtgaccctctctttgatctgcctacttccgactattcaatggccaatagatcccgaaaatgagctagtactatgatgtaccaaaatgctgctgaatggagagctttctttgcttatttctgaggtatttcccc

SEQ ID NO: 89822 - DNA, 693 bp, Zea mays
  Clone ID: MRT4577_181920C.1
tgggtccctcgaggccggccgggccggttacttaaaacggccctcaaagaaaaagaaaagaggacaccaccacctgaaccaagagccgatggatccgaacactcgacacaggctgacccatgatgactcgcccgttatcaatgaagggctacaacctacaaagacgtcgaggcggactcacctcctcagaaagctcatgctcatcttcaacaaattccccaaccatgcgccctcgttcaaccacaaacctaaccccgtgtaggagctcaaactcgtccgtggacatattatgaccatgccgtcgccttcagcgggaaacttcaccacccagatcgaccctaacaagatttctgccatctaaagccgtatcacctacatacatgaggaataattcccccctcaccagaggagcacccaattttagaactaaaacttctgaggctggtgaatcaaacaagaattcctgaggtccataatgatctagagattttacctggcaagggacttcagcacccttacaacaaggatgctgtacagcttgaacaatccctcatatagggaggctacgatcgagagtcaagcgctcggcaagatgtgacacatgagagctatggttacttaatggaccttctcgccaagacagctaaagatgaaatcgctgggtgcacgcaacaggggtatgattccctatct

SEQ ID NO: 89823 - DNA, 392 bp, Zea mays
  Clone ID: MRT4577_181921C.1
gtctcgcctccggcggcgccgacacagcacatggatctgtagatctctgtcttggcgtaagcggtgcagccccaggacgcggcgaagctctcgaaccggtggtccttccactatacccaggtgaacgatctgtcgatcaacgactacctgaatgagactgtggctaagaacgcgacattcctggcgaactccgtggcgcgctactccaagaagtgcttccagaaggggcagcgcaggatgcagtagcgcctcaccaagtggctcatgatctacgtgctcatcaacgggcagaaggtcatggccagggccatgatgaagcacaccctggagatcactctgctgatcactgacgccattactatccaggttgccatggacgccattatgaacag

SEQ ID NO: 89824 - DNA, 345 bp, Zea mays
  Clone ID: MRT4577_181922C.1
cggactcgtgggctgactcgtgggctcaatgcagtttgggtaaaaaaaaaaaaagagaggataaatttaaactaaagaaacggtaaaaataaaaaaaaaaaaaaaaaaaaaaaaaggtctgccgtttttcagcttccatactttcgtttccgtacttgccacttcatttttcttttttcgtgtttccttatttctgttcattggcttttctttttacaacttcgtgacttggaaaaccttgccttttcccatttttataccccttgtccccttattccccttttgccatcctcagctttatatgcctttaggccttaaccctttttcccttcccacctttttttc

SEQ ID NO: 89825 - DNA, 434 bp, Zea mays
  Clone ID: MRT4577_181923C.1
gttgttgataaagtccttctaggaaataagtggttaaggaaagcttctggcatacaaccaaagttcccttatgttgttgattcatttgaagaaaggtgcagatgcaattgcttatgtcttgtttcactttttcataatagttgtttgttggattgtgtagggagattaacttactgagttgacttaagaggcttatgaaaattttctttttcttattagttgtgcatgcccacttactgctaaaattagtttttcatacatgaaataactttcttgtcatatgggaaacaatttcctgataatatagtttttggtcgtgttttcagccttgtagcttgtaattattttttctcatgggcaagtgggttacagatataggtattgttggtgtcgataaaaaaatatataatatacgctaaactagctgtttgatt

SEQ ID NO: 89826 - DNA, 281 bp, Zea mays
  unsure (1)..(281): unsure at all n locations
  Clone ID: MRT4577_181924C.1
cgagcgtggcaacacgcccatagcgagctcgcgaacgaggcctgagcgcgtgtcgcgaacgaggaacaagcgctttcgtgttttttcttgcttctttcgactacggtgtaggantgtgggcntantgtcctagctgcctctccctcccccgctctttgtgctttctcnctctgccttcgcggggggggggggggggcccntcccctcctntctccttgccccctcctccggtgggggggcggcgccccgggcgggggccccttccccccggcgccccccct

SEQ ID NO: 89827 - DNA, 439 bp, Zea mays
  unsure (1)..(439): unsure at all n locations
  Clone ID: MRT4577_181925C.1
tcggccccccacggtctcctgtggggtggcggcacgcgctacatcgcgcgcgcccccgtcccctcctctctctctggagggcggggggggtgacgcctgggtaccccgcgccaggctgaccctaccgcgcgtccctcgtcagggcgggcgcgtgcggacttccggtctccgctgggctcctggctacggcgttctgtccccgtgcgcgtgtcccggccgggggagcgcacccgggacgttcgagcgcgctcttccgggcgcggcgaccgngactggcagcggcgnccatcnnacgagcgcttttttgttttgggagcgctactcctccgcgctaccacgcggttncagcggaccgacaccgggtcgcgctgctnatgtgtcgctcttcaacggaccccttccttccttcacgccggtcacggtatgggggccatacaca

SEQ ID NO: 89828 - DNA, 793 bp, Zea mays
  unsure (1)..(793): unsure at all n locations
  Clone ID: MRT4577_181926C.1
gacgccgctcccttgtctttccaacgtcttatctcgatccgcccgtcgcggcccccagatctctctctgctttagcgcaactcgcgctccggtgcgcgtccactcatcgcgatcgcctgctcgaccgatcgatagctcaagcacgacgagaggagagctacctatcgcagttgcgcgtcttccttcttgctcactctcagtctcttgctcgctcgccagctctttcccacttgcatggatccctccgggcctgggccgtcgtcggcggcgggggcgggcggcgacgacgcgcacgcgcacgcgccgccgcagcagcaccagatccagccgcttgctcaggcgcaggcgcagccgcagcagctgagcaggtacgagtcgcagaagcggcgggactggaacacgttcctgcagtacctgcagaaccaccggccgccgctgacgctggcgcggtgcagcggcgcgcacgtcatcgagttcctcaagtacctggaccagttcggcaagaccaaggtgcatgccgccgggtgcgcccacttcttccagcccagcccgccggcgccgtgcccgtgcccgctgcgccaggcctggggctccctcgacgcgctcatcggccgcctgcgcgccgcgtacgaggagagcggncacgcgcccgagtccaaccccttcgccgcccgccccgggcggatctacctcccgcgacgtccgcgacgcgcaggccaaggcgcggggcataccctacgagaagaagagccgcaagcgcaagaagncggcggcggccgccgccccgggggag

SEQ ID NO: 89829 - DNA, 241 bp, Zea mays
  Clone ID: MRT4577_181927C.1
atcgcaagcggacgacctttttttttttttcccagaaatgttgtgcgagctcgcagttatgcagtagagctgaaagtagctcttggttccaagatatctgaatggtaatttgagtgcttggcagtgtttcttgatggactaaactctggtattagatatgaactagtatgttaatatcacaattgaccagcttatgatatcaacaaacgtcaataaaatagtactgcaaatgatgtaatgc

SEQ ID NO: 89830 - DNA, 151 bp, Zea mays
  Clone ID: MRT4577_181928C.1
tcttgtctcgtcgtatactcgccgccgggcaagtaggctctcggcgtgggcggcggcatcgatacgttcgtcggtggcagctcgagctagtcgcgcgccatcggcaagatgttcatcaagactaagctctgctgcaagttcctggccggga

SEQ ID NO: 89831 - DNA, 302 bp, Zea mays
  unsure (1)..(302): unsure at all n locations
  Clone ID: MRT4577_181929C.1
ccgtccggnaatgttgtgaagtggtggagtcaacaggtatcctnntttgttgaatcaagnncttcttggagaaggattgggtctaactgatagaagataaggggtgaatattannnnattgctaaanncttatacaattttattgtcatacattaccaggatatatttaatttctanncagagaaattgttcgacngnngtagtcttatagatgcattgtcctgcatcttttacgagatatggttagtcatttttgaccattttgtcaatgatctaagcatannggtatttgnnngatgtta

SEQ ID NO: 89832 - DNA, 1152 bp, Zea mays
  Clone ID: MRT4577_18192C.1
atcggcggcggcaacgagccaggaccctgttgtgatgctaccgtcgccgccggtgctactacgcccttgcgctgcccgggcctccccgcttccgccccctagacctagagctgcaaatcctaacaccgagtcggcgacgacgacaaccgccgccacttcagcggacagagcggccaccatgggcgcggcagcgtggtggcggcgcgccctggggcagcggttcaacccagccggtgtggccgcggtggcggccgtcgcggcgtccaagccgcgcctggcgctgccgcacgtgtcggtgcaagacatcaggtggctcgactgggctgagctccgccgcgccgggttccgcggcgtcgttttcgacaaggacaacacgctcacggccccctacgcgcccgcgctctggccgccgctcgctgcagcatttgaccagtgccgtgcgacgttcccgcccggtgcgctcgccatctacagcaactccgcagggttgacggagtatgatccggacggggtggatgcgagggcgatcgaagctgtcatcgagggggttcatgtgatcaggcatgatataaagaaaccaggtggactagctactgaaatagagagttactttggttgttcagcctcaaatcttgtgttggttggtgaccgttacttcactgatgtggtctatggaaacaagaatggctttcttacagtcctgacagagcctttaaacatcactgatgaatcatacattgtcaaaagggttaggaaactggaggcgtacatcatcagttattggtacaagaaagggcacaaaccaatagagcatcctttgctcccagatgcaagaagaatagtgaagtttgacccatatgacgactcagtttcaaccagaatataatgtaatgatgtatcttgcacctgctcatcagagagtgagatctactgtttgtagcttagggtgtgtttgtttccttctaaattatataaactggattatggtggaagggtaagaccgtaagagagtaaaatattacattgtgacaacaaataagctgaaataaactaatattggatagcttattttagcttatttgtaatcccaaagtggtaccataatccaatttatataaacatacagggcctcagcagaagattacaagggat

SEQ ID NO: 89833 - DNA, 266 bp, Zea mays
  Clone ID: MRT4577_181930C.1
gagaagggtcgtggtccagagctccttgggtcccatgaaactgccctgttctctgtggctgtggacagtcgtctccagctgcatctgttgccctcacggcgttctgttcctgtgtggctcctgctcctgctgtgtgtcgggcttattattgtgaccatcctgctgctccagagtgcctttccaggtttcctttagcttccctgcttcctgggaatcaggagcctggacactgcgtctctaagacagagtggaggctggactccctt

SEQ ID NO: 89834 - DNA, 299 bp, Zea mays
  Clone ID: MRT4577_181931C.1
ccgggtacgatccctacagggacgctacgcggagggcgtcacttcttctcgcgacctgtacaatgatggatcgctggaggagctcgaaggtaaggggaaggagaacgactgcgacgctgccaacgacaacgacaagagcatgatgaggcgcacgctggtcgtgcacaccgactacatctacacacaacatcaccacggttgatacaatataatccatcctacgctacatgcggtggtctcacatcagcgctcgtgtgctgcccagcatcagtcgtgaaaacgcgtgcgtgtgtgtgagc

SEQ ID NO: 89835 - DNA, 1128 bp, Zea mays
  Clone ID: MRT4577_181932C.1
ccaaaaaggggttcgccgcaggccgcacacggcacaccccctacacgtcccaagtcccccatggagctaccagcaccgtcctccgcatccttcttcctcgtcgccgttgtggctggtgccactctctttctcgtaaccgttctccggctccgcgcgcgatcgacgcgcaagtacaggctcccaccaggcccacggccatggccggtgatcggcaacctgaacctgatcggcccgctgcctcaccactccgtccacgagctctccaagaggatttcgtcgccatggacatgatggacgtgctcttggagctcgctgacgaccccagccagctcgaggtccccatcacgcgggataatgtgaaggggttcactctagacctgatgggcggcggcaccgacacctcggcggtgactgtggagtgggccatgtcagagctcctgaggaacccagaggtcctcgccaaggccaccgaggagctggaccgtgtcgtcggccgcgaccgtcttgtggcagagggggacatcccaagcctcccgtacctggacgccgtcgtgaaggagaccttgcgcctgcacccagtcgcgccgctcctgactccgcggctgtgtcgggaggacgtgtccgtgggcggctacgacatcccggcgggcgcgcgcgtcttcgtcaacgcctgggccatcggccgtgacccggcggtgtgggaagctcccctggagttccggccggagcggttcgccgggagcagcgtggacgtaaaagggcagcacttcgagctgctgccgttcggctccggccgccgtatgtgccccggcatgggcctcgccctcaggatggtgcctacgatcctgggcaacctgctgcacgccttcgcttggcggctccccgacggcgtggcggccgaggagctgggcatggaagaaacgttcgggctcaccgtgccgcgcttggttccgctccaggccgtcgctgagcccaagcttcctgctcgcctgtatgctgccctgtgatgcatggaagcctatcttgttctgcttaatatttttctcttagtaattaagtggtttattagtcgtttagaacatcgtatcctgggactatcatctgaataaagcattgcacgtgatagct

SEQ ID NO: 89836 - DNA, 303 bp, Zea mays
  Clone ID: MRT4577_181933C.1
gacccgacccacacatcctctcgtcctttgaggacgctaccaagacctacgagctcacctgggctattcgtctcgcttccgaggcttcgcgtgcgcccaaggcctaagcgtagaaggctaggtagagtggcaggtcaggtagtgtacaggtgattgaacagacgacatcggaggccttagtggctttctatactctctcccaattttcgattcacaacatctgctccacacaccatttattattggtgatgtgaggctgaatgccaaaagcaagaacgatgcatacatgtatgatgaccctca

SEQ ID NO: 89837 - DNA, 1915 bp, Zea mays
  Clone ID: MRT4577_181934C.1
ctcgaggccggccgggccgggacgcgtgcgtttttttttccaaaaaggggttcgccgcaggccgcacacggcacaccccctacacgtcccaagtcccccatggagctaccagcaccgtcctccgcatccttcttcctcgtcgccgttgtggctggtgccactctctttctcgtaaccgttctccggctccgcgcgcgatcgacgcgcaagtacaggctcccaccaggcccacggccatggccggtgatcggcaacctgaacctgatcggcccgctgcctcaccactccgtccacgagctctccaagaggtacggcccgctcatgtccctgcggttcggctcctttcccgtcgtcgtcgcgtcgtcggtcgacacggcgaggctcatcctcaagacccacgacctggccttcatcgaccgtcctcagacggcggccggcaggtacaccacctataactgcgctggcctcttctaccagccctacggcgcgtactggcgtcaggcgcgcaggctttgccaggccgagctctttagcgcgaggcggctcatgtcgctcgagcacgtccgcagcgacgaggtgcgcgccatgctgagcgacctgcgtgcggcgtcgtcggcgccggccggcggccacgacgcggtgacgctcagggagcacctctacatggtgaacctcagcgtcgtctcgcgcatgctgctgggcaagaagtacgtcgtcgaggggtctagctcgccggcgacgcccgaggagttcaggtggctgatcgacgagcacttctttctcaacggcgtgctcaacgtcgcggacatgatcccgtggctcagccccctggacccgcaagggtacgtcaagaggatgaagaggtcggccaagatgctggaccggttcctggagcacgtggtggacgagcacaacgagcggcggcgccgagaaggagaggatttcgtcgccatggacatgatggacgtgctcttggagctcgctgacgaccccagccagctcgaggtccccatcacgcgggataatgtgaaggggttcactctagacctgatgggcggcggcaccgacacctcggcggtgactgtggagtgggccatgtcagagctcctgaggaacccagaggtcctcgccaaggccaccgaggagctggaccgtgtcgtcggccgcgaccgtcttgtggcagagggggacatcccaagcctcccgtacctggacgccgtcgtgaaggagaccttgcgcctgcacccagtcgcgccgctcctgactccgcggctgtgtcgggaggacgtgtccgtgggcggctacgacatcccggcgggcgcgcgcgtcttcgtcaacgcctgggccatcggccgtgacccggcggtgtgggaagctcccctggagttccggccggagcggttcgccgggagcagcgtggacgtaaaagggcagcacttcgagctgctgccgttcggctccggcccccgtatgtgccccggcatgggcctcgccctcaggatggtgcctacgatcctgggcaacctgctgcacgccttcgcttggcggctccccgacggcgtggcggccgaggagctgggcatggaaaaaacgttcgggctcaccgtgccgcgcttggttccgctccaggccgtcgctgagcccaagcttcctgctcgcctgtatgctgccctgtgatgcatggaagcctatcttgttctgcttaatatttttctcttagtaattaagtggtttattagtcgtttagaacatcgtatcctgggactatcatctgaataaagcattgcacgtgatagctagcagagatatcacaagactatcaccaagatccgaaggcttggaatttttgtttggaaaaaaaaaaaaaaaaaaaaaaaaaaaaaaaaaaaaaaaaaaaaaaaaaaaaacacagggc

SEQ ID NO: 89838 - DNA, 226 bp, Zea mays
  Clone ID: MRT4577_181935C.1
ccaaccccccattggggcaatttttatgtttttttaaaagagcactgaattcatccatccccctttagctttcaagctgcaaagggggactgatggggttaaacaccccaaaggtccttgccatgcaatgcggccaacttaaaagctaagaggaggcccccaaccctatttggttgctgcccaaaaacataggattaacctaaatgcttgaagatttattttaaac

SEQ ID NO: 89839 - DNA, 764 bp, Zea mays
  Clone ID: MRT4577_181936C.1
tttcagcactgtggcgagtcaatccatatcttcttgatcacaccactgtcttcgaacactcgatggcgatgtatgagcgagtcaaggtcgccaaggacatgaacaatgacgttgacaaacaccaccgcaaggttctccgaagacaacataccatggtgatcacttaaacctcactatccggcatgctgcgcgagcgatggcgcggccatgaacccgtatctccgggcttatctacgaggaaacccgtcacgtgctcaagatcttcctcgagaatgtaatccgcgacgcaatcacctacacccaacacgctcgacgcaataccgacaccgccatgcatgttgagtacgcccacaagcgccagcatcgcactctgctacgaagtcggaggtcttagcgcatcatcttccactcatgtgcagcctgtgcctgcggcgtttcctcacttccctctgtcttgcttggcttgatgtacagagatatccaattaaaatatctctgatgggcttcgttattgggtgtaatcatgtgtcccgtgagtgatgggaaatcaagatcatgatgtatctttctttgcagcaatgaaatgacttaatcgagatcaagatgtatctttctttgcatgaaagaaactttgctattgctcccactgataggctaatcactatgcaggtttcatgaggtggttcatgtattaattatgctgctatattagctattttgatggtgtgtcatatcatctaagaacaagttttatggactttgat

SEQ ID NO: 89840 - DNA, 3234 bp, Zea mays
  Clone ID: MRT4577_181937C.1
ggttcgccctcacccgcaaataccgacactgtttgttcaccggcaaataacctctacctatgacgcattgataacaagtacacgagccataggatagaatttctctacatccaggacaacaagcagctaagaacatgctcgtttgttactgttgtgcactttatactactggtaactttcagaactagtatggccttgatgttagattgtcgcttagccagacattggttcgtattcaccacagactggggatccttctgatggctctgccatggttaaattgaattgtttagctgctgaggctagatgcagatagcatagcaggcaacatttgttcatgttttttaagcaacgctgacctgtgggcaccagaggaatatttaaattaggtttaattaccttgagttgaggtgaggtgatcgagtttctttggaggagaaagaagttacttatctgccctaggacaactgattttatactaaagctgatgaaaactgcacaatgtaaatgttcaacaagaaaagggtcgcccctctgaggtgaactgtttcttgacaacatttagttccatatggcccattgttctgtactcatcaaatctgataaaaaaaatttcccttgttggagttttagcagaaacatgtgtcatttttttgaaaaaggatcgttattttctgagtgtttttttacatgtcatactcaacagttcgaaaactgccgtatctatattatcatgtgtgtgttctttccacacggagggtggagagcattttgggaacactattatacgtctatacctgtcatatatttgctcgtcaacataatctgaacagtatcacataattttgcttcctgggggtactttaaagctccccgatgcaagggaaaagtatggaaaatcgttttatgtctggcactacctttcttctagaaacttagccagttgtctactttacaggtacagcctaacgatcgacttggatgtcaaagcatgatttcttttgttgtaagctcgtagttggttaagtattgttacatgtcaatacttctatctgaggaaataattttcatctaatataaacagctagtggttcaattggtttgttacatctacaatttgccagtacgtgtgctcattgaatctgataaaaaaattgttatgtgaaggctcattaccctttctttttcttataagccccttggagtttcagcagcaaaatgtatccctttgaatctgataaaaaattgttacatctacaatttgccagtacgtgtgctcattgaatctgataaaaaatttgttatgtgaaggctcattaccctttctttttcttataagccccttggagtttcagcagcaaaatgtatccctttacttttcaatagttgaaaaatatgttgtaactatattatcttgtgtttttttcgatgactcgtggttgtggtggggtggggaacactttactatacctgacatatatatgctcttcatcatcaatcaacataacaatatcccacaatttcacttcctggggggtgggggcatctaaagttcaaaccagatgcaggaaaactgtatgggcaatggttttacgtttattctagtactacctttcttcaagaaacttagcactttaaaacctaccaatcgacatagatgtcacagcatggtttcttttattgtaaataagtagagttgatggatgattgctgtttgttggaaacgtagtcaggtgtcatggtttttacacagtagatctgattgagcttatgtaggccaagcataatacatgtcaatacttaagaaacagctattggttcagtacttcagttggttgtttctgaaactagaaatgttcttttttagtgatcaggagcggttgcccctactgtaataaacgtagataaaaaaagatagcagaatacaaaagcagagtttaataaatgtaaaaagaaacaaagaaaaaataatgctattagaaaaaatagttagtacagaaaaaaaactcgacctgcgagggtaagacaacacccggttattatattaagaaaaataccttcttacacaggtcaagaaaacctctgaatccctgcctcaaccatacgcagcggcacgacaccgtaacccatgtgagaacacgaccgcgaccgggccttagacttgtgctttgatgtgggacagatgaggaggatttttttaaccatattctgaaattcgcttccatggggagttgaactcaagacctgaggagtactactcagaccacctaaccaacttggctagaggccctttcgctagttagtacagataaaaggtacctccagatatgcctccgttgatgatcattttattttttatagttacgtgcagtcttaatttggtccctgttttcaaattgaccaatgcatccttctagcgtagatgtgactacgtgaatatgtccttagacctatgctgtgctaagcttagtgaatcatgttagtttacgagtacatcataagctgggattggatcatggtctggggcttcaaacattggtccaagggcctgggatgagttggatagctgctcctgactgtttggctcaaattcttctgaaagcttgtactttattgtaaggaagaagaaaaaaaacttgtattcctgtcatgcacaggacatgtcacggtaaatgagatgtctccctaacgtccacgcttgatgctgttctggtgcaggatctgaagtgcttcgtgttttcactcatcaacctccacttcaagatcaagccaatccagtcttgagctccatctcaagccttcatgcgactgttttggagtgttttaagagagaaccttgtaccatgttaagatgatgttgagcttgtgacgatgcgcacggtagaagtggaacctttttttttttttgcggttggattgtgcaaactgcgagcagtagtgagtgtggtatatttgtgccttcagtttcctgttgggtggagtgttcttgtcgtttggcacggcacactagtattcttctctgttatcagcgctctgttgaaggatggaatggatatccagattgtctgggacttgtggtgatgcagatccagccagtaactagtatgaatttctctagtggggttgttgggctgctaaaaaccgccggactgagcaaaggaaccttgcgtctttgtgtaaagcagcagtcgaatctgtgtgtgtgtgtttgtgattaaagtcgtcattcggtcc

SEQ ID NO: 89841 - DNA, 425 bp, Zea mays
  Clone ID: MRT4577_181938C.1
ttttttttttttttttcgaaacgagatagtcattcaactcgtcgagacgctttcagctactactaatcacggctattaggcccggttttgtcgggcgtttttattgctcatggtataattttcccctgtattaaaatatagggaatcgttggtttattatactccctatatacgtaagaccgtaatttgaaaaggaacagcgctagatgcgaggtctacgaacgaacgagctctcgcggggcagccatgtcgaagcaatggtccttctgcatgctgccaaccgattcgtttcccgttcgacgcggttattatccggccggctagaagttaagcatctcccagatgagctccgggtcgaacgacggtatccgttccagcgggcagtcggcgacgtccgaggcggtgctcacggacagcaccccgtc

SEQ ID NO: 89842 - DNA, 654 bp, Zea mays
  unsure (1)..(654): unsure at all n locations
  Clone ID: MRT4577_181939C.1
aattcggcacgagggaccgaccaagcgtgaagcgccctttgtctcgacgccgctgccgccgcaaagactcgcgattcgcgagagaagcggccgcagcagccgagcttctctcgcccccgccgctcctctcccactccaccaccgcgcttcagattccacaggtgagaggcaaaaggtaagagccgaagaagcgagccgaggcgccaccgctctcccgcctgcttcctccgccggcccggccgtcccggccggcgagcgagagccaacgaactgcgggccgaagcgaactgccggggccaccgtggggcggagatccgcaccggacctcccaccggttcctggttgtggaatacctggccaacccctttttctatgtgtcgctgctggtcataaaacccaatagttacttgngagatcacatgcaacaaatatgcacactaaaggggcttcttcagatgccatcagagttagcacctctagtgcccccagcacatcgagccatggttctgcacaagatgactatgattccttggggatgtgtacgtgtggggttgaagtcatttgtgacaacactgtagaagtggtcctgatacagtaatcaggtctaccgctaaggctgattntctattgcctaagcccctggagtcaagctag

SEQ ID NO: 89843 - DNA, 823 bp, Zea mays
  unsure (1)..(823): unsure at all n locations
  Clone ID: MRT4577_18193C.1
cacatctccacagctcacgattccaacactagctacatatatatgtagctttgccggctactatataaacaaaccaccaagtgtgaagtgtgtatatatagtgacagctactgcaatatatacatacgcgtcacctatatattagccaagctagctatatgagcttggttgcggcgccaatggcgatcgtcgacgtggccaacgcccagctgcagcaagcagcagcagcagctgccaagaaagacgaggacggccatgagcagcaggagtcgtcctacgactacggcgcgctgatgaaaggcgtgaggcacctgtcggacagcggcattaccaggctgcccgacaggtacgtcctgcccgcgtccgaccgccccggcgtccttgccgtctcgtcgtccgtggcgggcagcggcagggtcaagctccctgtcgtcaacctcgccggcctccgcgacccctgccagcgcgccgccgtgctggccacgctcgacgccgcgtgccgggagtacggcttctttcaggtggtaaaccacgggttcgggagcgacgtgagcggcgggatgctggacgtggcgcagcgcttcttcgagctgccgctggccgagcgagcgcggcacatgtcggcggnacgtgcgggcgccggtgcgctacggcaccagcttcaaccaggccaaggacgacgtgctctgctggcgcgacttcctcaagctcgtctgccagccgctgcaggcggtgctcccgtactggccccagcagccggcggacctcagggacgtggccaccaggtacgccacggcgagccaccggctggtcatgggagtca

SEQ ID NO: 89844 - DNA, 378 bp, Zea mays
  Clone ID: MRT4577_181940C.1
ttttattgcatggtctgatagactctgctcttagctggatggatacaccgggagggggtgctgggtcagcatgacatcggctggcgaggacaggagcagggttatctcatctgtctcattacggagcagaacatcggctggcgagcgcgggagcaggagaaattctttgggatcactaaggtgcatttggaacagaaagctcagggtcaccagccatcatcccttcaagctgagaactgaccaaaggtgaaagtttagggaacagtcattcgttcagaaggagcatgatatgctctgtaaggatgagtataaacgtatttatattgcacaaggattgccatggactaccgatgaacccgagtgtttgataaagcctgc

SEQ ID NO: 89845 - DNA, 403 bp, Zea mays
  Clone ID: MRT4577_181941C.1
ggggggagggtggtacaactggaagacggccagatgctcttttgacattcgtttgccttaatttcatatgcctccctttatgtatgttaacaattcgaatcttgggtcatggtcactttttttttctgttttccctgtagacagcaggtgctactttttgaagtgatcatggaccaaaaaaaaaaaaaaaaaaaaaaaaaaaaaaaaaaaaaaaaaaaaaaaaaaaaaaaaaaaaaaaaaaaaaaaaaaaaaaaaaaaaaaaaaaaaaaaaaaaaaacagatgcgatatagccggggcgctaaggggcgcgtctgagagcgaatccaaacggacagggggggcggttggttagccgttgctttggcccaagcccattcgcccaaaaggggcccagtttacaat

SEQ ID NO: 89846 - DNA, 267 bp, Zea mays
  Clone ID: MRT4577_181942C.1
aggcagggagccaggcctggcgagcggggtgtgtcgcgatgccggagctggcagtgcagaaggtggtggtccaccccctggtgctgctcagtgtggtggatcatttcaaccgaatcggcaaggttggaaaccagaagcgtgttgttggtgtgcttttggggtcatggcaaaagaaagtacttgatgtatcgaacagttttgcagctccttttgatgaagatgacaaagacgattctgtatggtttttagaccatgattatttggaaa

SEQ ID NO: 89847 - DNA, 115 bp, Zea mays
  Clone ID: MRT4577_181943C.1
gccccatccggccatcccacagcgaatctcccaaaccccgcgtccctgcattcccaattgggagcggtatcacgtaagagatcacattacagcgacctgttgctgagcgagtcca

SEQ ID NO: 89848 - DNA, 944 bp, Zea mays
  Clone ID: MRT4577_181944C.1
tcccaccctcattctctcccctgtctgctgtgcgaaaccgagatcccaaacttacttgatctatcttctatctggctatttgatctgatctctacttatttctaactgtttgcacaaaaaggccgtacatgtgtgcaccacgtccctttactagatccgcccctgatttgaacaaacatagctataatcggcaggaatgggcctgtggacattgctggagggttttttgcttcttgcaaatgcgttagcgatattgaacgaagaccgcttccttggtccaaggggatggagcatgtctgaagtctcaggaaacgggcaaaccaagtcgttcaagggccagatcgtggggcttatctacgctacgcagtttctgcggatgcccttaattgctctcaacgttctcatcatcgttgtcaaattggtgtctggctgagcctgatgaattggtatctgttccacctttatgtaagagctgagagatcccaaatttaattgtactcaaggttgctgtaaatatgctgcttctgttgattctaatgtggatttctgttattgttgtcgtaaattaatttggtcagaaaatgactgtcgatattcatactatccaagcgggcactttattgggggtgtctttcttttgtacattaatgaattcaagacatatttgcaacgtccttgtatgttttgtgatcgcttcctctccattttatgcttatagtgcgtttcatggttgggtactgctgttggttcgaggcatttttctcatgcctgaggttaagtgctaatgcaaaccattgccgatccttctgtttggacaaaaaaaaaaaatcaagggcggccgcctttttgtgagctctacttgggtgaaaacctcatctattgttgacttcttgcgccgcttcatcggcaatgggagcgtttcattttccaacactgtctttcat

SEQ ID NO: 89849 - DNA, 374 bp, Zea mays
  Clone ID: MRT4577_181945C.1
aaaaaaaaaaaaatggggcgggcaaattattggggcaatgggggaacccggggcccctttttggggggtttaaaccctggggggacccttacaaaaaaaaaaatgggggggggggggggggtttatgggggtttccacaaggataagctaaaggggcgatttaaaaagggggggtaaaataacggggaaaaaactagaccttatagccgggaaaggggaaaccctggccaaaaatttcgcctccccaaaaccagggttaaagttcaaccccaaaaaaaggggcaaccccaagggccccaacctggggggccttccgggttttccaaaccggggggaaaccaaaaaaccccttcaaaaaaaggaccgggggggcc

SEQ ID NO: 89850 - DNA, 845 bp, Zea mays
  Clone ID: MRT4577_181946C.1
ggcgattgggttcctcgaggccggccgggctttccattcccaatcttcccgtctccaagtctccggtctcgaatccctcccttccagaacaagacacctgacgccgccgcccccccgccagccgcacccgtccataccataccatacctccggccgctcgtctcctatctcgtcaccttcgcccggcgctcagatctccgccgcgcctctgcctgatccccccacccccattggagggagacacatcccgcgtgggcgcacgaggacctggtttttttatcaaatgcttgacaaaatgcttgcttggtgatgtctggctatgatttgggtcctgtttatcatgcagttggcttctcatggcactcaaacagaagagacgatgcagtttgtgccccattgtgatcatgcagaagtgtcagattcacagtcaacaagttcacaactaaacctgatagagagatcaacagagcatctagcctcatgtgaaatcaacccagtgagcgttgatgatgacaacgacaatgaacatatcgatgccaatgaagaaactcaccttgttattcaggacgttcctcaatgccggatttgccttgatagtgaaggtgatgacttgattgcgccctgccgttgcaagggaacgcagaagtatgtccataggtcctgtcttgataactggagatcaacaaaggaaggttttgcattttcacattgcactgaatgtcgagctgcattctttcttcgtgcaaatgtcctccagatcgatggtggttaagattgaagtttcaacttctggttgttagggatcacacactaatcttcttattgtgcactgggtagtgctttca

SEQ ID NO: 89851 - DNA, 349 bp, Zea mays
  Clone ID: MRT4577_181947C.1
ctcggtgcatttagagggactaacgcacccgaggccgagggattgtctcattctgatcggagaaccaacggggctgctccttatgacttctcctgagtagactggtgcgaccacacatccctattcaacccagccacatacagcgagctgctgtcggtcacactgtcaaccatgttcatgggtgagagatcaacaaggacacctgggaacctcaatggtgcaggcctttgtatgttgtatgacaccaaccgtgcaatggatcctgctccttctactcggccatatgagtgaactactctctacaagggagaatcctgctagctgcccctaccctgtttgcaagacgcca

SEQ ID NO: 89852 - DNA, 412 bp, Zea mays
  Clone ID: MRT4577_181948C.1
ggggaaaaacaacagctaaggcatcgaaacttccattgcaggggagggggggttcacaaggggttcacataccaaaaccctggcagcaacatcttttaaacaccgtttccatttccaaataaactactttgggggtctaagggtatctccaacggcttgttcatcgccgttttcttttatttaaaacatcactttggaaacaatgcacaacaattttttgcccaacgatttgctagccatagcctaagcctaacattatgcccaggtaaatttattttcatcccaaacttttatcacagtaccctgtttcacctatacttggttggggcacctcttccaggatctcccatgttcttcaattgagggtcttggaaattctgaaggagacaagccccgttggggcagctgcaac

SEQ ID NO: 89853 - DNA, 793 bp, Zea mays
  unsure (1)..(793): unsure at all n locations
  Clone ID: MRT4577_181949C.1
gggtaccctncgaggccggccggaaaaaaaaaaaaaaaaccaccctttccattcccaatctctcgatctccaagtctccggtctcgaatccctcccttccagaacaaggcacctgacgccgcccccccgccggccgcacccgtccataccataccataccatatacctccggccgctcgtctcctatagtcctatctcgtcaccttcgcccggcgctcagatctccgcctgatcccccacccccattggagggagacacatcccgcgtgggcgcacgaggacctggtttttttatcaagtgcccgacaaaatgcttgcttggtgatgtctggctatgatttgggtcctgtttatcatgcagttggcttctcatggcactcaaacagaagaggcgatgcagtttgtgccccactgtgatcatgcagaagtgtcagattcacagccaacaagttcacaactaaacctgatagagagatcaacagagcatctagcctcatgtgaaatcaacccagtcagcgttgacgatgacaacgacaatgaacatatcgatgccaatgaagaaactcaccttgttattcaggacgttcctcaatgccggatttgccttgatagtgaaggtttgctctttgactatcagtgttcttaaggtgcctaggcgagcaagtgcaccagataaccgccttagtgcctagacgatgcctaggtgggtaaggcggccagttttgcccgagcgcttggacgcctaggcgttgcctaggcgacgccttaagacagtggtgatgacttgattgcg

SEQ ID NO: 89854 - DNA, 709 bp, Zea mays
  Clone ID: MRT4577_18194C.1
aatgttatcatttatagttgggtttttttttggggggggggggggggggcgctgatgctaattccctttctttctgaatttgaggttactgagctattaatattcctagttttgcttgctgttgctcataaaaatctatgtgccgcaaatcaattatctatgcacagttgttagggcagttttttttttacatttataagctttgctgggataatgcactctttgattctgggggccctttgttcggggaataattatgaaaaatgattttgtccaaaacgattgtattgcctatattgaacagtctgaaatgcaaagttcttacattttctggatttttcttgctgcatttgttgaacaacttagctaaacacatatcagttctgtgttcacataaactttttatctattgtggttgggactatggctgccctttttatattaaatagggaactgggcattaacttgtttgacatggggccatctctgaattcctagggtgacagggtacattcaagattcaaggcctaaatttgggaatgctgacatatgctgactttggagtcatctgtgtgaaatagttctgctaattaatataactgcattttaacctgggcctgggactcggtgggtatttattaccttgagtgcacatttctttaattgtttggagatgtttagcattaaagttgctatttatgggctacgt

SEQ ID NO: 89855 - DNA, 369 bp, Zea mays
  Clone ID: MRT4577_181950C.1
gcaaccacaagatagggatagggaccggtttattccatactgaacaaaataacattttaggggtcgggacacagggattgatttattttttaaataaaaggaacggggtttttttatacaaaacaaactttactttggggtaaagaaaggggaggggaaatcaaagccaatttccactaaaaacattgtttcttttttcctttgaagggcatatcaaatttacatttaccacttccctttacagaggtggttttttaattgctttccctcggaaacggggtggagtaaaaccctttattttggggcgggaaccggttaaaaaataactttgggaatttggctgcataccacatgggggggggagagagc

SEQ ID NO: 89856 - DNA, 674 bp, Zea mays
  unsure (1)..(674): unsure at all n locations
  Clone ID: MRT4577_181951C.1
atttctcttgtatcggacccttgaattttaagtgttgttttaaactaatcaatcttctctacacttggccttgtatgaagtatccatgatatatagcagagcctaattgggctggaaggtaagtttcttttaatgtttgagttctcatctttagatgaaagacaaatgggacaccgttgcgttttcaagattataaggatgtaaaacttttaaatccgatttactagctcaatgaatatttcactttctttcccttgtcaaaatctcttatcctgggtgttaagcactgcgaactttggcttattttgccttcttgtttttactggatcatacacgcttccattttgtacctgttcgttggagcatagttcttgatttatgcattaatgacatatgatatatgaattatggaagagtaaaaaatgagtgcatgatcatacgattcagaaatgaacttttgagctgtaatacatagcatatgatttgtctggaaatctgggtactgattgaattcttgatcccattagcttgactattcttcgtaggatatacactatgagtaggacttctcatcttcatctatcagccttaacagtaaacatgggcatgctntggatcaatgtccatgactatagctntggaagtgttgtataccagcggatcatccagttgct

SEQ ID NO: 89857 - DNA, 573 bp, Zea mays
  Clone ID: MRT4577_181952C.1
ccaactcgtgaagagttggtttgtaaactcgttaacttccctttaatgaagaactatcgttgatccccccttttcgatgacttgtcgttgcttttcctgaatgttgaactgattcttttaatgtagtagaaacaacgccgagcgatgtgtaggttgtcatcagcgtttttagaagtaacaccaagcaatcgaacacaagatccgcgttttagaggcaatgccgaatgatggaaggtcggcatcggcattttagaagtaatgccgagcgacagaatacagggtcggcgttttagaaacaacgccgagtgattgaaggtcggcgtcggcatttttagaagtaatgccgagcgattgaacacgtggtcggcgcgttagaggacacgccgagtgattgaaagtcggcgtcggcattttagaagtaatgccgagcgattgaacacgtggtcggcgttttagaggcaacgccgagtgattgaaggtcggcatcggcattttagaagtaatgccgagcgattgaacacgtggtcggcgttttagaggcaacgccgagtgattgaaggtcggcatcggcat

SEQ ID NO: 89858 - DNA, 287 bp, Zea mays
  Clone ID: MRT4577_181953C.1
ggatataatcctgcaacatgggcgctggaagttagctctcctctatccgaggctcgattgaacatgaattttgctgaaatttatgctaactctgtgctttataggaaaaatcaagagctcatcaaggagttgagtgttccctcaccagactaccaggacctgtcattccctacaaaatattcgcagaatttctacaaccaatgcgccgcgaacttttggaagcaataccgttcctattggaagaatccgccctacaatgctatgcgctacctgatgacatttctctt

SEQ ID NO: 89859 - DNA, 245 bp, Zea mays
  Clone ID: MRT4577_181954C.1
ctggaccttcagaccgtcttacgaccgagtcgatccaagcactgaaacatgcatgaatgttgggtttactcacgcgtatgggatccatgggcaatctaatatagacattagcgtggcatgaccaaggaccaatcgcgagcctctgctcacacgaccactaatgccaaaacacacgggtacgtaggagcctcacataagggcggttccttgtgagtaatttatgtatatcattaatacattctcgt

SEQ ID NO: 89860 - DNA, 270 bp, Zea mays
  Clone ID: MRT4577_181955C.1
cttagtaagatttgcatctatgcattaaggactaaaatcataagtgttcattcaaattggaatggggagggtatcctatcttgggatggtacttaatatcttaaaaaaacgaattactaatcgagattccttgccgatactctactctaataataagaaagaaataaagaagactcatctatttaatgaatagcataagattcattgagttcttgtcgcactcctttgtgaaagagtagaatgagaaagctagtgaatcttaaacccatt

SEQ ID NO: 89861 - DNA, 387 bp, Zea mays
  Clone ID: MRT4577_181956C.1
gccacaaaaaatttttcccccttttttttttttttttgaaaacaccgggggaaaaggtggtgacggaaaagtataccgggcggagcaaatttgttaaaaagagggaattgtaggcggtggcgaaaaaccccctttggttggaggaaagggggaaatccaagctgttttttggcaaatgcaaggagaaagggggggtttcccaggtggaccccacctagaaggggcggcggggtttgccccggggcttgaaaaaaaccgaggaaagccgggggggcttccacctgccccagggggggcccgccaacccccgaaaaattccaccccccctcaaacaatacagttattgggggggggggttaaccaaacaaattttggggaatctggggg

SEQ ID NO: 89862 - DNA, 229 bp, Zea mays
  Clone ID: MRT4577_181957C.1
gaccgacgcgtgcggtaggacgtcatcgagatctgcgtttaccttttctccaccgtcgacacgtacgtgtccaagctcaattacctagggtccgggggcgccatactcgaatggatcggcctgtagggacacttctacaagcccaacatcccgatcatgagaaccatactcgacaagctctccaccctgtgcctgcccatcttgtttaccgaaatcgacatcatcaaca

SEQ ID NO: 89863 - DNA, 769 bp, Zea mays
  unsure (1)..(769): unsure at all n locations
  Clone ID: MRT4577_181958C.1
acgcctgcaggttccggtccggaattcccgggtcgacccacgcgtccgcttcagctatccgaccgggaagtagctgaagaccgggcgatgggaactctggaggtctcgctccggggcggacccgaggccaccgtgcccccgcggtagaacgagcctgggtggcgggctccgggctcctgaggcatggaggggtctaaggcgtccagcagcaccatgcaggtgagcttcgtgtgccagcgctgtagccagcctctgaaactggacacgagcttcaagatcctggaccgggtcaccatccaggaactcacagctccattacttaccacagcccaggcgaaaccaggagagacccaggaggaagaggctaactcaggagaggagccatttattgaaactcgccaggatggtgtctctcgaagattcatccccccagccaggatgatgtctacagaaagtgctaatagcttcactctgatcggggaggcatctgatggtggcaccatggagaacctcagccggagactcaaggtcactggagacctgtttgacatcatgtcgggccagaccgatgtggatcacccgctgtgtgaggaatgcacagacactcttttagaccagctggacactcagctcaatgtcactgagaatgaatgtcagaactacaaacgctgtttggagatcctagagcagatgaatgaggatgacagtgagcagctgcagagggagctgaaggagctggccttgggagangagaggctgatcaggagct

SEQ ID NO: 89864 - DNA, 448 bp, Zea mays
  Clone ID: MRT4577_181959C.1
gctaagctctgaagccaagggttgtagaaaactgccgctatcagtagccgccactgcaaagtcaagcggagtactcctacatggattagagtggcagtgcagcaagatgagacctgtctgaagaatttggaagctgaaggtgagcgttggcggaaaccaagtctccaactgcacgcaaagcacaagatttagttccctccaatgtctcatcttcaaatgtctcaaatcaatgcaaatctcgaggcgttagtaggatcattattatcctccaaatacggtgttcctagttaagcaaagtaatgggctctttgtttgcaccaatttggcgtttcgtgttagacaatttcatatcgggtgaacatttccaaattcactactgacaatgtcatatatttgtggtttcagattggactgaggggccatcatttgttttttatgaagtaattgg

SEQ ID NO: 89865 - DNA, 339 bp, Zea mays
  Clone ID: MRT4577_18195C.1
attccgaaggacccattttattccggaaacagaagggcaggctttttccggggcctttggtagaagctcacatagggtcaaaggtcaaactggggggagaaacaggcgcccaaaacatacaggactttggtttaactggggacacgaaatcctttttttctttttccctctccctttccggtcacgggcttaatttaggaagactggcggggctccgggcgcccaaaggcggggttggggggccccgggatgtcgaaggggggccttagtttggggccgaccctaagggccccttgggcaggggcccacaagaagttgctgttgaggtcccgggggccc

SEQ ID NO: 89866 - DNA, 177 bp, Zea mays
  Clone ID: MRT4577_181960C.1
gtcccaaacttatttttttaaactttttcacgataaaactgtttaaaaattatgtccctaaattactaacataaaccaaccattctcttttaaattcccttataaacaaaatcctacggtaaacaattgaattaatccctccaccactaaattcaataaaacttaacctcatccatt

SEQ ID NO: 89867 - DNA, 847 bp, Zea mays
  Clone ID: MRT4577_181961C.1
cccccgcgtccgcccacgcgtccgcccacgcgtccgcccacgcgtccgaacccaaacatctattagctaagctctgaagccaagggttgtagaaaactgccgctatcagtagccgccactgcaaaatcaagcggagtactcctacatggattagagtaagatacttagcttggccaaggagggaactccgagctaaaacttgggcaattgaatttgagaaatggatggaaccaaatttgattgagaaagaaaaggcaatacttggtttcctccaattttctcatgttcggttgatcggatgtgtaggtggcagtgcagcaagatgagacctgtctgaagaatttggaagctgaaggtgagcgttggcggaaaccaagtctccaactgcacgcaaagcacaagatttagttccctccaatgtctcatcttcaaatgtctcaaatcaatgcaaatctcgaggcgttagtaggatcattattatcctccaaatacggtgttcctagttaagcaaagtaatgggctctttgtttgcaccaatttggcgtttcgtgttagacaatttcatatcgggtgaacatttccaaattcactactgacaatgtcatatatttgtggtttcagattggactgaggggccatcatttgttttttatgaagtaattgtgcaataaattccctataaaaagataactatctacaagtgtgctagcagtagaactgagcatttatttgtgatgaagttaagtgtttctcaggtatgcaatacttggattattcaaatttatttctagtaacggaatataaatgtacttgattatatcatttatgccaaaaaaaaaaaaaaaat

SEQ ID NO: 89868 - DNA, 470 bp, Zea mays
  Clone ID: MRT4577_181962C.1
tttttttttttttttttttttttttttttttttttttgaaaaaaacaatagccaggtagtgaacttattcctcctaccgaaggctgagcaggcgcacacatatagattactgtagcctattgatacaaaacatataccaaaagctttactcttaccaattgtaaggacgatggctaacaagctcatggaacacatttggaggagccataactctaagctggatgaaaaactccacaaggttctactggatgtaggtagcttgaagtaaaaaatagcctaaccaacaactatcgagcattgtaagtacacagttcaggaaacaatattactcatgcaaaagtgggaaaacccaaaatccaagcagtgtcgcggctaggccctaacgcgagggccacgcggtggaggaggtcaacaagggaggcggcgaggtggggctggtggctatcaccaagcaggtgggagaggagacg

SEQ ID NO: 89869 - DNA, 118 bp, Zea mays
  Clone ID: MRT4577_181963C.1
gtcatacagtggatcaaccgtagcttgtacttcccagctcccccactcttgaagggctactgatacctttcctattgcgcgatctcagatccattcatttacgctggttcaacctact

SEQ ID NO: 89870 - DNA, 504 bp, Zea mays
  Clone ID: MRT4577_181964C.1
ccacctatataaaggagggtttttaaaaaacatattacagggtttgggtctgccacccacggggaaaaaagggaaaaagacctccccgggttcccgtcaacaaaaccccacaaaaatggggcccgttcatttgtagaattttgggaaattgggaccccccgccgtggacccgcaggttttttttaggggaacagggccaactttcccgtttggttccttgaaacagtacccgcatttttagtttcgggggcgaggatggccccctaaagccggcctaaaacttggagggggacggggggcaactgaaactgggacgcaatctcctggatctgtttccggacgctaatgtcaatcaagttggacccgtcggggccgtactgcacgggaaacccggcaatgacccccggttcaagctgctttttgaggcggacgtttttggccccggtctttttttggacgggctgcgcaatttgcgcgaggccctgcgactggggctgccaacgg

SEQ ID NO: 89871 - DNA, 251 bp, Zea mays
  Clone ID: MRT4577_181966C.1
aaaaaaaaaaaaaaaaaaaaaataaaataaaaaaacaaataaaaaaaaaaaaaaggaagaaaaatacaacatctttcaaaattccaaaaaataaaaaaacaacaaaaaaaggtcttccattttatatgatccaaccttcattactcttacatccactttattacctaccttatatcttcaccaaactcaaattcatttccccttatttaacaatttcctcattgacaaaacccttgatttccccaactaaa

SEQ ID NO: 89872 - DNA, 213 bp, Zea mays
  Clone ID: MRT4577_181967C.1
cgaccaccactgcgccattggcacagctagagccaacctgaagagcttgcagttactgagagtgtcgctgagagagagaggatgcggcggcagcggaggccatgctctgctgctgtctcctgataacagccgcctgtaaacccctcctgtgacggatccttctcgccggagaacccagcgccacctccacctcctccccctgctactccgcat

SEQ ID NO: 89873 - DNA, 521 bp, Zea mays
  Clone ID: MRT4577_181968C.1
gctgaaagagctaaactactactacacacacacacacacacacatcctacgcatcttctcgcagccatctttgtggaagcaaggcgggcaacatcgtgtggctagccagcaagggagagaaacaagcacaagcatggcctcaaaacctggccctctgagtcgctggccatggcaagatcttggaaactacaaggtacacacacatataagccggtattgttgcatgcatttttcttttaatttgcacggcaccaaaactgtcgttctatgcgcatgcatgcatgcatgtatgcaaggaaacgcaattaatggtggatgaaagaagaagaagaagaatgaagaaaaaaatggctgcttcttgcactgcatgttaagtgtaacgaatagctgacgatgcttatttgttgcctgccctgcctgtgcactgacgacgaccaactgaataatcaagtacgcgctggtgggctcatgggcggggcgcagcacgtacaggttcttgaggagcgggagcggggagcggg

SEQ ID NO: 89874 - DNA, 799 bp, Zea mays
  Clone ID: MRT4577_181969C.1
gccggccgggccgggaccagtcaaatggacggcgcggatatcccctcccactccgccgccgatggcgaccggcctccggagaacgcggatgacggcggcgtggaggacgagcgtgccgccgcgccccctccggagcggtgcgaggcgttggcttccgcgatcgcaggggtgctgtccggcgcgctgcgggagcacgaggagcgggcggccgccaccgcccggagccaggacgaggtcgccgctgccatcgaccgcctcaacggagagctagacaggctattagagaatgcacccacaatggtaataatgcatcactcagcgaggatttccagcatccgcaagaggatttcagcaatgaacatgctgctcaagtccatacagcgacgcatagatagcatggatagaattatttctactgaccattcatctcctgtacagaaagccagtaatgaagttggaacaaggttctagcagaattctggtggtgtcccatcaattgcgcaccatttctgttttggtagagctgccatccagcaatcacacggtgctgtgcatagaagtgagacgtcataatgtcgattttttccccagagacgtgtcatcaaaatatttcaatcctttttgtagcatattggagtggggaaagtcttttgtactggatggtcaatgttgcagacaacgaatcgtgctttcagctttggcggttacccttgtattcaaacatgaaattgtcttcagaaatcatattataatattgtccccggttgagcggtcgaaaaaaaaaaaaaaaaaagcggcc

SEQ ID NO: 89875 - DNA, 688 bp, Zea mays
  Clone ID: MRT4577_18196C.1
actgcccacctgccccttctgcccgtgctgcccgctcctctatcctctctctctctctctccagcatcctctttctctccttcctcccatggagtcggcctagttctgcccgttgagagcgctcatatatcctcgagacctccagatctgtggcctgttgcagtctctgcctcctcacaacaacaagcccctgcagatggacaccgccatgcaccccgccgccggcgacgacgacgtcctcgccgacctgctcaccgtcggcaccggcaccgacaccgagggcattatttgtggtatgccagacttcaagatgggtggaaagaggggcgatgaatctgttcctactgatgctggtgatgaagatggcgaagatgatgacggggacgaggatggcgacttcgcggagggcgaagaggaaatctcggaaggagaggagtatgacaaccccaaggccagtgacgccaagaagaaacaaataggcgagggtgaggagaatggcgaggatgatgaggaagaacaagaggagcaggaaggtggaggaggtgacgacgatgatgacgacgacgacgacgatgacaatgaggacgatgacgatgatgacgatgaaatcgctgctgaagacgatgacgatggagtagaagaggaggatgacgaccaggaacaagacaatgacgaggaggacgacgac

SEQ ID NO: 89876 - DNA, 519 bp, Zea mays
  Clone ID: MRT4577_181970C.1
gggccactggaccacgccacgtacgaacatgcgcgtgcgtgcggcttcaccgtgtacgcgctcgacggcatcctccctgggcatgccgctggaggtgtagccgagcaacacgaccagcacgcggttgcgctcgagctaacccatggcagagatcgaccctgtgataggactgcacgatcacctgggttacgtttccttgggacaggctgcgcaggaactctataaccacataacctttgagcctgatgggttggatggcgccggccagtggggcgtctatataaagcttcagtttacacagggctgtgtattatgaaccatgtgtacgaagctggccaacttctgctcgaccgcaagcggtacttctgatggcttactggggttatggacgtggcacctgggactggtcgatcatgtcccaccttaactcaaatgactttctagggctcgaccgaagactagtttgagaactgaatcggttaagatcttatggattatttctacctctggtcttcgttg

SEQ ID NO: 89877 - DNA, 636 bp, Zea mays
  unsure (1)..(636): unsure at all n locations
  Clone ID: MRT4577_181971C.1
caggatgagtgcggtttcaanngctcaagggtcatgagggcggtccggtgtttcagaagaaagctctctcccatgctctatcatttccgtcagtgggagagggtggtctacagtacttgctcaatccaccaggcagagaacgaggatgtcataaactctgtcttgcccttagctacatccctcggatttgagctcgctacaccgttccctcagtggcaccgccgtggccttccagttttccaaggatctgaacatttgcttcggacggatcctgaagatggcctggagggcttcttcattgcattgtttgtcaggaaagcaggccctacttcagaagagcctagtgaagatgccacggtagaagtaagaaccaaacaagtgcgcgggaggcgaaatggggtcagggcgttcagctccttgaggctgtccaggatgatcctctggtgaccaaaggcgttctggatttaatttgatgtatcattgctatttttggtagtcaatgtggtaacaggtaggtttgaatctgttctgaattttggactcatttttttcttctactccagataatatgttgccatactccatgtccatttcaaattattagcacattttagctaatatatncatattataact

SEQ ID NO: 89878 - DNA, 253 bp, Zea mays
  Clone ID: MRT4577_181972C.1
caactaaaaccaaaacttttttgaaaccacccctatttaatgggccatacccaaaaaggaaagggggggggcgtaccacgcacatttacatttttaggaagaaaaagaaggtatggggggatttcccaaagttttggatcaaatgaaggggggaagggcagcggaaaccccacaggggttggggcggaagctgggcaaatggaacctgcccgggggggcgtttaaaagggccaattccccaaaaaggcataaa

SEQ ID NO: 89879 - DNA, 576 bp, Zea mays
  Clone ID: MRT4577_181973C.1
tttttttttttttttcgaacgcaaatgagtatttcaaacaatctgcacatctatcaaggctcgctcttagtgcaatcagaggccaatactcgcacaggatgacaccacggtgtggtacatgtatctcgagacagtctatcgagggacttgctcttaacatattgagtgaatcggtttgggtgcaactcatcttctcatgcttccgatgagttcacgctgagcctcgcgatcccgtgccccctcgctcaagcttccaatgctcctgagatcgcccaccacgtccttggctttgccaaagtacacctcctgcaggagattgcgcatcttgagttccatatcctcaaccaatcgtcccacattggcgatgtggctatcatcgttgtcaacagggagatcctgctcaacctggcgtgtcatgttgccactaaggtccatctcgcccaggttgccaccagccgtagacagggtcaggatcactgtcgatgtgagcttatagtgtgtgcttcttcctcgctcaattgcctcgaatacatggatggagtcccatacaccttcggaattgccgccttgggggga

SEQ ID NO: 89880 - DNA, 336 bp, Zea mays
  Clone ID: MRT4577_181974C.1
gaaaagtagggctgtgtcattaatggatctaaaacagaaaatgtacacataaatccatgtctatacaattgctctcatggataactcaagtcctccaaaaaaagcaaagcagtacaagaaaacacaccagttcttctaaaaataaatgttcaaataaaaagctcgttgccataacaaaacaagggaaatcattacagtaaacaaaagcttccaacatctcattcgatgcttttcctaatttacaggggtatgacttgaaaaaactgcatcctaagctcatgtacagtttgcccaaatactaaatgtacgtgtcttaaacagaaaagggattctttt

SEQ ID NO: 89881 - DNA, 412 bp, Zea mays
  Clone ID: MRT4577_181975C.1
actggaatatgacgtttttgtatagatcatagatcattaaattcgtcaatatagataagcaaatttaaacggacgtccattgcactaggtacagggattcagggaatgtttggcaaattatgctgcttcctcacccccttctggagccatccgccattgttccgatagcatgatgtgttccaaataatggagtttgggcaggttattggcttgactacaaacatcctcgagtacactcgtttctgggcgatgcctttgatattatgctgcatgctttcttttgagttcttgacttatgaagtacaatactttccgttgtagtactacaaagttttgatgtttgtctgtatatgatgcatacacactaaaggagcttgcttgtttagtttctatttactaacactagacgtga

SEQ ID NO: 89882 - DNA, 596 bp, Zea mays
  Clone ID: MRT4577_181976C.1
ggaccctcgaggccggccggatacacactttcttcctacatccaccaataccaatcaccactcggttccaagaaaagaaaaaatggctccccttatgtcctacatcctggccctcggtgccctggccagcaccgccctagccacacctacctaccctgccgagccagtcaagtaccaaaacaacactctgtacacctacagggagcaaggctgcacgggccactccttcaggttcgtcgacttccagcccaacgtatgcgccgtcaccatcacccgccccggcctcaacatcagcgaagccatcgccgccaaactcacgctcgtcaagtccggtcgcctcgtgcgcaccgaagtcgggtacacgaaccccaccttcgtcgcgtggaacgagggcccagcgagcaactcggatggaccccttcagtgcggcacggttcgcgattccgaggtcgtcaagggcaacacgctgtgccttagcactcctgacaacgaaaacgaccacggttacagctacttccgtgacgatagcacggatagttcgtctggcgtgcagaagagggatgcgccccgctgcactggcgagcagtaccctgact

SEQ ID NO: 89883 - DNA, 343 bp, Zea mays
  Clone ID: MRT4577_181977C.1
caggatccaacaggcaatcgcagcagggttgaagaattgggtattcacatactgaaggcccgctggtgagaggtatgggagaagaaaggaagctataggatcttgcaagcattgtgggaaaatggtctacgacaccttacatattataaacacgatctatactcatagaaacaacaatttcttacattcaaccaactggctgaattgaactctgctgattatttgcaacatcaactaccattcagtcagctagctgatgcctacccccagcaatttctttcattcaaccaactggcaggattgaactctgctgcttatttacaacatctacaactaccaccat

SEQ ID NO: 89884 - DNA, 340 bp, Zea mays
  unsure (1)..(340): unsure at all n locations
  Clone ID: MRT4577_181978C.1
cgggtttgacccacgcgttctgaatatttaatttcctttttctatgctggtatgctatagcnggcgaaaatgtgaatcacttgggcagtatcttaaatnttaagatagtgtgtaacatttgtctttaagttatagcnccgaaccattttacgntgggangtnntnantntttgcnncngagtgtcntgntttaggttgcgggggggggtgggtgttggntgtcttaggatnttctggttcttgtgtgtctgttggtggtntggtttggttttagggggtttgcggcttgaggcattagttccattgngttgcgtgggggggtgggtgggcgttctttgtg

SEQ ID NO: 89885 - DNA, 732 bp, Zea mays
  unsure (1)..(732): unsure at all n locations
  Clone ID: MRT4577_181979C.1
tccaaaattaagggtaattctcaaacctaacctgcattcatatttaatttcagttttgtaaaattatcgaaagaaactatgccagccaatttaggcagcttgtattttatttattaaaaaggaataagattacaaggggctaaaaaacccttgcagaatatttacaagaaaggggagcgggggagagagaatacaattcaaatatgtccacaaaactggaagctggagagggagaggcagaaggaggagagggagactgaataatattacaaagaggttggtgatagttagtcttatagtatgaggtagccgaagttgcaagtggcaccagcaacgaataagttatcttagtataatcacatgtttatgaagaatacacattatcaattgtcaccggttccctttactttcaggtacctggagagcaaaccaacgcattggcaccctacccacactgtaaatctcaaggacatcttggatgtgaacaagattaacatgtctctctcagtccagcacaccatgaactttcaaaacatcaggngagaagaacatcagnngaggtctgagctcgttatggaggttgaagaaaatattcgagggagatgtccatttcggtaccacctttctaccccagaaagttgaactcacctacgtcgactcgaaaccactgcccatgggtccttctcatacaagatagaagatggggggaagctttttaaagtctcatactga

SEQ ID NO: 89886 - DNA, 1099 bp, Zea mays
  unsure (1)..(1099): unsure at all n locations
  Clone ID: MRT4577_18197C.1
acctctcantacttgcgggatacatcccaaccctagttcgtagtatacactcgtgctcatgtatcgcacagccactgcccaaagccgcctctctgcctcctcttgcgcgtccccagccaccgcagttcgccggtttgtggccgcctccgccgcagttcgccggtctgtggccgcctccctcctctgcagttcgccgatctgtggccgccgccgccgtcacctgtcagtcgtcgattggagcagccgccggcgcgacgtgaggtatgtgaccgtcagcctgccagtcgccggtgtgcagtgaggtctgtggccatcagcctgccagccgccgattggagccgccaccgcgaggtctgtggccgtcgttcgttgattggagccgccgcccgacgagccgtgggctcgtggccgatgccgccgtcgatttgtggtcatcagtcgctgattggagttgtcgcccgatgattggtgggtttgtagccgcccccgccaatagactgtgggtttgtagccgttgttgtcgatccgtgtcgcagtgccacccatcgatccacaggtcgacgccggtgtgtcttgccacctttgccacaaatcaatctgcagatcccatggcagcgaccagtgagttcaaatgtttctgcttctacatctactgaggccagtggcagcgaagactggctggagggaatggtcacagaatatcttgttgagacatttgctgattacttcggtgacgttaaaatgtatattgaagaaagaccatttcgaagatttgtggaggcttgcatagaagaaacaatcgtggtctatgttgatcatctcctttcccagaaaaactacataaaagaggaaacaatagagaggatgaggttagatgaagagaagcttatggatttctttagggaacacgtcaacgtgacaaaagttgaaagtagagtgcggattctggcagatatgagagatctagcttcagctgggagtttggatagctttactctcattntcacaaatatactggaacatcaacctgattgcccgcctgaggttgttgagaagcttgtggcaatgcgggaagacattccaagaaaggagcccagga

SEQ ID NO: 89887 - DNA, 561 bp, Zea mays
  unsure (1)..(561): unsure at all n locations
  Clone ID: MRT4577_181980C.1
agaacgaggccaaaaaaaaaaaaaaaaaaaaaaaaaaaaaaaaaaaaaaaaaaaaaaaaaaaaaaaaaaaaaaaaaaaaaaaaaaaaaaaaaaaaaaaaaaaaaaaaaaaaaaaaaaaaaaaaaaggtttttccttggccccaaacaccccaagggcaaattctggaaaaatcaaaaaaaacgccgggcggtggagcattaatttaaagggccaaaatggccccaaagagaggggtataaaaaataaagggcccgcttttaaaaactccttaaagggaaaaaacctgctttctcccaactaaatcccgctttaaaaaaaacccttttaatcagggggtgttttaaggaaaaagcccgaacgaatcacccttcccaaaaacttaaaaaacttgattgggaaaaggaccccccctgtgggggctcaataaagaccgagggggggggggtttcgcccaggggacccatccccttgaaaggccccaagcccccccccccttgggcttntctccttccttttttccccagttcgcgggttttcccccgaaaattttaaaaaggggg

SEQ ID NO: 89888 - DNA, 1845 bp, Zea mays
  Clone ID: MRT4577_181981C.1
tatattcagttttgtaaaattatcgaaagaaactatgccagccaatttaggcagcttgtattttatttattaaaaaggaataagattacaaggggctaaaaaacccttgcagaatatttacaagaaaggggagcgggggagagagaatacaattcaaatatgtccacaaaactggaagctggagagggagaggcagaaggaggagagggagactgaataatattacaaagaggttggtgatagttagtcttatagtatgaggtagccgaagttgcaagtggcaccagcaacgaataagttatcttagtataatcacatgtttatgaagaatacacattatcaattgtcccggttccctttacttggtcaggagaaggtctcagcatggacgatgagagggctcatcacagcaatccgaagctctaggctgtcaaccatatctaatactatcgagagctttgatgatgtagatggcatggaacagaaggataaagaaataaatagtgaatgggaggccaaggccgcggcgtatgccatattcaagaatgtcgcaaagcccagctataagcacattgaggaggtggatctgctgagatttttcaccaaggaggaggtgcacctggtgattccaatgtttgagggagcaccagagaccggaaagataaaaaagtctgcactaaagaattaggtggtgaaagcatacctcgatcgcaagtcactggcacattctctgaacgacacaaagaccgcagttatgcaacttcacgacctcatcagtgttatagtcatttatagtcatcattgttacactactatttatgggcattgcgacaaccaagattcttgttgtcatctcgtcccagcttctggttgcgggattcatatttgggaatgcatgcaagactgtatttgaggcccttatatttgtattcatcatgcatccatttgaggttgctgaccgctgtgttatcgacgaaacacagatgatcgtcgaggaaattaatatatattaaccactgttctcttcaagaatgacaacgaaaagatatattatccaaattctgtgttgtccacaaagccaatcagcaacttttaccgaagccctaacatgtatgcacgattgcttttgcaattgatgtttcaacttcagttgagagcattggagctttgaggtccaaaattaaagggtacttggagagcaaaccaacgcattggcacccagtccacactgtaaatctcaaggacatcttggatgtgaacaagattaacatgtctctctcagtgcagcacaccatgaactttcaaaacatccgggagaagaacatcaggaggtctgagctcgttatggagttgaagaaaatattcgaggagatgtccatccggtaccaccttctaccccagaaagttgaactcacctacgtcggctcgaacccactgcccatgggtccttctcatacaagatagaggatgggtgaagacttttaagtctcatattgacaacttgatccatttcatgggatctgacaactgatggctagctgtgcagtctgttctgaagttagtaaaactctgcatagtagatattagctcgtagaataatttgtcagataatgcatttgtaagcggtgatggtactggtgatcaatgctttgggattggccattacaccatttgattatctacaccgtttggtgcatcacaatcgaaaatgttgcgaaatagccactactaaagaaattcagctgggagattgaagtgggcctgtcgaaatgttattcttcacaatagtaccatgtaattcagctgtgagactggtagtcactcttgtgcatattttttgttggc

SEQ ID NO: 89889 - DNA, 484 bp, Zea mays
  Clone ID: MRT4577_181982C.1
gggacgcctggcgagccgggttcgagacacacgtgtcctacgccatccatgcctacggtggaatggatgccgtccttcgagtagaacaaggtccacgacaacgctgaggtgacgacggcccccgggggctgatacaagatggagatcaggggggaccactaggacgatatctgctacgcgcgcctgttcatgagcccagaggcggtctgcacccatatcgaccactcccatgaccactgacgagtccggctcacccgctgctacagcatcaagctaagctgcgtccgctacgctaaccctatcgccttcctccgtaaggagccggtaaggatctgcggcgagctgctatgcgcctacgacctgtacaacgagacatgcgataattcctatgcgtgcactcataagttgtgtcgctcgctgtttttttaaaaaagaatcccatatacatatagcacatgcgtttctgtgtggagatgcacgcatg

SEQ ID NO: 89890 - DNA, 772 bp, Zea mays
  unsure (1)..(772): unsure at all n locations
  Clone ID: MRT4577_181983C.1
aagcctccaccatccccgcgcattcgcctcgccgaccgcctcccctctctctctctctctcccggtcgacgtccaaggggcccggagtgattcagaatcttggttcatagcagaggttcggaaccgagccggcggtggtactactagtgctgctgctccatggctgatggcaagtgcggcgaggcggaggtggaggtcgcccagccgctggggcggtggcccgtgctgtcctacggcgtcggccacatgctcaacgacatcacctccgcctgctggttcacctacctcctcctcttcctgcaagagatcggcctcgctccaagggatgcagctatcgtgatgctctcaggccaggttgcggatgggctgatgaccatcgtcgccggggagatgatcgaccggttcgggcgtttcaagctgtggcacatcggggggtcggtcctcgtcggcatctccttctcctcggtcttcggcgggtgcctgctctgcaccatcctcggcaccgactcctacctcgtcaggaccgtcggctacagcttcttcgccgccgtcttcaacatcgggtgggcggccacgcaggtctcccacatgtcgatggtgaactgcatgacatccaaccccacgagccgggtggccttggccagctgcagaaacgcttccaccatggtggctaatcttggtctatatggcatcgcgttggctgtgtttgnaatagtgaaggcaaagacatgtgcagacattgttgttcagtacaagtggatcgcgtacgtgt

SEQ ID NO: 89891 - DNA, 418 bp, Zea mays
  Clone ID: MRT4577_181984C.1
ctgacgcgtacgcccacgcgtgcttcgacccttgagatcaaggcaaggtggtgctcgtggagtgctccctgctaggctcagtgtagtccatcctgatgctcgtcatcgcaactctcgtgttctttggtggcctgactaaccatggaactgatcaactatgcgacaaatttcatgtagtatgtcagtacaggacttctcattctaggtgtgctatacaaatctgtgctattgatgctaagatatgctgtgagctatggggagcacgcagaattctaccgagattcaggactggagctgtcccgagcatgcagcattgtcatgctccttgcctatgtaatctaccgtttcttgcaactgataacccacaagcagctatttcaacgccaaccccaagaggttgaagatggcgatgcttcag

SEQ ID NO: 89892 - DNA, 380 bp, Zea mays
  Clone ID: MRT4577_181985C.1
cgagacgactctgagggggcgattatttggactggagacggatcgagacagcatttctttgcatcgcaggtgataataagaggcgtaaatattgaatgaaacatatatgaacacgctgaaacagcaagacacctaggttgacccgccggtagaggactgctttcccgtccaatttgcaccactaaacgtcatgacggtggcgataagagtgctgaggagaaggcagatgagcaggacgtcgaggtacttggtagggagattgagcgccggagctctcacagtggtggccagcatgagatagatcccgagaacgatggtgaggaagaacaggagccctacagcctcgggcgcgatctcgtcattgtccttcccagcagcag

SEQ ID NO: 89893 - DNA, 422 bp, Zea mays
  Clone ID: MRT4577_181986C.1
cggttcggggttccccccacgcgtccgcccacgcgtccgcggacgcgtggaattaaaaaaaaaaaaaaaaaaaaaaaaaaagggaaagggaaaatttttaaattttaaaaaaaaaaaaaaacacataaacaaaaaaacttcaaaacccacaataaccagcggggcgtgatctttcgcgttcagccttatcacggctttcaccaccttaatccatccccgttctttttccacctttttctttcccatacgtcacaagtttcatttcccaaacctttccatctcaaacccctacagttcaccacattttttccctcttacgaaaaacccccttttttccggtttgcataatcccaataatccccccccctttcccctatgatcacacgcctcaccagccacaagttccccgtcctcaacctctt

SEQ ID NO: 89894 - DNA, 146 bp, Zea mays
  Clone ID: MRT4577_181987C.1
gtaaatgcaaaagttctcttgcgtaaagcagtcgatgggcactggctgacttaggaaccacttttggctaatcagacagtattgtggacccaggggtaaatgaaatggcgctcctaggggaatttgaatgcgacaatgaaccaaaa

SEQ ID NO: 89895 - DNA, 167 bp, Zea mays
  Clone ID: MRT4577_181988C.1
gaaaattgacagcaactgttacacacaaaccattcagcaagagaaccattagaccaatatggtgccataacagacgacgggcatacagctgatgcatgcacaacacattcagcgactagagtgcccacccacacggggggggttcaaactttaccctcacagacaga

SEQ ID NO: 89896 - DNA, 401 bp, Zea mays
  Clone ID: MRT4577_181989C.1
ccaaaatataagttttatttttatttttaaaccaatcgcaaacagagggggttcatgttatacaaactgtttacgtaaatccccccgggggggattaaataaatccctacttcctttgggggaaaaaaaaatgaccaaactgtcctgggatgtgtaacaatgccccaacacagttcttgaaggcaaacgtaaattaattagcaaaacgacaccctgggacccatccttgcttttttccatgaaatgaaacgcagcctttggaacctggcttggccaggccttgagctaaaaaaagcagcctttgacccccaccggccggccttaaaaacggtttgcccgtgcagaaggacagtgtgccggaaaaccgggtgacccttgtaacgtaggttcctggtttgggc

SEQ ID NO: 89897 - DNA, 185 bp, Zea mays
  Clone ID: MRT4577_18198C.1
ctcgtccgtacgccgacgctgccgactggatcgaaccgccagtcggcagtgccttagtgcagataaagcctacctcttgccagatagaatcctagttgggctaccgtatccctacaccaggtgcctagtacttgggcattttttcgccagcgaatagtgcccaccagatccgtccctgatggaca

SEQ ID NO: 89898 - DNA, 294 bp, Zea mays
  Clone ID: MRT4577_181990C.1
ccattgacagctaagcgcgatagacaaacgtagatacaggcgtgagccatgcatactatatgctcgatggatggagtgacggtgggatctggaattgggctatcagggcagggcatctaccgtatgatacctgagagaacactccaagccatacctgataactgttatgggcctggcacaaggagcagggtaggctcacacaagagcccaagcacacagagagggtgcagcgctatataaccagctgatatcgtcagaaaggagatcactcatctgattatgcatatgatcata

SEQ ID NO: 89899 - DNA, 256 bp, Zea mays
  unsure (1)..(256): unsure at all n locations
  Clone ID: MRT4577_181991C.1
gaagcacccggatcagcgcacaacaacanagcgcacncggcacaccgtcggggtcttagcatcancaatggcgcgcgccggcgctctctgcctggtgctgctctgcctcgtggccgcgcactcagccgcggcgcataagtccacgacagccccggccgacgcgccggccgacgtcaccaccccaccggcgaccccgaccaagaagacacccgaaccccccaagcggcctgacaccacccataccaaccctgatcca

SEQ ID NO: 89900 - DNA, 204 bp, Zea mays
  Clone ID: MRT4577_181992C.1
ctcatcccggcgccaggagagccgcctcggtcggttcgtttacgatcccagatctgctctcgtacgagcgttctcggcgggtgttcgctcgcgaggcgcagcgtgccacgttcactgagagcttcgagaagctgaaatggctgctaaagctgctcccgccaagaagcgtgatgccaccacccatgccttgaaggttgccaatgc

SEQ ID NO: 89901 - DNA, 378 bp, Zea mays
  unsure (1)..(378): unsure at all n locations
  Clone ID: MRT4577_181994C.1
cttccgtgcgccagavgtttttggctttcycgggtttcgctgcttggtcgcgcgcngggtcaaaggtttttttttgccttgctkbkdbgttggttggttggttggttgtktggttggggggtcaaaggggtttgccttcccatggcggctgcgcaaggctaccgtgtgaaatcgtctrttwytaccgccccgtttcgctttgaactgtacagatccatacggggttttctttctttttaactgtvtcttcgcygcbgtgtgcgagcscagctctacagggggataacagaaacaaatctcttctttttcttctgggtktgtgawtggtttacgtgtatwcatactgctcgataggattcagtagcttgcaaggyctgg

SEQ ID NO: 89902 - DNA, 862 bp, Zea mays
  Clone ID: MRT4577_181995C.1
cgagccggccgggctgtcgcctttcccgctcggctcggcgaacgcgatctgttccccaacctccgcagccgctccaccgccctccactccggctgccgaatcgacccgccccgatccagatcaggtaaccccgcgccgagatccctgcgtttcttctctccttctcgcggatcgctcgccgcggaggcgggaccccttctgtccgcgcggatcgctggtcccgtcccgcggggtcggttcgctgacgtgatctggattgcaaatctttctcggcggcctactgtgatgcgtgctcctgtaacacgtcgcggcggattcgttggtccctctgcctgcgtgccggaatatcttgataatggcatgaaactacacatctggcataatgtcttgtggcgatctaggtttatgtgcgccctttgtttgatctgaaacatttgaggtctatctctgattccgaattacggaccttttgttttgcccaggagctgagggatggacgcgaacaggcgccagagtgggatccagcagttgctggctgcggagcaggaggctcagcaaattgtgaatgccgctagagctgccaagtcagcgaggctcaggcaagcaaaagaggaggctgagcgggaaatagccgaataccgtgcccagatggaggctgaatttcagaggaaggttgcagagagcagcggcgactctggtgcaaacgtcaagcgtctgggagaagaaacggcggcgaagatcgagcaactcacccagcaggccgcaagcatctccccagatgtcattcagatgcttctgcggcatgtcacaccgtcaagaactgaggaatgctgttcccgaactatgctcgcagacttgtacc

SEQ ID NO: 89903 - DNA, 269 bp, Zea mays
  Clone ID: MRT4577_181996C.1
gatcagcggtcgcagctcggtcgagatcggccacggaataatctagcagccaatttaaagaacggtatggattattcaactccgtagttggctggctggctggttgggtcacaatgtttaatatacaactgatgcgctgaattgttggctggctcggccgagaacggtatggatgggaaatagtaattaccaaagtagaatctctttaggtggattggcgaattgttgtgtttagtactcatcaatatgtgattatcgaagcttcacaa

SEQ ID NO: 89904 - DNA, 2010 bp, Zea mays
  Clone ID: MRT4577_181997C.1
cattgggaccctcgaggccggccggggtcgccctcccgctcggctcggcgaacgcgatctgttccccaacctccgcagccgctccaccgtcctccactccggctgccgaatcgacccgccccgatccagatcaggtaaccccgcgccgagatccctgcgtttcttctctccttctcgcggatcgctcgccgcggaggcgggaccccttctgtccgcgcggatcgctggtcccgtcccgcggggtcggttcgctgacgtgatctggatcgcaaatctttctcggcggcctactgtgatgcgtgctcctgtaacacgtcgcggcggattcgttggtccctctgcctgcgtgccggaatatctggataatggcatgaaactacacatctggcataatgtcttgtagcgatctaggtttatgtgctccctttgtttgatctgaaacatttgaggtctatctctgattccgaattacggaccttttgttttgcccaggagctgagggatggacgcgaacaggcgccagagtgggatccagcagttgctggctgcggagcaggagcgctcagcaaattgtgaatgccgctagagctggtagtgttttctcatcttttttgtcccaagccattgtagatctagcgtagcgttaggcagcaacaaccttgtgaatgagttcgttccattcacttagacatctttcactgatcctcaattaatgtttgtagagcgagattgaaggtaatgcactgctacgtttctgaactgtagcaaaaaaacggcatccccttaatggctgtactattgcattaccaacaaatatacagcacctgttctgggcaaaacaatctttagtctagaggggggaaagaagtttacttttcgttttcaagtatgcagaagcatgtttaggccctgtttggaacctctaaaactaatagttagctactaaaaattagttgttgggttccaaactccatcagctaattgttagctaccttacagctaacgattagttaattagctagctcaatccagctaatgatttatcagctgccaaactattagctcgaggtgttccaaacagagccttaactgtgaactgttttctggtgaaatgtaacaacaaagctgaaagctaaaggactgtgttctctctgcagtataaacttgaatttgtgtgttgtacagctaagtcgcaataaaagaaggggttgaaatcttgcttttatgggtcccattagcaaaaacatatttcattgtgaaccatgtgttgtacaaatgtcttttaaacttgttggcaaattgtcagctaataggaagctaagaagctgaccctttatccccctcccttcctgttaaggtcttgttcggttaatcctgttacccatggattggatgagattagaaaaatttaagaagaaatttgacttgcttgggatttaaacccatccaatcccacttaatccacatggattgagagctaaccgaacaaaccctaatagttaatactgaacatgaatgtttcctgtgtccaatagccaagtcagcgaggctcaggcaagcaaaagaggaggctgagcgggaaatagccgaataccgtgcccagatggaggctgaatttcagaggaaggttgcagagagcagcggcgactctggtgcaaacgtcaagcgtctggaggaagaaacggcggcgaagatcgagcaactcacccagcaggccgcaagcatctccccagatgtcattcagatgcttctgcggcatgtcaccaccgtcaagaactgaggaatgctgttcccgaactatgctcgcagacttgtaccgtcgatctatttatttttgtgagagtgagagtggtgaggaataatatgcccgcttgtatccataattcctgttcttaactacggaataagccgcagcagctttagcggcaaacgtgactagtactgtcagaacctaccattgttatttggtacaattggtaaataatattgttttaaactggattttcgaac

SEQ ID NO: 89905 - DNA, 739 bp, Zea mays
  unsure (1)..(739): unsure at all n locations
  Clone ID: MRT4577_181998C.1
agggcgattgggatccccgaggccggccgggatccatcctatctagccgtgccctggtgaaccccgtcgccgagcaccgccatgggcgggagcgaggaattggccgccgcggtcgctccctccacgaccatcatccagggcatgagcatgactcgtagagcttcgctgcggcaccaggaaccggggcgcaaccgtatttgggtgtgaagtccacctgtgcgctgtgaatttctcgccgatggaggtcttccgtcgccgcgacgccttcaccgtggccatgacaacctgtgccacaatcatcgataagaagctgggacttgatttatgttggaccttaacgttgtgtagtagttttcggtgaggtttgtgcgccgagtcatcgggcggccgtactccggcaatggcaccgccgtgccgccccgtttaactgggtcgcgcaacctagaagagagtggttgatgggagtctcgcaagaatcattgatctagccaacaacggcggcgattaccgggaagaataccccttcgcggttgctcttttacttaagcgaccctgtactttaggaaaactaacccgcaatccatcagtatataaagatcagtgcatataggtccctaaatttgcattataaccccaggtcaaaaataaatgagtagccgcgatccctggatttctggaaattgaggaattanattagaaaatgacttttttacnaaaaaaaaaaaaaaaatttgcggcc

SEQ ID NO: 89906 - DNA, 762 bp, Zea mays
  Clone ID: MRT4577_181999C.1
ccggccgggacgttgtatatgcggatctccattcaccaatcgccctcctcgtcgccctcccgctcggctcggcgaacgcgatctgttccccaacctccgcagccgctccaccgccctccactccggctgccgaatcgacccgccccgatccagatcaggagctgagggatggacgcgaacaggcgccagagtgggatccagcagttgctggctgcggagcaggaggctcagcaaattgtgaatgccgctagagctgccaagtcagcgaggctcaggcaagcaaaagaggaggctgagcgggaaatagccgaataccgtgcccagatggaggctgaatttcagaggaaggttgcagagagcagcggcgactctggtgcaaacgtcaagcgtctggaggaagaaacggcgtcgaagatcgagcaactcacccagcaggccgcaagcatctccccagatgtcattcagatgcttctgcggcatgtcaccaccgtcaagaactgaggaatgctgttcccgaactatgctcgcagacttgtaccgtcgatctatttatttttgtgagagtgagagtggtgaggaataatatgcccgcttgtatccataattcctgttcttaactacggaataagccgcagcagctttagcggcaaacgtgattagtactgtcagaacctaccattgttatttggtacaattggtaaataatattgttttaaactggattttcgaacaaaaaaaaaaaaaaaaaaggcccctagggcc

SEQ ID NO: 89907 - DNA, 581 bp, Zea mays
  Clone ID: MRT4577_18199C.1
atatacctcgtgctcatgtatcgcacagccactgcccaaagccgcctctctgcctcctcttgcgcgtccccagccaccgcagttcgccggtttgtggccgcctccgccgcagttcgccggtctgtggccgcctccctcctctgcagttcgccgatctgtggccgccgccgccgtcacctgtcagtcgtcgattggagcagccgccggcgcgacgtgaggtatgtgaccgtcagcctgccagtcgccggtgtgcagtgaggtctgtggccatcagcctgccagccgccgattggagccgccaccgcgaggtctgtggccgtcgttcgttgattggagccgccgcccgacgagccgtgggctcgtggccgatgccgccgtcgatttgtggtcatcagtcgctgattggagttgtcgcccgatgattggtgggtttgtagccgcccccgccaatagactgtgggtttgtagccgttgttgtcgatccgtgtcgcagtgccacccatcgatccacaggtcgacgccgatcccatggcagcgaccagtgagttcaaatgtttctgcttctacatctactgaggcca

SEQ ID NO: 89908 - DNA, 1819 bp, Zea mays
  Clone ID: MRT4577_1819C.1
ggaaccttgagacggcggggggctggttagagttttgagtgacaactcacaagggtagttcaaagtccagaattccagactcgcgttcgcacgccgcctttcgcgctgccttagcgccttagcctgctagggctcgtcgattcatcgccggctcgacttctgatctcgcgggcagagcagcgcgccggcgcgatggcttcggatccggatgtgtccggcggcgagcaggcggagccgcccgacgatgtggacgaccccgacgtcgacgaggtcgaccccaccggccgctacttcaggtacaaggaggtcgtgggatcaggggccttcaagacagtctacaaaggtttcgacgtggtcgaaggcatcgaggtggcatgggctaaagtggagataaacggccggaccatgggatcccccaaggagctccagcggctcaagacggagatccagctgctgcggtcgctccatcacaagcacattctcaagctctacacctcatgggtcgacaacaagaagagggcggtcaatataatcactgagcttttcacgtccggcaacttgagagagtaccgtacgaagcacaagaaagttgacatgaaggcaatgaggcgatgggccaaacaaatactgacagggctagcctatctgcacagtcagaagccaccaatcatacacagggacttgaagtgtgacaacattttcatcaatgggaaccatgggaaagttaagattggagacttcggtttggcaatggtaatgcagcagaggaaaacacagagtatacaaggcaccttagagttcatggcaccagagctgtttggtgaaaactacaacgagttggtggatatatactctttcggcatgtgcatgcttgagatggtgactggtgagtgcccttacagtgaatgtcagggctttgttcagatatacaagaagatatctgaaggtgtaaaaccagttgctctctccaaggtcaaagatgcagaagtaaggagtttcatagagagctgcctagcttcagctgctgatagattgccagcaagtgagctcttgaagagcccttttctcatgaaagatgacatcatcatcaatgataaaacctctaatcctgtgcaagaacctatagcattcccgccaaatttggatctggatcttgaagccacaccaatttttgtatctttgctaccaaatggaaccgttgataatgggaagggatctttcagcctagtgcttcgaaggggtggattcgtactagaaggagatatgagtggtagcaaccctgttaatttattactaaggattcctgtccccaatgataaatgtaagaacattgagttcgcgtttgacctggagaatgatacaagtctcttggtggctacagagatggtgcaagagcttgaactaccttcttggagcatgcctattgtggcaaagctggtagatgcgttcctgctcaaaactgttcgtggttggaggccgtgtgttcaggtcggtcagatgattcaggcagtgcaaaacactgcatccgtgaatggaaaaagcatctgaatcaatgtttgtagctgatgcattattctgcaccttatgtaaatatatcatgctcgaatgcaacgccaggccttgctgactaagcacatcttcttttatctgatgctggttaaagtttgggcatgattcctaatttgaatagtggtatatttcgtataatttttggttcgtattgtaagaaagaggttcagagataagagaaattaagaatgctgtaacagccatccttgcttttttcagtttttatttcaaagccttaccatgtgtctcc

SEQ ID NO: 89909 - DNA, 1108 bp, Zea mays
  Clone ID: MRT4577_181C.1
ccggccgggccgggtctattagctaagcacggagttggcgacaattgcacccaagaattgactgaccttttagctccagcaattgctgtgtctaggaagcaactcgttctgctttggtcacacataaaaaaatatctacttgtccagatgggaaaccgtatatgcttttctaggaatttggatagaaaaaaatagagcgcgttcctttcaatcccagtcatcacacgctcgaggtcgagggcaggaaaccgccggcggcggcggcggcagcggggatggggagctcgttccgtgggtcttgtctgcttgacctagaaaacggcatcgtgatgaacgacgcgctaccgtccgatgccttgggattttggacggtggcgactgtctcctcccacgtggccacgtacagtcaaaaaccgagacagaaaaagatttcacctactccgcctcaccttcggcatgggccggcggcatgtcagggctctgcagctgtgtctgcgcaacggtacaagacgccgcgggggtcgcagcctgcaaggccggcaccgaattctaggccccacatgatggcatgcaacaccggtgcacagatatttttcgacacgattatccagccgtagaataactcggacaagtgtcgagaggcgtggactagcagatctgggtgcagttggcccctctggtgaccagagtgacccgtccttcaccttggcgtggtcggctgcaactcgctgtccgatgcaaattgctgcttactgctatggccatggcatggagtcgcatgtgccatttccctgtttgtttggctctccccgccgtccgatcagaaagttagggagacaatttagacggacggcccttgtcttgtcagaattaatgcacagtatcggcacggcggccaagcatctctttcgacggatctggtttctgtctccatctgtgggcgccatggttggctggtcgagaggacacgcttgtgtcatttgggccaagccctaagggagacagatagcatccgactccacctcgtgcgagcacatgtgcggcttcgagccataccataccatactggatgccgcactaccaaagttttggcatcactgataaacgc

SEQ ID NO: 89910 - DNA, 849 bp, Zea mays
  Clone ID: MRT4577_182000C.1
ctaaaattaaaaaaatcgataggtggagccacgttgtatatgcggatctccattcaccaatcgccttcctgtcgccctcccgctcggctcggcgaacgcgatctgttccccaacctccgcagccgctccaccgtcctccactccggctgccgaatcgacccgccccgatccagatcaggagctgagggatggacgcgaacaggcgccagagtgggatccagcagttgctggctgcggagcaggaggctcagcaaattgtgaatgccgctagagctgccaagtcagcgaggctcaggcaagcaaaagaggaggctgagcgggaaatagccgaataccgtgcccagatggaggctgagtttcagaggaaggttgcagaggtatgcacgccatgtcccatttttccccactggactacaggacctcacttctgtgtcttggtgactacagagcagcggcgactccggtgcaaacgtcaagcgtctcgaggaagaaacggcggcgaagatcgagcaactcacccagcaggccgcaagcatctccccggatgtcattcagatgcttctgcggcatgtcaccaccgtcaagaactgaggggtgctgttcccgaactatgctcgcagacttgtaccgtcgatctatttatttttgtcaagagtgagagtggtgaggaataatatgcccgcttgtatccataattcctgttcgtaactacggaataagccgccgcagctttagcggcaaacgtgactagtactgtcagaacctaccattgttatttggtacaattggtaaataatattgttttaaactggatttttcgaacaaaaaaaaaaaaaaaaaaggccccta

SEQ ID NO: 89911 - DNA, 320 bp, Zea mays
  unsure (1)..(320): unsure at all n locations
  Clone ID: MRT4577_182001C.1
gnaacaggattgggtttgccaaatctgcctgaggactggagttcttcgctttagtaacatgtccgctttgttatccggtattgtacatatattgccgaccggtataagctgcaatgcttaatacttangtatatatattcacgcagaaacctagaggattgtggcaggatatgtgtttgcaaattaagctatgctatgtatgaagatctggaacatgaaatttgatgtaacgagcacggatacatgatgaggattggggcttttaacctaatctcatcatgttaatttgttggttctaattactatgtggaggtatcctc

SEQ ID NO: 89912 - DNA, 528 bp, Zea mays
  Clone ID: MRT4577_182002C.1
ggaagttggtgggcctagtgccgggatgagtcaaggcgggctgcacgtcaccgacgagcttgagatggtcatggctgccaactgcggactccacgtgttgactgcttaccaggctgtgcgcatgtacccataccttgctgcctatcatgaaagcgcatgcgccttggtgagtgcagcaggatcaccatacaacatacttcaggaaaaaagggctatgatccaagaatacatacctgtgacaaacttgcgattacacccccatgcatggctgaaacaccacctcggtcaagaactttaaattctagtacagcaacacagcactggtcccttatggagaatgcctataagccatccttcaatatggcatacacgtctataacaatacaactccagatgatgccgtacttataagagaagaaccagttccttatgcagacagaagaatgctctcatttggaacatgacgctggccaacaccaatataccccgacctaaagcttaaccacgcggagcattcatgttggaact

SEQ ID NO: 89913 - DNA, 466 bp, Zea mays
  unsure (1)..(466): unsure at all n locations
  Clone ID: MRT4577_182003C.1
cggncgcgtgggcggccgcgtgggcggccgcgtgggtcttaatcgatttgtggatttcgaagtcaaaaaaaaaaaaaaaaaaaaaaaaaaaaaaaaaaaaaaaaaaaaaaaaaaaaaaaaaaaaaaaaaaaaaaaaaaaaaaaaaaaaaaaaaaaaaaaaaaaaaaaaaaataaaaaaaaaaaaagggaggggaaaaaaaaaaaaaaaaaaaaaaaatttttttataaaaatacaaaattataaaccctccgttcacacccgactttaaattttttttacgacccccaaatatcccaccttggccccctttcaaaaaaggggtgaaaaataaaaaacatgagtcccccaaattttgactttccaaaaaatttccctttttaaactcgctttgtatcccccttaaggcccaattaataaacccctttaatattttttttttccccctgggaaaatgggtaccccccc

SEQ ID NO: 89914 - DNA, 515 bp, Zea mays
  Clone ID: MRT4577_182004C.1
cctttcccccaccctttctccgctgtttttctctcctcccctcccttcctagctctccaaggtcatggcaaaggtgaaaagcggataaaactagcaagtgggagatcgacgcaggtgaacaccaccacagctacaagtagaggaagtggaatttctcttgtggaaaaaagggagagttgcttgagtggccatgatgggaggtgggctgctcatggatcagggcatggcgttctccggcgtgcacaacttcgtggatctgctccagcagaacggcgccgacaagaacctcggcttcggctcccttatgccgcagacttcctccggcgaccagtgcgtcatgggcgagggcgacctcgtggaccccccgacggacaacttcccggacgccggggaggacgacagcgacgacgatgtggatgacatcgaggagctggagcgccgcatgtggcgcgaccgcatgaagctcaagcgcctcaaggagctgcagcagagccgcggcaaagagcaggccgccg

SEQ ID NO: 89915 - DNA, 509 bp, Zea mays
  Clone ID: MRT4577_182005C.1
tcttatcgggctatggcaaatggcgacagttcagtgtgtttgagtgttttttgtcagtcaagcagtttgctaagttacaaacggcgatggagaagttgattaaacttgatgaggatgcagtttgtatttatgtgttggatgaaaatacggtgcaacgcacgattacctacgggactccccaaccagaaaaacctggtagtattattatctaagaagtcattcttcaaattttggcatacctatagcgagggccttttccctgggggggttgccaaattgcttctgaaccttgaaaaatcaatactttcacgcattcagactgcgtactattttgaaggtctggctgattttggaaagatattctggaaggtttgccaaagtctgctttcctccactttccccgtaaggggtcggagggggcggtctttccttctactaatcccggcgatcgggactgaaacgattgttgtgcccctggcggtcgctttcaatgcctctttccttctact

SEQ ID NO: 89916 - DNA, 257 bp, Zea mays
  unsure (1)..(257): unsure at all n locations
  Clone ID: MRT4577_182006C.1
cgaaatgcagcacctgtgcatcttcctcccgctggtggcggctcccagatgggtcctgtcccagctgcctctccaggactcgagcccaagactggtgaagccttcggagaccctgcccctcagcggctctgcctctggcggctcctttannaggagtagtttctacggtgggtgaatcggtaattccctaggtaagagactgcagtggattcggagtatctattatagtggcacaacttattacactccgtccctca

SEQ ID NO: 89917 - DNA, 424 bp, Zea mays
  Clone ID: MRT4577_182007C.1
cccacgcatccgctcacactacacaatgtttatgaccaaatgcctgaccctaaatgggctcttgcaatttgcagctgttgcaacggctgtccatactaccattactcctactctgctgtacgtggatgtcaccgtatcgtcctctgtggacatctacgtgcctgggtgcccaccaactggtgacgcacttgtgtacggcgttcttcagctgcaaaagaaaatcaacacgcgtaacgatttccttcactggtggaccaagtgaagcatgcttctgctgttgctagcttgctacgtttatttgcactctacctacctgtcttatatgaaataaagacagactgtgctcggattcacaaatgtgctgtccctggaaggatgcatgcccacgttgccacgaacatataacttgtgtacttggagtcag

SEQ ID NO: 89918 - DNA, 266 bp, Zea mays
  Clone ID: MRT4577_182008C.1
cagggaaaatacagtgtgaaccatagctagaatgccttgagttctctaaacacaaatatcctattgcactgtgcatataccgtgtaggcatctgaacagtcaaactctacattatagaatccttatagtgacattgctcaagctttaatggcctctgtttcaggccctggcccagatcacgccttaactgggaggtgattcgccttccacactatgtatcgaggtcaatgatgcacatgttctgcccctcctgaattgatgaagag

SEQ ID NO: 89919 - DNA, 1516 bp, Zea mays
  unsure (1)..(1516): unsure at all n locations
  Clone ID: MRT4577_182009C.1
ngattctctctcagaccctacagccgatccagctctcccaccgcgccgatcgccatggccgcccccaacaacgaccccgccgccacaagttctgggagacgcagcccgtgggccagtttggcgacgtcgccgacgtctccctccccgacggcgccatcgagccgccctccccgctcttcgaggtccgcgccgacccctacccgctccccgcggccttcgagtggttcacctgcgacctcgacgacgacgccctcctcgccgacctttacgccctcctcgcccacaactacgtcgaggacgacgagaacatgttccgcttcaactactcgccggccttcctccgctgggcgctccgccccccctccttcttccgcgcctggcacattggcgtccgggccaaggagtccaagaagctcgtcgctttcatatccggcgtccccgcgcgcatccgtgcgcgcgacgacgttgtccgcatggccgagatcaacttcctctgcgtccacaagaagctccgatccaagcgcctcgcgccggtgctcatccgggaggtcacccgtcgcgtccaccaggagaacatctggcaggctgcatacactgcgggcgtcgtcctcccgacccccatcaccacctgccgctactggcaccgatccctcaaccccaagaagcttatcgacgttgggttctctcgccttggtccacgcatgacaatgagccgcacggtccggctatacaagctgcctgacgcgccgctcacccctgggttccgcagaatggaactgcgggatgttgctgcggtcacacggctgctgagggcttaccttgcgaggttcgtggtggcaccggattttgatgaggtggatgtggagcactggctgctgccgcaagaggatgtcgtggacagctaccttgtggagagccctgagacgcatgaggtcacggatttctgcagcttttacacgctgccctcgtcggtgctgaacaatgctaactatgcaacgctcaaagccgcatactcatattacaacgtctctaccaaaactgcactgcagcagctgatgaatgatgctctgattgttgccaagcagaagaattacgatgtgttcaatgctctcgatgtcatggagaatgagtccttcctcaaggagctcaagtttggtcctggagatgggcagctccactattacctctacaactaccgtattcgcaatggcatcaagccctctgagcttggtcttgtgctactatagggcagtctaatcaggacagtcctgagtttacaccttcccttccgcagcagtggtttctcattttgcctactgtggtagtgattctccttgatatgattgccatggtcactgataggagtcccaagatgatttgcaaacaagggagactggaattagagatatcctttcctcaatttaaggttactgttcccattagtgacatttcgcgtgcatcgtccacaatgtgtatgctggcaccgattttaccgagaaattttgatgtgtattcg

SEQ ID NO: 89920 - DNA, 1511 bp, Zea mays
  Clone ID: MRT4577_18200C.1
cggacgcgtgggcgccgaggtacggcgtgacgtcggtctgcgggggtccgcccacgcgtccgcccacgcgtgcgcacagccactgcccctgcctcctcttgcgcgtccccagccaccgcagttcgccggtttgtggccgcctccgccgcagttcgccggtctgtggccgcctccctcctctgcagttcgccgatctgtggccgccgccgccgtcacctgtcagtcgtcgattggagcagccgccggcgcgacgtgaggtatgtgaccgtcagcctgccagtcgccggtgtgcagtgaggtctgtggccatcagcctgccagccgccgattggagccgccaccgcgaggtctgtggccgtcgttcgttgattggagccgccgcccgacgagccgtgggctcgtggccgatgccgccgtcgatttgtggtcatcagtcgctgattggagttgtcgcccgatgattggtgggtttgtagccgcccccgccaatagactgtgggtttgtagccgttgttgtcgatccgtgtcgcagtgccacccatcgatccacaggtcgacgccggtgtgtcttgccacctttgccacaaatcaatctgcaggtctgtgttcttatcttcccttcttgcttctcaatctgttgactgccacaactccggtcttgttagatcccatggcagcgaccagtgagttcaaatgtttctgcttctacatctactgaggccagtggcagcgaagactggctggagggaatggtcacagaatatcttgttgagacatttgctgattacttcggtgacgttaaaatgtatattgaagaaagaccatttcgaagatttgtggaggcttgcatagaagaaacaatcgtggtctatgttgatcatctcctttcccagaaaaactacataaaagaggaaacgatagagaggatgaggttagatgaagaggtgcttatggatttcttcagggaacacatcaacgtgacaaaagttgaaagcagagtgcggattctggcagatatgagggagctagcttcagctgagagtttggatagctttactctcattttcactaatatactggaacatcaacctgattgcccgcctgaggttgttgagaagcttgtggcaatgcgggaagacattccaagaaaggaagccaaggagattgtacaagaatgcaaagagatatacgagaactcgctcgtggatggcaaccctcgcaagtcaggttttgtgttcggcaaattgaagtgcttgacagcaaagaaaggcatatggaggaagcttgggcagtaagtggcgacttgcagcagagtggacgaacttatcaccaaggcaaagattgtacatttcacttctctatgatcattcttttttcgatgctactgttgggtttcacgtttatactatcagtatgtactcagcttgaggagcaaacatgtactttattcaataaaatggttgttatttgcaataatataatattattgcaagataggttcttcggctttc

SEQ ID NO: 89921 - DNA, 444 bp, Zea mays
  Clone ID: MRT4577_182010C.1
tctgttttttttccttaagattaacttataataagtggtggagggtggtaacagtattccatcgatcccaacaaaaagctggggaagcatgggtttgctgaaaccgaggaggagcacagcactaacaacggacacggagcgaccttgcaatcaaaaacagagatgggcaacaacaaacacgacacgaacgaagataaaccctctggactagggtaaacataacggtagcgaacaggataacttggccgcgcgggccccaccggtcagtacctccagttcccgtcggaattgccggaaccagcggtacggtggccaccgtcgtatccgccgccaccaccaccgtagccgccgacgccaccgttgccgacgccaccgccgtagccgccaccgaaataacggagcccgccaccgtcggatccgacgcctgcacggccaccaccgggc

SEQ ID NO: 89922 - DNA, 220 bp, Zea mays
  Clone ID: MRT4577_182011C.1
gccaaaatgcccaggggaattggatgacgggtcatttgttcaattccattctcaggggctggaacatggttggatagtttttgggggaaacttgatcaattaagagggggtcccaacaacagatgtttttaaaaaaaagaaatttttacatggccccaatttcaaacacagatttacccaaactggatagaggaacatcaagggattttgggtccttcct

SEQ ID NO: 89923 - DNA, 1933 bp, Zea mays
  Clone ID: MRT4577_182012C.1
ttgggtacctcgaggccggccgggcggacaagacgagatcgagtctcttgtctcaattgcccgctgccccctggcgttcccctcccccgcgtcgtcgtctccccaaatccccccaaaccctaccgccgatccgggcccagatcgccatggccgcgcccaacagcaatgacgccgccagcgccagcggcaccggcccggctggcgaggaggacatctccatcgaggcgttggcgcggcgcgtgcaagagcacatgaccctcaactcgaaccccgccgctcgccgccacaagttctgggagacacagcccgtcggccagttccgtgacgccgccgacgcatcgctaccgaacggccccatcgagccgcccacgccactctccgaggtgcgcgccgacccctacccgctgcccgccgccttcgagtggctcacctgcgacctcgatgacgacgcgctcctcgccgacctctactcgttgctcgcccacaactacgtcgaggatgacgagaacatgttccgcttcaactactccccggccttcctccgctgggcgctcaagccgccgtccttcttccgggcctggcacatcggcgttcgcgccaaggagtccaagaagctcgtcgccttcatctcgggcgtccccgcccgcatccgcgcccgcgacgacgtcgtccgcatggccgagatcaactttctctgcgtccacaagaagctccgatccaagcgcctggcacccgtgctcatccgggaggtcacccgccgcgtccaccaggagaacatctggcaggctgcatacaccgcggggatcgtcctcccaacccccatcaccacctgccgctactggcaccgatccctcaaccccaagaagcttatcgatgttggattctctcgccttggtccgcgcatgactatgagccgcacggtccggctatacaagctgcctgatgcgccgctcacccctgggtttcgcaggatggagctgcgggatgtcgctgcggtcacacggctgctgagggcataccttgcgaggtttgtggtagcaccggattttgatgaggtagatgtggagcactggttgctgccccaagaggatgtggtggacagctaccttgtggagagccctgagacgcatgaggtcacagatttctgcagcttttacacactgccctcatcagtgttgaacaatgctaactatgcgacgctcaaagcggcgtactcatattacaacgtttcaaccaaaactccattgcagcagctgatgaatgatgctcttattgttgccaaacggaacaattatgatgtgttcaatgctctcgatgtcatggagaatgagtcattcctcaaggagctcaagtttggtcctggagatgggcagctccactattacctctacaattaccgtattcgcaatggcatcaagccctctgagcttggtcttgtgctgttatagggcaggctaatcaggtggcatcaagccctctgagcttggtcttgtgctactatagggcagtctaatcaggacagtcctgagtttacaccttcccttccgcagcaggtctcattgtgcaatcccagtggtttctcattttgcctactgtggtagtgattctccttgatatgattgccatggtcactgataggagtcccaagatgatttgcaaacaagggagactggaattagagatatcctttcctcaatttaaggttactgttcccattagtgacatttcgcgtgcatcgtccacaatgtgtatgctggcaccgattttaccgagaaattttgatgtgtattcgaagttgtttgtgtgctgttgtgctatgtctgcacatgtatggatgtcttgatgctagaactgctgccacagctccttcagccctacccaaattttgatggtttctttttattaaaaaaaaaaaaaaaaagtttgccaaaaa

SEQ ID NO: 89924 - DNA, 864 bp, Zea mays
  unsure (1)..(864): unsure at all n locations
  Clone ID: MRT4577_182013C.1
ccccgcgtccgggtagatgtggagcactggctgctgccccaagaggatgtggtggacagctaccttgtggagagccctgagacgcatgaggtcacagatttctgcagcttttacacgctgccctcgtcggtgctgaacaatgctaactatgcgacgctcaaagcggcgtactcatattacaacgtttcaaccaaaactccattgcagcagctgatgaatgatgctctgattgttgccaagcagaagaattacgatgtgttcaatgctctcgatgtcatggagaatgagtcgttcctcaaggagctcaagtttggtcctggagatgggcagctccactattacctctacaactaccgtattcgcaatggcatcaagccctctgagcttggtcttgtgctactatagggcagtctaatcaggacagtcctgagtttacaccttcccttccgcagcaggtctcattgtgcaatcccagtggtttctcaattttgcctactgtggtagtgattctccttgatatgattgccatggtcactgataggagtccaagatgatttgcaaacaagggagactggaattagagatatcctttcctcaatttaaggttactgttcccattagtgacatttaagcgtgcatcgtgcacaatgtgtatgctggcaccgattttaccgagaaatttagatgtgttatcgaagttgttgtgtgctgttgtgctantgtttgcacatgtatggctgtatggatgtcaacttctgccacagctccttcagccctacccaaattttgatggtttctttttnnnntcaacaggttctattagtttgtcattcagtgatttgctttggccacattccaaaataa

SEQ ID NO: 89925 - DNA, 265 bp, Zea mays
  Clone ID: MRT4577_182014C.1
gactagacacatcaaaatttactaacccaaaaagggggggcaaaacaaacatatgcctacggttaaaggatccccgagccaattctttaccgcgtaactcattcctatatctttttttatttaaaaacttgaatcagttgccaccatggatacaaaccttgtgacaaggtgtgcccaccaaagtgttaaaaaacaaacatccactcgacggagtagcaaacgggctttatcttcacttaatcttaactgggactggggaggggct

SEQ ID NO: 89926 - DNA, 631 bp, Zea mays
  Clone ID: MRT4577_182015C.1
tgctaactatgcaacgctcaaagccgcatactcatattacaacgtctctaccaaaactgcattgcagcagctgatgaatgatgctctgattgttgccaagcagaagaattacgatgtgttcaatgctctcgatgtcatggagaatgagtcgttcctcaaggagctcaagtttggtcctggagatgggcagctccactattacctctacaactaccgtattcgcaatggcatcaagccctctgagcttggtcttgtgctactatagggcagtctaatcaggacagtcctgagtttacaccttcccttccgcagcaggtaatcgttgtgtcgctggcttagtatttgaattttatgattgctataggtgatgattcggttcccttaatgctgtaggtctcattgtgcaatcccagtggtttctcattttgcctactgtggtagtgattctccttgatatgattgccatggtcactgataggagtcccaagatgatttgcaaacaagggagactggaattagagatatcctttcctcaatttaaggttactgttcccattagtgacatttcgcgtgcatcgtccacaatgtgtatgctggcaccgattttaccgagaaattttgatgtgtatcg

SEQ ID NO: 89927 - DNA, 607 bp, Zea mays
  unsure (1)..(607): unsure at all n locations
  Clone ID: MRT4577_182016C.1
aaagaaaagaaaaaattcaactgcgaaattcggggcgttacacatgtgcagacatagcacaacagcacacaaacaacttcgaatacacatcaaaatttctcggtaaaatcggtgccagcatacacattgtggacgatgggggcgaaatgtcactaatgggaacaggaaccttaaattgaggaaagggtatctctaattccagtctcccttggttgcaaatcatcttgggactcctatcagtgaccatggcaatcatatcaaggagaatcactaccacagtaggcaaaatgagaaaccactgggattgcacaatgagacctgctgcggaagggaaggtgtaaactcaggactgtcctgattagactgccctatagtagcacaagaccaagctcagagggcttgatgccattgcgaatacggtagttgtagaggtaatagtggagctgcccatctccaggaccaaacttgagctccttgaggaacgactcattctccatgacatcgagagcattgaacacatcgtaattcttctgcttggcgacaatcagagcatcattcatcagctgctgcaatgcagttntggtagagacgttgtatatgagtatgc

SEQ ID NO: 89928 - DNA, 277 bp, Zea mays
  Clone ID: MRT4577_182017C.1
caaattcacatatgatcgaattcacaaacggtttgatgctggaggaatccctaactatttatcgtacgtaaaagctaaatcaattacgaaatattaaatcaacacagaagctagatgtattacggtaaattccgactttacggtagtaatatatcaatatattcatatgtcgatctggaaataacgccgtacgcatatgcctgccacatattggacttatatgcagacacaagcgtaatatccagtttgcctggacttttaataatcaccgcagcag

SEQ ID NO: 89929 - DNA, 815 bp, Zea mays
  Clone ID: MRT4577_182018C.1
cattgggtacctcgaggctcgccgggagtcgctcgaggagagcatcccacgaccacgataggtctcttgtctccaattgcccgctgccccctggcgttcccctcccccgcgtcgtcgtctcttctctccccaaaaggatcccccaaaccctaccgccgatccgggcccagatcgccatggccgcccccaacagcaacgacgcggccagcgccagtggcaccggcccggctggtgaggaggacatctccatcgaggcgttggcgcggcgcgtgcaggagcacatgaccctcagttccaaccccgccgctcgccgccacaagttctgggaaacgcagcccgtcggccagttccgcgacgtcgacgacacatcgctaccggacggccccatcgagccgcccacgccactctccgaggtgcgcgccgacccctacccgctacccgccgccttcgagtggctcacctgcgacctcgatgacgacgcgctcctcgccgacctctactcgctgcttgcccacaactacgtcgaggacgacgagaacatgttccgcttcaactactctccggccttcctccgctgggcgctcaagccgccgtccttcttccgggcctggcacatcggcgttcgcgccaaggagtccaagaagctcgtcgccttcatctcgggcgtcccggcccgcatccgcgctcgggacgacgtcgtccgcatggccgagatcaacttcctctgcgtccacaagaagctccgatccaagcgcctggcgcccgtgctcatccgggaggtcacccgccgcgtccatcaggagaaattttggcag

SEQ ID NO: 89930 - DNA, 345 bp, Zea mays
  Clone ID: MRT4577_182019C.1
gaagactgcattttaagatcatttacaaaatggtccggatggtggagaataaataaaatgtgtgggcgcgttggggggtggggatgtatgggatccaacgttacacccgatgacatgctccatgtgatgtcttgttttgtaggacctacataaaatactgtgtcctgcacactaacacagaggaccgtatgaaaacgctgggggtacctaagtaacaaaactgacggaaaatccatttttcttcagctgctgtaataatggaaaggcgccaaacgatggcagtttcaaagaaattcacaccggtgaatggaaatgaggcaacgtcttcacaaatggcttaaagcg

SEQ ID NO: 89931 - DNA, 224 bp, Zea mays
  Clone ID: MRT4577_18201C.1
cggtcggcggtggcgggtactccattcctcggcggcgggcccggccgaaggtacgggtacccgccgggttcacgtcgcgagagtgtcgcgacgcgggcattaaacaacggagtctggtccacgtgcaaaaaaaaaaaagggcacaaacagaaaaaaaaaaaaagggggggtgtctcacaggggtttaatccctacatgtgcgcacacgatagcgcacactcccc

SEQ ID NO: 89932 - DNA, 232 bp, Zea mays
  Clone ID: MRT4577_182020C.1
aattcgacggtcgactgacgcgttcgctgacgcttctgctgacgcttggtctgactcttgggctcgaaattgttttccgcgggaaatgtccatatatcccggagcttgtttttcgccatactgtcttcaattccgcttcttccttaacggacttcacttggacacttactacctctggcttcacaacatcttaattatctacattcattactctaattccaagatcatacta

SEQ ID NO: 89933 - DNA, 435 bp, Zea mays
  Clone ID: MRT4577_182021C.1
gtttaaggacatcaacaacaaccacatcggtttcgacatcaacagcatgacctccgtgcagggcaacccggctggtttcttccatgatcaagatggaaccttcgaaaacctgacactcagtagcaaagaggcgatgcgggtgtgggtggagtacgatcgagagaatacacagattgacgtcaccatggctcctctggccatagtcaaacctaagagaccaacagtgtccactatccaaaacctctcagacgtgctcaccgacgtggcatacgtcggtttctcatcgtcaacgggcaagatccatacgcaacactatgttctcggctggagcttcgccatgaacggccctgctccgtccatcgacctgagcatgcttccaaagcttccacggcatcatcacaagagtcgacgatcctgggtgttagagacagttct

SEQ ID NO: 89934 - DNA, 628 bp, Zea mays
  Clone ID: MRT4577_182022C.1
ggcgggacggggtcctggatttggccacatggcggggttccctctaggtggaggaggccacagccgcgacgcccccgcgtcgtccgtcccgccggtgcacccctccgacgccgcgtccttcctctacgccgcgcgcgcgggagcgggcctgcagctatggcagcagcacgagcagcagcaacagcagcacccgttctacacctccaacatcatccgcttctccgatgacccgcccggcgccccgccctcgctcacgggcgccgcgtcgtcgtcgtcgtcgcgcggcacgaggggcggcgcgggaagcggcggcggcggaggaggaggcggggtcagctgtcatgtctgcggcaaccaggccaagaaggactgcgtgcaccagcgctgccgcacctgctgcaagagccgcggcttcacctgcagcacccacgtcaagtccacctgcggacctgccggcgagagactcgtgctgcagcaggaaatagacgtgtgcccggagtcagtacgccggactaacgctgttgtaggtgcattattggacccgaataatgagcgtacagatggcctctacggcacctcgcaagctaggtactagaaggtttaagattatgaggatgacatatgaccc

SEQ ID NO: 89935 - DNA, 826 bp, Zea mays
  unsure (1)..(826): unsure at all n locations
  Clone ID: MRT4577_182023C.1
ccgggnaaaaaaaaaaaaaaaaaaagaaaaaaaaaaaatgcttgtataattttctttagaagaaaaaaaaacgattctaatgtgggtaggattgatctgcacctcgttgttaaactcacgtgttccctgtgtcgatgaacttgagcggacttttactgcaacttcttgcccatttgctaatgcacctcgataaactgctccaaacccaccctctcctatcatagttttgtagttgcttgttgcagtctggattgctttgagggacaactgttgtactgcaggatttgtagtgttatggatgctgcattcttgaaaaacaggatctgcatagaccagtgtaaaacaagcattgatttatctattaggtatttaagccatggacacacagaaaatgaaacatttttttgaaagggggtactgcagggggtcctgcagtattttttattcattgattaaatgtgtatatactgtttttacatgtgacggatatgcacaagtgacattacaaagtggtcatccattgtttgacctcctccactatttcttgcttcattctataacagataagaagcatctcttttctgaacagcgtctggcacccttgtactgtaggcggtatgttttcaaatagccatccatttctacacttccatatgcaccatggcatgaccatcactgcttccactttccagtttttgtcaagctattgaaaagttaatctcatcacattgtgtatgtcagttgttttcggcggtgccaatccaattgtctgccagcatcttcttgcaaaatggcacctgaggaagaggtgggtacggtaaccgtt

SEQ ID NO: 89936 - DNA, 378 bp, Zea mays
  Clone ID: MRT4577_182024C.1
aattggacaacttgcgaccgagttcgtttatatataataggggtacatgtatgggatatcccaacatttatacacattcacttgactaggcttggcttgtattggtacaaaagcggacacggacacgggcttttcatatttatagagtaaagatggccaaacgggccgggccggcccggtccggcccgggcccggtgaaatccgaacaaaaccggtccggacctgcttagccagcgggcttaaatttatgtacaagcccgtcccgtagagagcctaaacgggccaaaccgggacgtttaggacgaaataacctcccggaaactcccctatacgagaacggcttgaccagttagtgcgaaaaaaaacctgtttaacacc

SEQ ID NO: 89937 - DNA, 784 bp, Zea mays
  Clone ID: MRT4577_182025C.1
gcggcggaggaggcagccgaggaagggagaggaaggcggcgggaggaagaagtacgcgctggtgagctaccacgagctgcccgagtacatgaaggagaacgagttcatcctcaactactaccgctccgagtggcccgtcctcaacgccgtgctcagcctcttctcctggcacaacgagaccatcaacgtctggacgcacctgctcgggttcatgctcttcttcggcctcaccctggtgcacctcggccagtacttcccccaggtggctgatctgattgggcatctctcctggccaatctcgaaggtcgctgaaaatgtctccagcaatattggagatgtcctatcaggcgcggccatgttcatccagacgaacccgagcctggcctcgcatggcacggcggtggcgtcgcagacgacgcggtggcccttcttcgtgttcctggcgggggccatgttctgcctgctgagcagcagcgcgtgccacctgctgtcgtgccactcgcaccggctgaacctgctgctgatccgcctcgactacacgggcatcgcggtcatgatcgtggtctccttcttcccgcccatctactacatcttccagtgcgagccgcgctggcgggcggcgtacctgtcggcgatcacggcggccggggcgggcacggtgtacgcgctcatgtcgccccgcctgagcgcgccgcgctaccgcgcccgccgcgcgctgctgttcgtcggcatgggcctgtccggggtggtccccgcggcgcacgcggccgccgacagtgagctc

SEQ ID NO: 89938 - DNA, 285 bp, Zea mays
  unsure (1)..(285): unsure at all n locations
  Clone ID: MRT4577_182026C.1
ctgacttccctaattccccccatccttacnaccctcgttaacnctaanaaaaaanactcatacncccattatgtaaaatcnattgtngcatccacctttattatcagtntcttccncncaacnntgggtgcgcctagaccaagaagttatnatctcgaactganactgagccacaacccaaacaacccagctctccctaagcttcaaactagactattctccatatattcatccctgtagcattgttcgttacaggtcnatcatagaattntcatgtgatatata

SEQ ID NO: 89939 - DNA, 307 bp, Zea mays
  Clone ID: MRT4577_182027C.1
cggacgcgtgggcatggagtctgagcaggccaggggctgacagcttaagggaggaccctcagcggtgagcctgctgtggggacccatctgctcttgaacaagatgctgagctcctgtctggccttttttttttttttttttaaagtaacttgtgtgtaatataaacagatcctattgggggaaaaaaaaaaactcaatccatgttatttatataaaatgcctgtaggaagattgaacctcctgaaacttctaattgatttttttagaggcaaagggagaaacatagaattatgtttttttttcaaaa

SEQ ID NO: 89940 - DNA, 197 bp, Zea mays
  Clone ID: MRT4577_182028C.1
gcatcccgcagcgaggtatacgtgatcagaatcagccagtggtgcgggtgacgggggggttgtagggcggcatctgccacgcgatggcacgcgccttcgctgcggccggatgcgctcgtatggccacggcgcgttaacgcagttacatgctcgttcttgaccgtgacctacggttcctgttggtggagcttgacgtg

SEQ ID NO: 89941 - DNA, 645 bp, Zea mays
  Clone ID: MRT4577_182029C.1
tcgaggccggccgggactccaatcccaacacaggggcaggatacgcagaagttatccccatccatctctccttcccctcctcgctccgcttcttcggcggattcctcctccctcgaccgtccccgtacccgtccccttccggctcccaagctcgcccgagatggcaatcccgagatcaagcgtcgctgtgaatgaccagtgcatgctcaccatcggagcgctgcaggcgaagaggctgcaccgcttcctaccttccaagacggacgacacgtccaaggagatcgcagtgcaccacgtcggggatcgcgctaccagctacaaggacttcacaaacagcctccccgagactgactgccgatactcgacctatgattgcgactttgtctctgcagaaaatgtccggaataccaggatctgctatatcctatggtccctatccaccgccacggtgaagagctagatgctttatgccagctcaaaccaaatattcctcactggtctctacgtcattcacgtggaactgcacgctactgatgcctgtgacaccaccctatgatgagctccaggatcggtgctcactagacatcatcatgagcatgtctcatggacgaggactactactgtggatttgtatgccattatcca

SEQ ID NO: 89942 - DNA, 400 bp, Zea mays
  Clone ID: MRT4577_18202C.1
cgacggtcttccctcacaagattggcccagccgaggagacattgatgtgaaagatctgaaggttcggtatcgtcaaaacacgcctctaatcttgaaaggcattactgtgagcatcaaaggtggagaaaaggttggagttgtgggaaggactggcagtggaaagtcgactttggtgcaggctttattcaggatcgtggagcctgcagatggccatatcatcatcgatggtgtcaacatctgcactctggggcttcgtgatctgaggtctcgcttcggtgtgattccccaagaacctgtgctcttcgaaggaactgtacggagcaacatagacccagcacggcggtattccgaggctgagatatggcaagccctcgagtgctgccagctaaaggatatagta

SEQ ID NO: 89943 - DNA, 275 bp, Zea mays
  Clone ID: MRT4577_182030C.1
agagtgcgtgccaactcactcggagtggtgcggccatggccctatttgggcgagatgatcaacaacggcacaaaaccaatttgtgtgtcctacagccctcttgtttatggaggccgaaccgtgggtaatccagaggacgcacttcctctagacaaggagatgcaaggtaaggggcatagtgcgtgattgccatgtagtattcaatgcttatttattgccttttgaggggggacgatccggacactgaccttggacccttcaaattaatatgccct

SEQ ID NO: 89944 - DNA, 315 bp, Zea mays
  unsure (1)..(315): unsure at all n locations
  Clone ID: MRT4577_182031C.1
tttttttttttttttnnnnnnnttttttttttttttttttttttttttttttttaaaaaaaattggccctggatgaataatatgcaggatccatggccgatctcaactcgcattttttacagttgaaatgaaaatgggggaccacttatcattattaatatgaagagcaatatgcaagggatgccccaggaactttttctttaacacctgcatgttttcttccaacatgacggtctttatttaaaaccccaaaacttgactcaaagtcagtgaaaaaccgcacaaacaaaaagtgacggaacatggagcttgcat

SEQ ID NO: 89945 - DNA, 491 bp, Zea mays
  Clone ID: MRT4577_182032C.1
ccccctctcgagttttttttttttttttttttttttttttttttttttttttttttggctataccaatatttcaagaaagagagagtaatgtcatatatgctaaaggatacaacttctgctgaattaggcaataaagatttcatgggcaatctggcttggtattttccattaaaaacagacacagggactgtagttaggaaagaacaaaaccaattttctggacctgactcaccatcctccaacactgaacattcagtagggcgccactctttccactccccatgcaactctttagcatcagacattgaattaactgttagggggcttttgcgaaaatggcaaaatgcatggactgggataaaagcatcacttgataccactaaaatttgattaaaacttgggccatgaaaagcatgagaacagggtccccatgctaaagacttcactcggggaatatggcaaaacgtgttgaagactgcctgaggacagg

SEQ ID NO: 89946 - DNA, 306 bp, Zea mays
  Clone ID: MRT4577_182033C.1
attcggctcgagcacacctttttctgtctttttttctgtttttctgtctttctgtggaagggacctggagaagaggaaggaacagggtgctggggggaagaagaggtagctgaaacagttcaagccgaaaatttttggatccaggcatgcaaactacgaaacaccagactgccaagacatatgttgagatccagctcgttgagatcgggggacttgcactgtctgtcccattctgagatgaccttgtaatgtgaaacaaagttatcatcagcacgctgggaactccgctggtcacatcattaacaa

SEQ ID NO: 89947 - DNA, 413 bp, Zea mays
  Clone ID: MRT4577_182034C.1
tagtcagcattatgcaatagtagtgcagcacacgttgtttaatttatcctctcttcctaaatgcatatagctcggttggtatatagtttcacttggcttcgtgtgcagcagaagcatgtcaagatcgagcgttggatggatgaacggatggacctgacgagatgcagctttcggtcgaccatccggagcaatggggctggggtttcttgtccaaggacaactattttcccttgttctctgttcatttctttcagctgcaccctgcagtaggcagagttgtcaagatagatagctcgttatgaaatgcagtgagtgacactgttaccttccattcaggagggagaaaaaggtaaggctcataaaatgcagggaactgcttgctgctgcaccttgtgattatataacaaccgaag

SEQ ID NO: 89948 - DNA, 569 bp, Zea mays
  unsure (1)..(569): unsure at all n locations
  Clone ID: MRT4577_182035C.1
gatctgatacaggctgtgattactgctgggattattggacctctggtgcatctgctgcaaacggctgaattcgatatcaagaaggaggctgcttgggccatctcgaatgctacctccggtggttcccacgaccaaatcaagtatttggttagcgagggctgcatcaagccactgtgtgacctcctgctttgcccagatccaaggattgttactgtttgcttggagggtcttgagaacattctcaaagttgagaaactgataagaatttgggtgcttctggggaggggaatgtctatgcgcagatgattgatgaagcagagggcctggaaaagattgagaacctgcagagccatgataacaatgaaatctatgagaaggctgtgaagattctcgaggcttactggatggaggaggaagatgatgcgatgggggcaactatggaagctcccacaggtgttgcctttgactttggccaaggtggcaaccctgatctgaacttgngctgaatacagatttgaccaatggtggtaattcccttgtcgctgcagttgtcaccatttggtctagtc

SEQ ID NO: 89949 - DNA, 354 bp, Zea mays
  Clone ID: MRT4577_182036C.1
attcggctcgagacgtggacaggggtcttgttggccaaggggggtgagtggaacaacacgtatgaacggactagccctgctgttggcgcggctgcactgaatggagataatgagcctaaggataaagaatcacatcaaaagaatcaccgaccacacccacaggatcttaacgcagacctaacagatgatggtaccggacccccaataaaattaaccacaggacatgctggcagtgaagatctgtggatcctctggtgtcagttgatgtaggagccatctggggactaaatgctttgaaatgcagcacaggcagcagctgttctcgacggtagaatgcttgacgaggtacctgga

SEQ ID NO: 89950 - DNA, 2317 bp, Zea mays
  Clone ID: MRT4577_182037C.1
gggaccctcgaggccggccgggccgaaaagtcatcttgagtgtcgcttgtttcaatcccacctttgcttgctccccccggctcctcctcctcgtaccaaatctagggttcccgatcgaaatcctgcgccgccgccgccgccactgccgttggcgataatgtcggccagcaccgagcccgagaaggacgccgctgccgctgccgccaccgagggcgacgagaagacggaggcgaaggacagcggctccggctgggagctgctgtactgcggcgggacgagcttcgacgccatgggtcggaaggtggtgggcggggcgcagggcaacctggtgtcgccgactcggctgcggccgctcgtgggcgttgatatccgcttcgttgcctctggatgcactgcttgccactgtgttgctttagatgctggaggcaaatgttatacatggggtcgcaacgagaagggacagctagggcatggggatactcttctgcgtaacctgccgactgttgtttctcaactatcaaaatacaaaatcatcaaagcaagtgttggaagaaaccatacagtggttgtaactgatgatggcaaatccttatctttcggtcataacaagcatggacagttagggacgggttccttaaggaatgagattgagtcatcgccagtgtcctgtatcgttgcggaagcaaccaacgctgcctgtggggctgattttactgcctggttgtcatctgtggaaggctcttctatacttacagcaggtcttccccaatatgggcaactcgggcatggaactgataatgagtacaatgctaaagaatcgtctgtgaaactgacctatgaaccccagccccgtccaagagcaatagctgcattttctgggaaaactgttgtcaaagttgcatgcggaactaaccatacagttgcagttgattccaatggctttgtttacacctggggcttcggtggatatggaaggttggggcatagagaacagaaggatgaatggcaacctcgccttgtagaagtcttccagaagcacaatgttctgcctcctaatgccattgtctcagctggttctgtgagttctgcatgcactgctggtggaaaactgttgtcaaagttgcatgcggaactaaccatacagttgcagttgattccaatggctttgtttacacctggggtttcggtggatatggaaggttggggcatagagaacagaaggatgaatggcaacctcgccttgttgaagtcttccagaagcacaatgttctgcctcctaatgccattggctcagctggttctgtgagttctgcatgcactgctggtggtggacagttgtacatgtggggtaagatgaagaatacaggcggttattggctgtctctgattgttgtggacagagcaagtggtggtgatcgacttggtcaggcttgaaatttatgatggtgacaccggtgctgaagtagagaaagtggaggtgcaagtaaccaagaaggcatctgccagcaccaactcacgtgccaacaagcgcaagaaaacgaaggatgtttctgaatctgaatccgaagaggatgatgatgatgaaggatgaaagcggagacgatgaaaatggtggtgtagaagagtcaaagggcaggcgtggccgtaaacccgctaatagagggagaggcaggggaggcaaaaaggcgacccctgaggcaaagccatctggaaggggcagaggccgccctaagaaaaccgagagttctgctcagaaagccggaggaacctcgggcagaggaaaaagaggacggccacgcaagtgatggtccgccctacagtaatgcggcgttgaaaatcagtaacgcctgatgtgatcccattgacattgaggattcattttggtagcaatgcccgttgcactctgcccattttctcactctgattgttgcagctatccaatccaaagacattattagtctcttccccctcccccaatttccgaaatggggtttgccatcccattgtaagtctagaaatgcttaacatgcacatctgtgttcttcattgacgatgattttcttcagctttaggctattaatgaacccttgattcgagtgatttaaatatccaatacaaactgccctaatttcctcattgattgaagcagctatcaaaagacattattagtctcttccccctccccccacccaatttccgaatggggtttgccatcccattgtaagtctagaaatgcttaacatgcacttctgtgttcttcattgacgatgattttcttcagctttaggctattaatgaacccttgattcgagtgatt

SEQ ID NO: 89951 - DNA, 858 bp, Zea mays
  unsure (1)..(858): unsure at all n locations
  Clone ID: MRT4577_182038C.1
gggtacctcgaggccggccgggatgcacccattgttggtgctgatgattcttgcataagctggggtgtcgcccagaatggagagcttggttatgggcctaacgggcagaaatcatcagcaaatcccaaaaaggtggacattcttgagggcatgaatgttacaagtgtcggctgtggatttggactgtctctgattgttgtggacagagcaaatgttggtgatcgacttggtcagctggaaatttatgatggtgacaccggtgctgaagtagagaaagtggaggtgcaagtaaccaagaaggcatctgccagcaccaactcacgtgccaacaagcgcaagaaaacgaaggatgtttctgaatctgaatccgaagaggatgatgatgaagaggatgaaagcggagacgatgaaaatggtggtgtagaagagtcaaagggcaggcgtggccgtaaaccttctgatagagggagaggcaggggaggcaaaaaggcgacccctgaggcaaagncatctggaaggggcagaggccgccccaagaaaaccgagggttctgctcagaaagccggaggaacctcgggcagaggaaaaagaggacggccacgcaagatgtgatcccattgacattgaggattcattttggtagcaatgcccgttgcactctgcccattttctcactctgattgcagctatccaaagacattattagtctcttccccctccccccacccaatttccggaatggggtttgccatcccattgtaagtctagaaatacatctgtgttcttcattgacgatgatttcttcagctttaggctattaatgaacccctttgatcgagtgatttatttatcctgttc

SEQ ID NO: 89952 - DNA, 353 bp, Zea mays
  Clone ID: MRT4577_182039C.1
gcggagtctagctcctttcatcaggcaagctcggtggccagttcctccatcagctcggcaccaccctctagtactcgcggtcgactccttcacaccgtggcagctccctggacgttgttccccagccacctcgctggtgaggcccaagccgcatcaacctccgctgctcgcgctcagacctcatgcccagctcttctgccgagtcccctcatcgcttatcgtccccccccccccctccgttggctgccgtcatctctgtccagctccaccacgctggcgatgtagcactacagctctaccttgccgatgttctcgtcttgactgcgcccgtcgggtcctccgccgacggtttt

SEQ ID NO: 89953 - DNA, 371 bp, Zea mays
  Clone ID: MRT4577_18203C.1
attcggctcgagggcaatgtacagattttgttctgagacggcatgcaccagtcgagcggaagccaccagtcgccaccgcagactgaccgaccgatctggtcacactgaatgatccggcagagaagcaggctgacagaaactagccctatgtacaagcccgtgggatgaaacccgactgcacagacctgtggaaagcgaaccagacataactgagctggaacccagcttagaatgttgtgatatgcacgaataacgtggaccaagacacctgatctacagatcagtgacatgcaaaagatccaggcaatgttaacacaggctgcatgtgacatgcgtatagtgtggacacaaattgcatatgcatctctata

SEQ ID NO: 89954 - DNA, 747 bp, Zea mays
  Clone ID: MRT4577_182040C.1
gcacgaggtacaatgctaaagaatcgtctgtgaagctgacctatgaaccccagccccgtccaagagcaatagctgcattttctgggaaaactgttgtcaaagttgcatgcggatctaaccatacagttgcagttgattccaatggctttgtttacacctggggtttcggtggatatggaaggttggggcatagagaacagaaggatgaatggcaacctcgccttgtagaagtcttccagaagcacaatgttctgcctcctaatgccattgtctcagctggttctgtgagttctgcatgcactgctggtggtggacagttgtacatgtggggtaagatgaagaatacaggcgatgattggatgtacccgaaacctgtgatggatttaagtggttggaacattcgctgcatggcttctggtaacatgcaccacattgttggtgctgatgattcttgcataagctggggtgtcgcccagaatggagagcttggttatgggcctaacgggcagaaatcatcagcaaatcccaaaaaggtggacattcttgagggcatgcatgttacaagtgtcggctgcggatttggactgtctctgattgttgtggacagagcaaatgttggtgaccgacttggtcagctggaaatttatgatggtgacaccggtgctgaagtagagaaagtggaggtgcaagtaaccaagaaggcatctgccagcaccaactcacgtgccaacaagcgcaagaaaacca

SEQ ID NO: 89955 - DNA, 391 bp, Zea mays
  Clone ID: MRT4577_182041C.1
gcttcctgaagctcatcaagattggacattgtagctggtgcatggcatcaatcacagtcggcaacaatcacattcacgaacaatcacattcgcgacagaatacgggctggacagcagtaactgggatctgcgatcctacagctcgattccatcttttcagccgggcatattatcttgaggctgaatctaaaggcgcaagtctggtcctagtggtacctgggatgccattcacttatggttactgtacatactatcatcacacccaacagcgtccgaaactcgctctggggcatccttagatttggagacattaatcaagactagctcttgattgctgtctgctggcatgttctgatgttatattctggctgcatacatgaggcatcatacc

SEQ ID NO: 89956 - DNA, 875 bp, Zea mays
  Clone ID: MRT4577_182042C.1
gattcttgagtgtcgcttgtttcaatcccacctttgcttgctccccccggctcctcctcctcgtaccaaatctagggttcccgatcgaaatcctgcgccgccgccgccgccactgccgttggcgataatgtcggccagcaccgagcccgagaaggacgccgctgccgctgccgccaccgagggcgacgagaagacggaggcgaaggacagcggctccggctgggagctgctgtactgcggcgggacgagcttcgacgccatgggtcggaaggtggtgggcggggcgcagggcaacctggtgtcgccgactcggctgcggccgctcgtgggcgttgatatccgcttcgttgcctctggatgcactgcttgccactgtgttgctttagatgctggaggcaaatgttatacatggggtcgcaacgagaagggacagctagggcatggggatactcttctgcgtaacctgccgactgttgtttctcaactatcaaaatacaaaatcatcaaagcaagtgttggaagaaaccatacagtggttgtaactgatgatggcaaatccttatctttcggtcataacaagcatggacagttagggacgggttccttaaggaatggttggtacctttcacttcttattgcctgtgagtagtcacagaggtgccaacacacatcattttggtgctaagtgctaacatattgttacgtttttcaagtttaaacaatcatgatacactctgcaaacatttcaatattttaatagtttctttttccccttatgctggatgaaccgctagtattttgatgtagcatctgatgtgaacttgaagtatctttgattactgttgggaatggcatttcgtacattccttttgccc

SEQ ID NO: 89957 - DNA, 249 bp, Zea mays
  Clone ID: MRT4577_182043C.1
ccggccgggacatgcagccctcggtcgcattctcttcctctcctagagtcctagtccttcccatcccaggtcacccagagagcgagaagccgagaaggtgagtgagactacgcccacgcgcccacggggacgggccagcgccctagctagctctcggccgcatcgccggacgtctattaaaccgccgccgctcgtcctcggcatgcgcggctctgctcgccagcgagatggcgcctgcagcttcgatcc

SEQ ID NO: 89958 - DNA, 1362 bp, Zea mays
  unsure (1)..(1362): unsure at all n locations
  Clone ID: MRT4577_182044C.1
attagatatagggggtgtttgaatgcactagaattaatagttagccgctaaaattagttgagacatccaaacaccctagctaatagttcaactattagctatttttagtaaattagttaatagttacataattatttgttagctagctaatcccactaataatttttagccagctaactattagttttagtggattcaaacaccccataatagtttacatgacatacaaaggttatagaatgccccttgttgttcatgagctgcgggtaagagccacggcccatgggtaaaagccactcccaggaacgcaattgactctacattcttgattgtgtttagacgatgtgccaccacaattgtggtcctccctgacattattcgatcaagagcctagcaattgctctgactgtgcatcaagcacacttgttgcttcatcaagtagtagtattgagggattccggattattgcccttgcaattgcgattctttgcttctgccccctgagagctgtataccgtgctctccacaatcagtattttttatggagtcattactgtaggtgaactatgtacatgttacatgtacatacggtatatgtttacagttgttgcagccagttctgcacctgttcagctagcaatggcttcaatctatggcagattagtatcatttctctcctaaacatgtctttgcacgcggctattgttggcgggatattttcaaatatctagctgttccggtattttcatatgcaccaagtcatggttatgatgacctctattttccaaggatttgccaattgaagcctcattcatcgcatcgcaaggagtcgatcagaggtgcggggtggcgtgactccaattatctgccaacatcttcgtacgaagctgcaccgcaagaacaagtggacagttttctcctccctttgtcggatgcaattttcacatgtgaacaattcaagatccatgttctttctccttagcagtgacctagtattcagtccagcttccaatagaagccagaagaacactttttgttttggttgacatttcgatgcccacaaccacatgtatgcggggtgtgctagctcttctgcaatcatgtgtttatatgtttttgtgacgaaaatttcagatttccctagatatatgaccatgtgttagtttgaccaatggttggttgtccttgcaaatgggtaatgaggagttggtattgtgggaaagctgtcacggacatgggtgtgtagaacatttgttgagggtgttcaatagcctttgcttgtaatattgttatttccttatgaatggcatacgacaacagttctgaatnnnnnnnnnnnnnnnnnnnnnaaaaaaaaannag

SEQ ID NO: 89959 - DNA, 163 bp, Zea mays
  Clone ID: MRT4577_182045C.1
acctcctctctgttgatccgtggagcaccagccaagctcctcccctgcggctcgcctccctcacggcgccgcctgatctccattgctgacctccactccagcacctgtgcaggcgcacctgaggctatcttccgcatcttcctctagtgacggccgccaggtc

SEQ ID NO: 89960 - DNA, 214 bp, Zea mays
  Clone ID: MRT4577_182046C.1
cactcgtacgcccacgcgtccgcccacatcgtccgcccacgcgtccgtccacgcgtccgcccacgcgtcctgccacacgtccgcacacgcgttcgggaaccgcaagccttccggttctacatcagatacttgtctagtgcctacatgcattccaaatcatatgcaaccactctgtacatatctgacttatctcacttagtatgggactgtgctt

SEQ ID NO: 89961 - DNA, 274 bp, Zea mays
  Clone ID: MRT4577_182047C.1
gtgcgtcctaggagatctcgctcgacccaattcgcggctcctgcgccggtgttgaccgcataaagctgttagcgagatcgaggatgatgccgaaggctcaggtcaacacttacaccttcaccgactggcttatgcccacggacgccatcaggcgattgacggtatacctggccatctccggtcgcgcgctcgtctcccccaccgactactacgacatctttatggatcgggaggccagacgggcgatagacaagagtccctatgacaaggccgc

SEQ ID NO: 89962 - DNA, 369 bp, Zea mays
  unsure (1)..(369): unsure at all n locations
  Clone ID: MRT4577_182048C.1
gcggaattcngntcgaggatacttcatcattataaaccctagagtttgttggggatcgntcgatcttttatgnncgtncccatttattgaataaactctatgcccccaatggtggagaataccaatagtaacacattggaagtccaagggtcttttgccttgacttatatggtgggatttatttcacttaacttgagaaatcaaaacatggacaaggtggtttcacacactcgcccgcagcaacggtcgggccgggccgggcgttgcgtggcgaggcgaagcgaggcgaggcatgcatgcaagctaactggcgggcgtggtgtggttgtgtcaatttttagcactcactaaccgcgtccttaaaccaat

SEQ ID NO: 89963 - DNA, 314 bp, Zea mays
  Clone ID: MRT4577_182049C.1
ccttaagcatgctcacgccaggaggttctgcagattcggtacgcgtaaagcatcccactgggctctagggatccactgccaactggttatggatatgttgggaaatgatcgtcactccacactcgagccggagctaggaacgggtgcctagggactactacattaattgttgctcactgccgttcagcgaaacctgctgccctgttaaaatcgcccgcggagaggggtggatgcgctcttccttctgtatatgtcctggcgtcggtggagcggtatataaggcgatcgttcacagataggatccgaaacttaca

SEQ ID NO: 89964 - DNA, 1299 bp, Zea mays
  Clone ID: MRT4577_18204C.1
ccccggcatgtccctttcctacggcatttctctcaattccttggtgttctacttcaatttccataagctgtatgatcgggaatgatatggtagccatagagagggtgcatcagtacagtactctcccttctgaggcagcatgggaagttgccgacggtcttccctcacaagattggcccagccgaggagacattgatgtgaaagatctgaaggtcgatacctttttttttaatctgcattacgtcctattatagcaccttaacaagtgctaagatgaacgagtgatgagcagagcgcaaatatctgcaggttcggtatcgtcaaaacacgcctctaatcttgaaaggcattactgtgagcatcaaaggtggagaaaaggttggagttgtgggaaggactggcagtggaaagtcgactttggtgcaggctttattcaggatcgtggagcctgcagatggccatatcatcatcgatggtgtcaacatctgcactctggggcttcgtgatctgaggtctcgcttcggtgtgattccccaagaacctgtgctcttcgaaggaactgtacggagcaacatagacccagcaaggcggtattccgaggctgagatatggcaggccctcgagtgctgccagctaaaggatatagtagcctcaaaaccggagaagcttgatgcactagtcgccgacatgggggagaactggagcgtagggcagaagcagcttctgtgcttcggccgagtcatactgaaacgcagccggatcctcttcatggacgaggcaacggcttcggtcgattctcaaacagacgcggctatccaaaagatcatccgcgaggagttcactgaatgtaccgtcatcagcgttgcacatcggatcccgactgtcatggacagtgaccgtgtcctggtgttggacgcaggtctagtggcagaattcgacgcaccctccaagttgatgcggaggccatcactctttggtgcgatggttcaggagtacgcaagtcgctcatctagcgtgaaggaaaccgttggatgagatgagaccccacttctcatgggcaaaagacgacggtataggagaaatttaggcatacgcatgatgggctctgttcgcaaggaaaaataaattgtaataggactttctgtaagcttgcaagcataaagctttgttttgttcgctacaccatgtattatcttaaatagaactggactatttggtttgcatttccgccaattttgtatgtgacgaaagcttagagcaaaaaaaaaaaaaaacaggcggacgccgactagtgagctc

SEQ ID NO: 89965 - DNA, 323 bp, Zea mays
  Clone ID: MRT4577_182050C.1
ccggccgcgcggaggatgtcgtgtggcgctggactcttcgaatcgagcggaactgtgggaggagagaaagagagagtacacgacaaggctgtttgtccaagcgtccacccgtcgtcgtcctcttcccttgccgtgcttaaaacaagcgagacggagacgcgcgcacagtcgcactcgcacacgatcttagcgtcatgacgatgggattgtgtgggtttcgtttcacatcaattggtgtgggtttgtgtgttaaatcacatctatgtgacggttgttaatataaacaggtgttgtgtaaaaaaaaaaaaaaaaaaggggcggcc

SEQ ID NO: 89966 - DNA, 248 bp, Zea mays
  Clone ID: MRT4577_182051C.1
ctaagaaatgatactgccactcacttttcacatgatgcaatagttggggaagatgtgatactctatgcaatgttgagatctgatcctgtggcaaagggaacaattacttcaactaatccaaacactgtgctaggaggtgaaaatcttggaacacaattttgtgaagtagttgtgaatgttgtgctaaaaagggacgcagatctgcctcgcccttatgaccatatggagaccatgggtgatgcttatat

SEQ ID NO: 89967 - DNA, 1467 bp, Zea mays
  Clone ID: MRT4577_182052C.1
ctcgaggccggccgggttccttatctcgaggccggccggcaggccggtgccaccatggtgccgctccactgctcagctagcgtccacctccacttcctatcgccatctctccccctttcgtcatccttctctctcctctgccatcgcgtccgccgccccaccgccatccgcgccgaagctgaagtgcggcctccgctacctgtctccgcggcggagtcagagccccctgacgccggcgctgtggaagccgaaggtcagggacccgtggagctccgcgctccgacgctcttctcgactgatgacaatcccaccccgctccagactgccaccagtctcctcctcaccggcgccatctcggtcttcctcttccgcgccctccgccgccgcgcccgccgcgccaaggagctcagagtgcggtcgagcgggttgaagaagcccaacaatctcaccgaggaggccctggagaggctgagattgatgagcgcctcaccgatcgagaccgagaaggcaacttcgcccatccaggctctgctcggcgggattgcggcgggggtcatcgcactcatcctctacaagttcagcaccacagtcgaggctgcgctcaaccgtcagaccatctccgacagcttctcggttcgtcagattacaatcacaataagaacaattgtcactgggctgtgctacctagcaacttctgtctttggaatcaatgcggtgggattagttttgtattccctccaactcactttacaatcaatcatggacgatgactccagctcttccacagggaagattagtgaacaatctaatacactggcatcatctgatagctccacaagtagcagggaatcagacagtagtgacatgcaagtcactgacaaaagtaaaaactcagcagagaagcagagctagacatgtaatccagacagccaaaatctgagatctgagggtacatatctgatgaaatcattttaagcattccttctcattattagctgaaaaatctgatgagagcgatctcaactcgagagtttcaattatgctagtattccgtccaaaatccgtccaaaaaaaagaagagaactcaattctagatttgagctaagttaaattgtcttaagtttgattatgtttttttaaaaatatcattatttatatcattaaatatgtttgttataaaatatattctatgattagtggaaaaaaaaaaaaaaaaaaaaaaaaaaaaaaaaaaaaaaaaaaaaaaaaaaaaaaaaaaaaaaaaaaaaaaaaaaaaaaaaaaaaaaaaaaaaaactcatacaataaaaaaacacaaaataaaatataacttaacgtaaaattaaaaacaattgtgactggaaaaaaccctgaaaataacccaacttgggcgggctccccaccatatccaaactttaacccactgcccgtcatatcgaataggcccgtttttataagaccttcccaac

SEQ ID NO: 89968 - DNA, 315 bp, Zea mays
  Clone ID: MRT4577_182053C.1
gttggggggcaaataaaaatcctataaaaagtaacaaaaattttttccaaccctttacctcccatccctttttacaagccataaactttggtcacacaatgaccgccaggcaagcctaaaatacaatccccattcaaaaaatggagagcaaaggtacatcttaaaaactaaaaaagccaccaagctagcattttatttagtaaaatcgttcacccccccgtccccaatcttctaaattttacacagttgccgtcttgaggctgttgcccttctcctttaggctcaccagtaggctttcaaaactttttttgaaag

SEQ ID NO: 89969 - DNA, 343 bp, Zea mays
  Clone ID: MRT4577_182054C.1
gccggccgggtccgggagatcgaatacttttatcaagtctacaaaaaatgaaaatcgcctccattgttcttcttgctcttggttcctacttgcttaactctaatgtcgttgaagcccaagatatctgttggaaagcatgttttcccaaagacactcaatgtcctccaggctggcattccaagcagtttggtcattgctggacttgttgtcgcgatacgaatgcttaatttcttataccatattgtttgcttattaatataaataaatatgaatggtttttactaggctgttataactagcagttcttgactaaaaacaaaaaaaaaaaaaaaaaaggccccta

SEQ ID NO: 89970 - DNA, 361 bp, Zea mays
  Clone ID: MRT4577_182055C.1
acaaataagggggacaagggttccaggccacacgaacagaaggggtccataaaatacagaaaactttttggggggccccatgtcaacacaggggctaacctagaccagggccaaaaatgctttgccacgttttcccccccccatacaggggagggtggcccaggaattggtacaatgggacagatacaatgggttttcaacacaaccggagacaggttttagttagccacaactttgggaagaattcaacatgaactccaggcgaaggggtgagcaaagggcgagcgattttttcaccgggggggccccagggcttgaaaactgccatgggcacaagccttcaaaacaccatgctttttgg

SEQ ID NO: 89971 - DNA, 310 bp, Zea mays
  unsure (1)..(310): unsure at all n locations
  Clone ID: MRT4577_182056C.1
nccnnntataattcccttttttcccccccccccccccctgggtctttttgggactgtttgagggccaacgcggaaagacccgggggggttccccctaaacatttacattgcccccttcaatggccaaaaaaaaacaaggggcgggttacaaaaagccaagtgttggcattttggcaatatccaacccaagagccaccaagaccgtggacctaggcaaaaaagacagggcttatttgcaccctcaatagcccagcgattctactggggggagagccccaagacttattttctcacccctaggggcccaacc

SEQ ID NO: 89972 - DNA, 256 bp, Zea mays
  unsure (1)..(256): unsure at all n locations
  Clone ID: MRT4577_182057C.1
gcagcccagaagagaaggggnaagaacaacaaacnaacaaagcgacaaggggggggagacaaagcggagaaangnacacaaacnaangaggcgaaccgggcggggggaggcngtttttttttcaaaanagangacggggcaacaagaaacaaacacaattgagagccgaagactgtctacctgcttcttaagtcaaaaaaaactttgggcttacggaccctttgggtactaatggtatttacagggacaagcacag

SEQ ID NO: 89973 - DNA, 359 bp, Zea mays
  Clone ID: MRT4577_182058C.1
gtctatttctttaggctatcttgtgagatcgtggagcagctgtaggacacattgtcatgtgactggcacaaccatggcgatgaatgttagctttctcagttttggtcgaccctgatctgaacttcatttactgggtcttctatttgcttgacaaatactagtatgggagggtccattaagtatgacttgaaattttgaatacttaaaaagattgcctggtgtttatgtgtaattttcatgcttaatgtctatagtggtgatcctttcttcccatctgacagttgcgcatagcatagtagcatgtaatcccatctatgtagattccattaggttatgcttatggtaattgattcatttat

SEQ ID NO: 89974 - DNA, 357 bp, Zea mays
  Clone ID: MRT4577_182059C.1
caaggtcctgtttgaatgcgaacgagaaaagtaggaccctttttatgtagcagcaaacaaaaatgaatataaagaactatatttatgaatgtaggttgtatgtatgtcgatatttattatcattcattcgaatatggacggaaaatggactaaaaactatattttagaacagatagagtaatatttatcataaaccactaacacgtaacgatcaccttgcatattatacacttagcactcattaaactattagcgtacacgttacaactatcggtaactatagcctagattttttactctacttaatttaattgggaaataaaaatagatcaaacctaattaaatccggtaagaatc

SEQ ID NO: 89975 - DNA, 124 bp, Zea mays
  unsure (1)..(124): unsure at all n locations
  Clone ID: MRT4577_18205C.1
cagttcatgcaagaccctanantccanngggggtgggtggtgtanttagtgatgtgggtcatngcattcacataccccgtatagatgagagagcctctcgtatgtttttgtacttttggctcct

SEQ ID NO: 89976 - DNA, 929 bp, Zea mays
  unsure (1)..(929): unsure at all n locations
  Clone ID: MRT4577_182060C.1
atctctatatgcatcttctccgttttcctgtccgatacaaatgcctgcgcattagcgatcctcctcgctctccttccccttcctgctgagccgtgctgccgcggccccggcacgccatggcgtccacggcgtactcgcggtcgtcgtccaacaagctgccgggcggcgagcggcggctgcccccgcgcctcatgcggggcctcacgtccaaattcgagcccaagaagctgggcgtcggcctcgtcgccggctgctgcctggcgctcctcacctacgtctccctcgccaagctcttcgcggtctactcccctgtattcgccagcacggccaacacgtccgcgctgatgcagcagaacgcgccgctggcctcgtccaagccgtccgtgccggagacggagaccatccctccggaagagacgctggacgacggcgacggcgcggataccggcgatctgcgtgggacggagcccggcttgccggaagctgccgtcatgaggaacgacatggcagcggggtccgacgagcccggcttgcccaccaggaaggacggcggcgggaatgcggaggccgagcccaccaacaagccatctgaggatggcaacggcggccaacaaggaggcaagatgacgtgcgacgagaacagcgtggacgagcggttcccgtacgcccggccgaccgtgtgcgagctgtccggcgacgtgcgcgtgagcccgaagcagaggacggtgtacctggtgaacccgtccggcggcggcggcggggggttcgacgagagcgtcgagaagcggctccggccgtacgcccgcaaggacgactcctcaatgccacacataacggtgaagtcngtggcttcgggcgcggcggcgcccgagtgcacgaagcggcacgcggtgcccgcgggggtgttcttccggggcgggtccaacacg

SEQ ID NO: 89977 - DNA, 204 bp, Zea mays
  Clone ID: MRT4577_182061C.1
tttttctagctccgctaatgcggtggtcgaaggcctctatatggaattgggaacgccactgatacagagtacaagggccaggccgagctgctgtgcatctcttgacccctggatggaccgaaaatctgcatgctgacactgaagctcttgagcgcagcctccgattgaaagtgcctgacatgttgaatgatacaggtactcacg

SEQ ID NO: 89978 - DNA, 2312 bp, Zea mays
  Clone ID: MRT4577_182062C.1
cctcgaggccggccgggagtcccagatcgtcaaagcctcgcctcgcctacactccaccacctccatctcgtaagctccaacacaccatcaaattaatcgcgctccttctcccaccagctttcccccttttttttcctgcccacatacaaatgcttgggcattagcgatcctcctcctcgctctccttccccttccccttccccctcctctgggtctgggtgcgccctcccctgctccacttctccggcgctgagctgtgctgccgcagcccgcagggcccgcgcgacatgacgtccacggcgtactcgcggtcgtccaagctgccgggcggcgagcggcggctgcccccgcgcctcatgcgggggctggcgtccaagatcgagcccaagaagctgggcgtcggcctcatcgccggctgctgcctcgcgctcctcacctacgtctccctcgccaagctcttcgcaatctactcccctgtcttcgccagctcggccaacacgtccgcgctgatgcagcagaacgcgccgccgacctcgtccaagccgtccgtgcccgagacggagaccatcccgccgcaggagacgctaggcggcggcggcgacagcgcggatcccgtcgatctgcgtgagggcgcgacgggctccgaggagcccggcttgccggaagctgccctcacgaggaaggacatggcggcgggatccgatgagcccggcttgcccaccaggaaggacgacggcgaggatgcggcggccgagcccaccaccaagccatctgaggatggcaagggcaatggcagtggtggtgggcaaggagtaggcaagatgatttgcgacgagaacggcgtggacgaggggttcccgtacgcccgcccgaccgtgtgcgagctgtccggcgacgtgcgcgtgagcccgaagcagaggacggtgtacctggtgaacccgtccggcggcggcggcggcgggttcgacgagagcgtcgagaacggctccggccgtacgcccgcaggacgactcctcaatgccacacataacggtgaagtcggtggcttcgggcgcggcggcgcccgagtgcacgaagcggcacgcggtgcccgcggtggtgttctccgtgggcgggtacaacacggacaacaacctgttcgacgacgacatgacggacgcgctggtcccgctgttcctgacgacggcgcacctggacggcgaggtgcagctggtggtggccgactacaagccgcggtgggtgcgcaagtacgcgccgctgctgcggaagctgtcccgccacggcgtggtcagcctggacggcgacgccgagggggaggaggaggggccgctggacggcgtgcactgcttccccgcgggcgcgttcgtggtggggctgctgtaccgcgaccgcgaccgggatctggacctgtcgcctcacccggcccggaaccggaacccgcgcaacgtgacgatggcggacttcgcgcggttcctgcgcggcgcgctggcgctgccgcgggaccgccccgccgtcctcggcggggcgcccggcatgcgtccccggttgctcgtcgtctcgccgcggaggctgctgaacctggaggaggtggcggcggcggcggacgcgctcgggttcgacgtggcgtccgccgaggcctgcgcggacgacgtggcggagttcgccgcgcgggtgaacgcggcggacgtgctggtgggcgtgcgcggcgccgggctgacgaaccaggtgttcctgccgacggaggcggtgctggtgcagatcgtgccgtggggcaagaagatagagtgggtgaccaccagctcctacgggcgggcggcggccgggatggggctccggtacctggagtactacgtcggggaggaggagacgaggctgagggacaagtacccgcgggagaccgtcatggagcaggacgtcgtcgtcaacctcacaaggttccggcccgtgctgctgcaggcgctcgacaagctgcagcagtgacgaggaatggattcaccatagccggccggcaggaggaagctcgctcaggtcgtcgggcatgggattggtaatttggttggttcatctgccggttttgttttgtttgtcgtaagaaaagaagagaagagaacatacatacactacacacgaacgaacgagaattctgttcattcttcattcgcttggcatcattcattcctccgattaccatcccattatgttccttccaagaactagaagaaagatcgattgtgcgtgcagcgtgcatgcatgcatgcggcccacccatgaattatctatcgcaaaagaaaacgaaaatgatgtttcagtgc

SEQ ID NO: 89979 - DNA, 2325 bp, Zea mays
  Clone ID: MRT4577_182063C.1
gctcgatgcggcacgatctcgcgggcgcacctggcgtcaagttaatcgctctccttcccccaccaggtctcccccgcgtttgcctgcccacacacaaatgcttgggcattagcgatcctcctcctcgttctccttccccttctcccccctctgggtctgggtgcgccctcccctgctccacttctccggcgctgacatgacgtccacggcgtactcgcggtcgtccaagctgccgggcggcgagcggcggctgcccccgcgcctcatgcgggggttcgcgtccaagatcgagcccaagaagctgggcgtcggcctcatcgccggctgctgcctcgcgctcctcacctacgtctccctcgccaagctcttcgcaatctactcccctgtcttcgctagctcggccaacacgtccgcgctgatgcagcagaacgcgccgccgacctcgtccaagccgtccgtgccggagacggagaccatcccgccgcaggagacgctaggcggcggcggcgacagcgcggatcccgtcgatctgcgtgagggcgcgacgggctccgaggagcccggcttgccggaagctgccctcacgaggaaggacatggcggcgggctccgacgagcccggcttgcccaccaggaaggacgacggcgaggatgcggcggccgagcccaccaccaagccatctgaggatggcaagggcaatggcagtggtggcgggcaaggagtaggcaagatgatttgcgacgagaacggcgtggacgaggggttcccgtacgcccggccgaccgtgtgcgagctgtccggcgacgtccgcgtgagcccgaagcagaggacggtgtacctggtgaacccgtcgggcggcggcgggttcgacgagcgcggcgagaagcgggtccggccgtacgcccgcaaggacgactttcttctccccggcgtgacggaggtgacggtgaagtcggtgccttcggccgcggtggcgcccaagtgcacgaggcagcacaccgcgccggcggtggtgttctccgtggccgggtacacggacaacttcttccacgacatggcggacgcgctgatcccgctgttcctgacgacggcgcacctggacggcgacgtgcagctgctggtgaccaactacaagccgtggtgggtgcagaagtacacgccggtgctgcggaagctgtcccggcacgacgtgatgagcttcgacgccgcggacgaggacgacgccgtgcactgcttccccgctggcgcgttcctggggctgtaccgcgaccgggacctgatcctgtcgccgcacccgacccggaacccgcgcaacctgacgatggtggacttcgcgcggttcctgcgcggcgcgctggcgctgccgcgcgaccggcccgcggccctcggggagcagcccggggcgcggccccggatgctgatcgtctcgcgcgccggcacccggcggctgctgaacctggacgaggtggcggcggcggcggacgagctggggttcaacgtgacggcggcggaggccggcgcggacgtgccggcgttcgcggcgcaggtgaacgcggccgacgtgctggtgggcgtgcacggcgccgggctgacgaaccaggtgttcctgccgacggaggccgtggtggtgcagatcgtgccgtggggcaagatggactggatggccaccaacttctacgcgcggccggcggcggggctggggctccgctacctggagtactacgtcggggcggaggagacgagcctcaaggacaagtacccgcgggagcacgtggtgttcagcgaccccatggcgctccacaagcaggggtggcaggcgctcgcccagaccgtcatgaagcaggacgtcaccgtcaacctcactatgttccggcccgtgctgctgcaggcgctcgacaagctgcagcagtgagggaccgtgattcctgctactgttcgtcttcatggaattcgccattgccgaccggccatcccgagactgtggaggctagctagctgctgctgctcctgccaagtacagtactatcgctagaaaaagaaagaaaaaaaatgagagatagagggaatgaaggaggcttcaaatttgcaatcgagttggtttgtattttttttggtttcaaccgtagcagtgcagcagaaacaccagcttggatagtgcgttttacatacactacagtctacacacgaacaagaatcatgttcattcttttccttgacgagttgactccacctggcaatggcattcttcttctactgatgaacacatcaaaaaaaaaaaaaaaaaaaaaaaaaaaaaaaaaaaaaaaaaaaaagaaatataaaact

SEQ ID NO: 89980 - DNA, 316 bp, Zea mays
  Clone ID: MRT4577_182064C.1
gcgagcggccgcccttttttttttttttttttttttttttatgacaattacaacaaaaaagaattccatattcgccaatagtaactaacaatatttcagtaatattggcgtgtcacatcacatctgcttcaaaatcaatatctggttacttctgatacgctgctgatcaaaatctgacagtgttccaagacgatccagacgacgacaactcgctcattgcctcactctcaaatcaagcttctacacatgctgaatatgaacaacacctcgaagttcctcttccccctcgttctcccacccaatctcattctaacat

SEQ ID NO: 89981 - DNA, 284 bp, Zea mays
  Clone ID: MRT4577_182065C.1
ttcgagagtgactcccgttgtcacaaggcttcccagagcgaacctgtgcggctgcaggcaccggcgcgtcgagtttccggcgtccggaaggaccgagctcttctcgcggatccagtgttccgtttccagcccccaatctcatagcggagccgacagatagcaggatccggcatggccaaatccgcggcgatcggcatcgacctgggcaccacctactcctgcgtgggggtgttccaacacggcaaggtggagatcatcgccaacgaccagggcaactgcaccac

SEQ ID NO: 89982 - DNA, 600 bp, Zea mays
  Clone ID: MRT4577_182066C.1
tcatagcgggcgccgcgggcaggtacaagcttttttttttctttgtttaatactgtggtggtgagtagccttcatttttttaaaaatatgcatgggaaggatgaagatcatcttgcatagtcattagcttccatgaggcgcacaagaggtggagtaaaaacgaacggaggggggggcctcccagacctgcattataagtccgttgtcaaaacggggggaattacccccactttttaatggagtaacaaatgggtcattgttaggggggaaactaaattttaagccggttaaaaaacccgcttaaaatttagggtgtgcttaaaatgggtcatttggaacacattgtataatgggggctaattaattcctgctgtgaatgcgaataaaaaagcagtgactgaagcgctaactttctgttgagcatgatcgaccagcttgcccgccaaaggggggttttgggtatacaagaaaaatttaatccttccccggcaaatttttaacaaaaggggggggttctacccccccaatttaaaacttgggcggcttccctctaagggggagattttggaaaatgcaaaaaactggggggggggggggggg

SEQ ID NO: 89983 - DNA, 375 bp, Zea mays
  Clone ID: MRT4577_182067C.1
gagggccaaaactataaatacttttattaggaaaaaaccatacaataaccctaccaggaggagcataatacggggtagcaaaaacctgaaccaattcagcccgcaaacgtaacatgggaacaggacaaaaggtttttttatggagggaaaataggaggggggttggatagggccccaagcacaagcgcctgggggtcggggaaaaacttggcccccgggagctttggcaccgggccctcctttgggacggggactgggtacctgagcaggggcccagggagggcggggtcaaggctgtccccagcgtaaagggcccaaaacctgggggccattggggttaccctccgaaacactccaggcttcccgggttgagga

SEQ ID NO: 89984 - DNA, 405 bp, Zea mays
  Clone ID: MRT4577_182068C.1
acgcacgcggccctcagacttgagctcggatttaggctcgtgttagcttatctataatctatagcactaggtggtgaaccgcgcatggttgggcaagatgcccacgaggtcaatggttatgcaggtctcgcttaccgtcatcatgcgtagcacgttcaggtccttccgggatgctcttgttgatctcgacaaggatttgcgcggggtaagcaaaaccgactagcaccagtcgagccctccccactccttctgcgagtcgcggcaacccacgagcgcgtctatccatcgactttctgttagaaaaagccactcgcggtttgtcgtgcacgccgcgtccaagttggaatggttcgtttcttggactcgcgacttcagcctttggttactcacttactctcctagata

SEQ ID NO: 89985 - DNA, 228 bp, Zea mays
  Clone ID: MRT4577_182069C.1
cattgtttttttttacgcacagggcaaaatgtgccatggatcatcaaaaaattctgagtaccagaattccaccatcataatgctgttgtggatcatgggaagcctgaccaatatatgaagcaaagaacacccacgctgaggggggtggtagatcgattagattgatttcatcactgcgggggatgcatgttttacatagcccccccagttaagttcctatcggaactg

SEQ ID NO: 89986 - DNA, 339 bp, Zea mays
  Clone ID: MRT4577_18206C.1
cggaacgcttggggtgacccacaaatttcctaccggttcctgcgggctaacaatggtgttccacatggagactaacaaaagctgggcgaaaacaggatcctagctgaatccggggagaaattggaaccggttcccaaaaccacaaaaaaagggggcccgaagaaaaaagggaaaacccaggggtgcccaaaaagtgaatcaactcacataaactgggtagcccctactgcccgcttaaaaaagtggaaaacctcgcgcgccaggtgaattaaaaaaccccccaaccgccggggagaggcttcttgccacctgggaccaagggaagtttttatttccccc

SEQ ID NO: 89987 - DNA, 329 bp, Zea mays
  Clone ID: MRT4577_182070C.1
gatgggccgccccagccaaactccccacctgacactgtgtgccgcccggatcggaccggcgaggccgcgccttggagccaacatgagggggggaccgagcctaaacgcccacacaatgccggcgaaccaagcacactgcacttaacaagctcaaaccacaagcgcacctacaaggtgacgacgacaaccaaaggtgaccaaaagacaccggagttaagagcgcggtcttggagcgaccgcgtccacatcggccgcagcccccttggcctacatggctgccccgagtgcgggggagattaaccgcgcgtatagagcaagccatggcgcaa

SEQ ID NO: 89988 - DNA, 331 bp, Zea mays
  Clone ID: MRT4577_182071C.1
cgtccacccgatcccctgacccgtcgccttgacccgtacgcgttctagatctacaagcgggaccggctccatctatcacaaactcacgctacacgtacgctgcgaatgcgatagctatatctatagcgatacgctacatctcaaattactggcactgcgccgtacaactacaacgactgtgacaaccataaccctaccgatatcaatcttaatggactagatgcacatttcgccatctgccgctatcgcaataacgcccacacccataatcattgccaacagtaacacattctcaatcgcgaatgggactcgcactctcgctgtacattaa

SEQ ID NO: 89989 - DNA, 488 bp, Zea mays
  Clone ID: MRT4577_182072C.1
caaaagaaaattttttaaccccctggtttccaaattggcaggccaaaacaaaaaatattttgggttttgctgtttatgaaaggcttttgaaacgaggagggaagctccctgctttccaaaaaaaaaaaaaaaaaaaaaaaaaaaaaaccggccccgggggtccccccggaaattccggcccggacccggggggggacccagttttccttatgggggggcgaataaaagctgggggaaaaaagggccaaagctgttccctggggaaaatggttacccgttaacaattccacaaaaaaaacgacccggaagcaaaaagggaaaagccggggggccctaagggggggcctaccccacattaatggggggggccccacggccccttttccagggggaaaacctgtcggcccagttgaataaaaaaaccgcccaccccccggggggggggggtttgcatattggcccccagggtgggttttttttttccccag

SEQ ID NO: 89990 - DNA, 276 bp, Zea mays
  unsure (1)..(276): unsure at all n locations
  Clone ID: MRT4577_182073C.1
ggtctggaantgacccganggtgaccgtccacggcagctgggtgtangccgtggtgccgctgatgaagctgctgtgcctggcggtgatcggcctgctcctcgccacccgcgggtcaggtcgtgcccagggccccttaagctctgagcagctcgtttcgcgctttctccctgcctatcttgtcactggagcggacataacagcgactggggatcgaaggtataactgctgggccctggctggctgtgccgcgcgacgcgaggaagacgtgaccggac

SEQ ID NO: 89991 - DNA, 438 bp, Zea mays
  unsure (1)..(438): unsure at all n locations
  Clone ID: MRT4577_182074C.1
gggggggggtagtaccgtggtcactagggcaggatcttaagagagggtactnacctnaaggggggccggttgtttaaggcgacgactcccnaannaagacgcgagataatatcatgaactgtgataccaatggttggcatccaacctggccnctctccactagtatttggccacccttcacccnactgtccacgcttggcttgctcaccaaccttcgtgacttgggtatcgtgttattggcttactttaccttggccccnctgtcttgcacctatccttcaaccacaccataccctttagccggggcgctgcactggcgtagcctaggcacagaccgcctgtgtgtctgtgcgtatccacaccaacaatacacctatacatacctccgttggcaccgatccatcccatgccctcagtattgaccgattggggacacgt

SEQ ID NO: 89992 - DNA, 377 bp, Zea mays
  Clone ID: MRT4577_182075C.1
agcagtggtaacaacgcagagtacgcgggattacaaacacgaccggttcttgtctggatattgcctgtaggtggccttgaacatctagcgcttgctttctggcctgcatgtagtcgcaaaactcccgatacacatgacgcattgacacacgtaatcctagtcttaaagggctagtttgaaagccacaaaatcgaaagggttagaggttagaatctccttattattgaaaatagattctggccctttaatctcattcggttttggggctcccaaacagcccaaagagtagaaaactcccgcgctttccctgaagtgacctaaaaaagtagtgaggccggttgtttttctttggagagctgacgtacgatggtgtttcc

SEQ ID NO: 89993 - DNA, 1041 bp, Zea mays
  Clone ID: MRT4577_182076C.1
tatgaattctggtttctgaattgtctgtgcctcctagtgcatgacacttgcaaagagatggacatcccccatctagagtctcattaatctgtccaaagtagaatgttaggactatcaaggtgtagcagcatgtagtaagattatttactaaccaagatatgcatattattaaagggtctgattgattcctgaagggagctttatacagactctacagtggttatatcatgctattccaattgaatttaccatgtagcatgtaactactgaacagtacacattagttgtagcacttgttacattcttttcttatgatgtttatgttcaagtcatatcaactggatggttctctgttagctacttcattatatcccatgatattgagtgccaaatggctattgcgcattcacttagttgtaccacttgtatgttgcttcattcaaaaacttgttattatgttgacttgtgaccgaactttgatttatgcactgaacacctaacctatatctagcttatgtacccttttttagatgtagttctaggcaatggatacttttcaaacttgactatggatgacaatagtcaaggggatgttcatgctaataagcaacacatgtcctgatattcagtctcagtcaatgcaagctggagcaacagcccccacgacgaggccaaatcataagagataaaaaaaaatcagtggtcaggatgatgaagtttaggtgttagcttggttatatattagtttagatcatgtggttggcaaatataaaaaagtaggaaggtattggtctcgtatctacgagtacttaaatgaacataaaccatgtcaatcacagcgtacctttaattctcttatgcaccgatgggagacaattcagaaatgtgttaacaagttttgtggttgtttatcaaggattgagttaagacgacagagtggtagtacaatgcaagacatggttgcacaggcatgttcgttgtgcaaaactctggacaggttgcaaaactctggacaggatgcaaaatcactatttgctgtca

SEQ ID NO: 89994 - DNA, 166 bp, Zea mays
  Clone ID: MRT4577_182077C.1
attcccggggggagccactcatccttaaattcttcaattcatattactcatctttactttcttagttcgcactttcacgcaccgagcctcttgcgacggaggtggatttcttttattaggctcatcaacgttttctacccattttccatggacctcttctacctct

SEQ ID NO: 89995 - DNA, 616 bp, Zea mays
  Clone ID: MRT4577_182078C.1
gacaagtaataatttgacagaacaattaatgagacaaataacaatttgacagagaacatgtgctaagacaagtagcaattggaaccaaactgatatacattcatactaacaattaccacacaaattactgagataagttcatactaataattaccacacagttactgacacctactttctctcgcccaccattacaggaaccgaagtcacaaatgcaaactggtagccgtgacagcaaatagtgattttgcatcctgtccagagttttgcaacctgtccagagttttgcacaacgaacatgcctgtgcaacctgtccagagttttgcatatgttaggaacaagtaaaaaatactacaaatatgatacttcataatgattagttattaccatgtcttgcattgtactaccactctgtcgtcttaactcaatccttgataaacaaccacaaaacttgttaacacatttctgaattgtctcccatcggtgcataagagaattaaaggtacgctgtgattgacatggtttatgttcatttaagtactcgtagatacgagaccaataccttcctacttttttatatttgccaaccacatgatctaaactaatatataaccg

SEQ ID NO: 89996 - DNA, 215 bp, Zea mays
  Clone ID: MRT4577_182079C.1
ggctcctctcctactcctaccactttcttgtcttcccatccccgccgagaactccgagggccggcttgtaccgaggccaagggtccctcgttccttctacaggcggcgcctacaccttaccgccctccttcaagttcaatgcctcgcggtcaccggccccgccgcgtcccgtccgcggtggcacgcgacactgaccgtcgaggcggggctgttcc

SEQ ID NO: 89997 - DNA, 521 bp, Zea mays
  Clone ID: MRT4577_18207C.1
acttcttctttttctgttttggtctcatttgttttatcctgctttttataaccatttactcctgtaatggcagtgtttttgaaaactttatcagatgaaacaaatccaattttggtacccacaaaactaactggctcatactacaggagggatgaaaactaaaattatcctgtctttttgtcagaccctatacttgctgggggaggtacaataaccaaagacaggtgagcctatcttgatgaacaagcccccaaggggaaaaccttggggggccggcagaccaccttcatttttgcattcacacgtcatacggttgctgtgtaaaacaaatatgtatcttgcagcttcataagtgtcttccatcagccaggggaagagaattctcatatcaccctcagctcatattcggcgggccatcctgatgtatctaacccaggggagtgccaagtaaccactctttttttttatctgcagataaccgaactgaatacctgctccggcggaaatatggtattttaaat

SEQ ID NO: 89998 - DNA, 360 bp, Zea mays
  Clone ID: MRT4577_182080C.1
ctcgaggccggccgggtaactaacactcaacctatttcaaggagatgttgtaccatacttttagaagatggcttacctgcactgaagctgtttagattctcttcttgagttattccaagatcatgataggatattcttctcctaagcctagcaggttcttgtatccagtactcgagttgctccaggattaggacattcttatgctatccctagcactcttgtatcaaataagctcatagatgcctgatcattgctggtatgattgttgtattaactattaagtaaacaaacatttaattgctccaaatgttgtatcaaataaaaaaaatatcatcgaaaaaaaaaaaaaaaaaagcggcc

SEQ ID NO: 89999 - DNA, 681 bp, Zea mays
  Clone ID: MRT4577_182081C.1
gattgggtacctcgaggccggccggggatcgtccgtccaatccatccattcatctacacacgcagttgcagcacatacagctagctcgttactgtttttgcagctgatctgatcgaccgatcatgagctaccaagcgggctacccaccgccgggccaacaggcctacggcgcgcctccgccggcgtacgtcgcgccaccgccggcgtacccgccgacggcccaggacggcggcgcggcgtactacggccagcagcagcagacaaccaccaccaccaccaccaccagccgcggcggcgacggtttctggaaaggatgctgcgccgccatctgctgctgctgcgtcctcgacatgtgcttctgaggacatatcgtcgatcgacgacggccagggcatgctagctagctgatgaccggccggtacgtgcgtgcgtggttgatgatcaccatcatgtgctgctctagtagctgctgtgtcattatatattacatcgtgtatacatatatacgtatacgtacgtactcgtacgtcttcgaattcattcctgtggttgttgtattatacatatgcagcacactttgtactcgtacccgtgtctgtgtcgtgtattcaattgtcgagacattcttttacgattctaatgtatgtagcattaatcatatgctatatatatattccgctc

SEQ ID NO: 90000 - DNA, 328 bp, Zea mays
  Clone ID: MRT4577_182082C.1
ataaaataaatggggttggttttatttttttgcttattacacaaaaaacaaaaaaccggaaaatccatggtatttcttattacaccttcacaccttacactgggtgaaccggtttatatatatattaaactccttactgaaaaccatcatgccaccttagggactatatatacacgcatgatggctgcccattcacccatctgagcaacccccctgacacccaattcttgacgcccgcgaccaacttgagcctccccatggacagcccaaccttcaccaatgggtaaatctagcggttctccagggacaggttcaacgcctccttttt

SEQ ID NO: 90001 - DNA, 896 bp, Zea mays
  Clone ID: MRT4577_182083C.1
gccggccggttttccacatcgcgtccgtccaatccatccattcatctacacacgcagttgcagcacatacagctagctagctcgttactgtttttgcagctgatctgatcgaccgacgcgacccaccgatcacgatcatgagctaccaagcgggctacccaccgccgggccaacaggcctacggcgcgcctccgccggcgtacgtcgcgccaccgccggcgtacccgccaacggcccaggacggcggcgcggcgtactacggccagcagcagacaaccaccaccagcagcagccgcggcggcgacggtttctggaaaggatggtgagggcttatataacttattaattgactccaaccacagaagctagatagatagagatgatgcgttctgatcacctgctgcatgcttggctttgctcatgcagctgcgccgccatctgctgctgctgcgtcctcgacatgtgcttctgaggacatatcgtcgatcgatcgacgacggccagggcatgctagctagctgatgaccggccggtacgtgcgtggttgatgatcaccatcatgtgctgctctagtagctgctgtgtcattatatattacacatcgtgtatacatatatacgtatacgtacgtactcgtacgtcttcgaattcattcctgtggttattgtattatacatatgcagcacactttgtactcgtacccgtgtctgtgtcgtgtattcaattgtcgagacattcttttacgattctaatgtatgtagtattaattacatgctatatatatattccgttccgtgatactatcaaaaaaaaaaaaaaaaaaggcccctatacttctccgggccggcaaaaaaaaaaaaagatgcgggcctcgaggctcagctttttgttccctt

SEQ ID NO: 90002 - DNA, 667 bp, Zea mays
  Clone ID: MRT4577_182084C.1
ggccgcttttttttttttttttttcttttttttttttttttttttttttttttttttttttttttttttttttttttttttttttttttttttttttttttttttttttgggttggaaaacccccacaggaaccaactttggaaaaaaaaggggtggcggggcttcaaaggggagaaaaaaaaggggacgccaaaaatgggggaaaatgggggcgggaaaccaaaaaacgtgagtaaactgggcaaacgggtgggggacgaggcccttaaaaaacgcgaccccctggggaaaaaggaccgcccaaggaaccaaaaagggggggaaccccgccaaagggtctttgggggcccacttttcaagcaacaggcccaggaaaagaacccccaccaaaaaccccgggggtcccaccccaaccccgccctttttgaaggggaaaagttccggacaaactagggggagaaagttgacccgctcgggggggaaaatcaccggggccccataaaactgggggggccaccccaaggaaaactgggctccctccaaaaggaaccgggggaccctcccttgggaggttctaagccccaggggacccttatttggaaaccagccttgcggtgggagggcagggcccaccactgaaaggccccccccaaaaggaaaaaccag

SEQ ID NO: 90003 - DNA, 476 bp, Zea mays
  Clone ID: MRT4577_182085C.1
gttttccatataaaagtactgcggtttctgctccctacactcccttatatggatgtatgatcgctagggcttctaactacgtacctaactctgaccctgtcgagctactgcaggatatattgtctccgctgactccgcttctctggtccgacagacataggtctctctgccgggcaataatcgtcgcccacatttcctgcatcccgcacgtctacgagcttttctcatgcgctcttgaaacaagcctgttgatgccagatctagttaacacacactctcctggcagatatgcggaatcagtttctcaccacgacctcgcggaagtccccgaaatgacgcttctgcgaatgctggcggacgtacaattcttcgatctgcctgagcgaccaccttgggagcaacgaccggatatgagctctccctcgtcggcgtggtcatctgctccgttccgccggacgtctcgatcggacaccccc

SEQ ID NO: 90004 - DNA, 551 bp, Zea mays
  Clone ID: MRT4577_182086C.1
cttgcacgttaagaatttcactacaagatacatagaacaaatactaacgacaaggttctgatggaactgggctatgggatgacacacaatcaagtataattacaaaattgctacaggccatccagggagaagggatttggtatatgagccggcctctatattctgcaaacatgaaagggccgtttaattgatcctcgggctttcattggaacctataactactgccataacagtggggctgggtacagattatactggttggaacaaataaaatgatccatacttattttacaattcgtacattttatattctccacaatccacaccttgtacatgtgtacacacagaaccgtccttcttcaccatagaaagccactaatggttattaaagcccaatatagacaagggaataggattatataaataccccctccttaatgataagcctacatgatggcttttccatgatgaagcttgagaatgttcttcatctattgctcaagaaccctccatgcatactgatagaactaataatccacctaatacacctg

SEQ ID NO: 90005 - DNA, 557 bp, Zea mays
  unsure (1)..(557): unsure at all n locations
  Clone ID: MRT4577_182087C.1
cggacgcgtgggttttttttttcgtcacctaatgcacttataacattgccaagagctagaaggcctttatttatgtgtatcccttctttaagcctatgtccatctggtacatccgacaagtcagccagcagtgactatgatatactatcatcaaagtttcacctacttgatctgggggggggggcaagggctggtggcgctgatccagcatggacgtaggcttaaagtaagggctccacgtcggccaaggccggcctgcgccgggccgggntgtacgggcggctgcgggcgaccaactacctgccgccggncgtcacgcggggcncggtcccgctgctngaggaccggaccctgctggcgctccacgctctcctcggcngccggcggtcgncnntcgcnccgcccctgcccntgcgccccgcccccgngatcangcactactggnccacgcacctccagaagcggctcgccccgatgggcatcncccccctcncgcacatagcccgcgccgcctccccgggggctcctctggcgccgggggcacctctggggcgcgc

SEQ ID NO: 90006 - DNA, 258 bp, Zea mays
  Clone ID: MRT4577_182088C.1
ggggtccaaacaaataaaatttcatttcattttttagaccaaaaggtttgatccaaagacaggggaacaacagttgtttcttgacacaaccccaggggtgggagttagatccccacccagaacaaaatttcccagcaactgtaagggtgaataaaaaataggcttcctcaaaaagtaggggagaaatacccaatgttgtcccccgggggcttcccatagggattgcccggtttgggcccaaaaccatttgggtaagcc

SEQ ID NO: 90007 - DNA, 535 bp, Zea mays
  Clone ID: MRT4577_182089C.1
gtgggtgtgtgtgttttttttgatggcaaaaaacatggcattaactatcacattccaaataggatagggacacctgaacaaagggacatacacaggccggcccattgcaccaggctacagactcggcactaacggatggtgaaatcaaccctctgattgaggggggggcactcaatgccggcaacaaatatctccatgggggacgcgtggccttttatggcaaaatatctactacttggtccaaaaacaggacgcctgtttcgatgccttcttggtcgaactgacaaggagcatttggggatctaaccaccccgagcgatatcatcgaccacacaaaagggaataagattcacggtcttaagggtcgcaccatgcaccatgaacccaataatgggagccacatggtggctcttggcgctgatacacctcaagatggacattgtcatcaaccatgtatctgaacgacattggcttgctcacgggggaactcctttccgaaacggtagggctgcacatccttcttaaagtacatggc

SEQ ID NO: 90008 - DNA, 545 bp, Zea mays
  Clone ID: MRT4577_18208C.1
cacacatgcagctgtcgggtgccggagccgactgcctctctcacgcaacaaagcgggtaaacggacaacaggtgatggccgctctccctcacctcagctccccgtaccgcaggcacggacggatgacggattggagacattcttcttttccctcccacccaacggggaggctcgtggatcggctggctggctgtacattgcgtgctgagcttggtgacaagctcgacacctccggcgtatgcttcgattcgatcacccccgcgcccgccatcccattgtttacgcaaagaagaggaaccgaggatcttttcatcagcgcttgtgaagccgctcttgtacacaggcttgcattcaatgcaagaagcttcccccttcttgtacacatctccgggttggatacctgacaccacctgtaagatatgtgatgatgcccaacaatcaactctgtcagaccactgcctagtcgagtagcaggactactttatgtacggagtgccgatatgctgggagtgaaattgccccgccgtctcagtgaactgttcatc

SEQ ID NO: 90009 - DNA, 333 bp, Zea mays
  unsure (1)..(333): unsure at all n locations
  Clone ID: MRT4577_182090C.1
cggacgcgngggagaagggccagacgccgacgcagaaaggagggcagcgccgcgaccaggacggcaacccgcaagacaagagcgcgacaggnaacaagaaccaccgcacccacaaggcccaagggacggcgccggagaccccggaggaacaaaacacccacaaaaagaaggccgaggcgaagagagaagcaccgggagaggaacaggaaggacaaggaccccaacaccagacccaggcgaggggagagcaggacccaccgccaagcccggaacgacaagcgcaccaagaagcaaccacccaccgggaaggacgagacaaccacggcgagcacg

SEQ ID NO: 90010 - DNA, 413 bp, Zea mays
  Clone ID: MRT4577_182091C.1
aagaacctgaaacttagaaatctcattgaatgacatatgttggccaacgctctcctcccaatatggtcccagtgtaccccaacattaaattttaaaaaaatattatgggtcacaaggagaccactgattgcgcatgttgcgctgagccgctggtctcacacagcctcaacgacaacgagggcgatggagatggggaagtggccgtctggagtggccgccggctcggggttgctgaagaagtctccattaattagaagggtcatgagttgatctatttactggcctgccgtcatgctcaaacttgattcagactgagctcgacagggcacacaagatcgcccttgcctcgaattcgggctggcttcctccaagctggcgacactgagtaagggatggaagggtcagaggggaca

SEQ ID NO: 90011 - DNA, 198 bp, Zea mays
  Clone ID: MRT4577_182092C.1
gggttatcaaaccaaaccatggatctgctttggttcacagccacaatattaggttctatcagtcgggaaacactacccatgctcgcaaaatatcattcgtgaattatcaaaatggcaccgctcttctgaccggagcgctacatctattgtccttctaagaaaggccatgcattttcaatgggccccgggtctgactca

SEQ ID NO: 90012 - DNA, 288 bp, Zea mays
  Clone ID: MRT4577_182093C.1
ctcgcggaccgtgggcctgctgcgagcctcaaatgaagttcttgcaaggacgcgtacctaatgtgggggttaccgtcactcatttctgatcgctactgttctgcgcctgcctgtctggggcagtcattggttctctgacgtgcttcttactatttctgtgatcctcttctattttttttttttcattatatagtttcgtttcttatatatgtttttttatttttttttttttttttatatctttatttttttttttatttttttattctttttttctattattttttt

SEQ ID NO: 90013 - DNA, 325 bp, Zea mays
  Clone ID: MRT4577_182094C.1
ggttgttttttatatattttacagtcgtaaaacgccaaattttggatagtggattgcctggatgctagggcatgctttacatatgtctatggctaaattatgtatccaatgggaatagtaaattatactttcacagcaaaggacaatgccagagggctagttagttgaccaagatttgttatgtatgcagctggcatatgtgatcgccttcaatcgttatttccaccagatccagtaatccggcttatgccatgtctattgatgctgattagttgatggagtggtaattcaatcagcaatggtttgctggaaaactactttcttg

SEQ ID NO: 90014 - DNA, 588 bp, Zea mays
  Clone ID: MRT4577_182095C.1
ttgttttatttgttttttttttttttttgttttgcctgcggaataaacaaaaggggtttggggtgaccactatgttatgtctgtccaagaacaaaattaccatttatacgggctgatctaagcgtgtacggcatatcaagcccgtgacctttggataggagaccttgggagctacgcaagctgctttactatgatgtgaaaggccaaaaactgggggactaaagaaaactgtggtattcagacttttaccatgtctaaacacccaattggattagcctttttatacgaaaagggacgaaatgcggcaatcataacccatattaatagcattggaatgctaggagcaatgcacgatgtggattgtatattatcgacgtgtctaaataactaccgagcatgatattcctgattttattacggctcctttatggatattgtcaccacttaacatctattgacagcctttatgtactgaatggtaccaaagctctacgttttgtagaggactccctatagaagaggagatagaaggtcccctaactatgtagctaaaatacttacttcccacactaattctgttgaagagat

SEQ ID NO: 90015 - DNA, 534 bp, Zea mays
  Clone ID: MRT4577_182096C.1
acatatcgactcttggatgggtggcttgactggattaagtgacaagagcatatctggcgttgtccaatggtggtttcacgtctttaagtgacagtagcagctctggtttgcctgagtttactcggtctggcgacaggagcatttcaagagtggtgggatggtgattattccttaaagtggtgggtcatatgatacgatagctaatgcggcacgcaacattcaaatggtggaggaccaggacgtctacggcatactgataagatcactttgagtacaagactcatttgccattaacgcaaagctcaacttattctgcatgggaccttaaccttagaaaacctgcagccctaacaaccctcctatacaacagtggaaacagctactatcggatgactgtaaaaagctgattctaagaatgctagattcctctccaactttattacggaactctggaaccatcatcaagataatccagacccacataagtgccacagctcatcatctgattaccatagacatcaacaccgcacgtgc

SEQ ID NO: 90016 - DNA, 612 bp, Zea mays
  Clone ID: MRT4577_182097C.1
ccggccacctctgttgctcctctgctgatgtataaatccttctgctgatttacgagtcttgttaatagcctgctgtcgcgaagtcttatatgcggtgatgcgagctcaatgtagtaaaatccctgcagaattacgcggaggagaacgccaagttcaacgctactaatgtgttctatgaagtgcttgaactggacctcaatgccaatctgttcaccgcatctccctcttcgatcaagagatgcgaacaactagacccgagttgtatcccatgatgatgctgtcgaactaacctgaagcttggatgatctggccaaggacgcacggatgacatactgctccccaagtcgcacgatcatctatcaacactgacttattgttatgtcaaacaagccccaggacttctgccacctccttccgacttaaatagattttagtcactatacctgctgcatcaggtgatatgaggttggcgtatcaaacaatctgatacattatcattccttgcataggtgatctatactatgaatgaatcaagacaagcgcgcctgctacctgcaggttatgttctcttttacgacggctacatgatcgccttgaagcaagcaggtgcac

SEQ ID NO: 90017 - DNA, 314 bp, Zea mays
  Clone ID: MRT4577_182098C.1
ggttatatgcacgcttttgggtaagatgcatccccggcaaatttaaatcctatgcaatcaggccattcgcgctacattattggacacaaaccggaacgggagccttacgtgatattgtgggtacccacggcgaaacaagatttttcccggggctacgttcgttattggccagggcaaacacggtttcataatctaacaggacagctaactgcactctcgccgatgctggaaacagagtgcgacattttcttactcccgggcatagggcacggacggattcaggggcctaattgcagggatcatctgggaacccg

SEQ ID NO: 90018 - DNA, 423 bp, Zea mays
  Clone ID: MRT4577_182099C.1
aaagaaaacctttttattactgatggaggcaaaaactggttgtgggtgtccgaccccacctgcgtttttataaactgcttctagctagataaggcttgctttttacttattaaaatactaggaaccttgttgatataatcgagggatataattcagatttgtcaagaaaccattgcagtgctcattgaccagttgactaagaaaggagatgctctaaacatgtactaaggcagatggacaactgtgtacatttttaggataagaaaatttttgcctataaatcttaaagagggtcctgatgagtcttttctggcttactgaggctctgatcggttcgtggaaattctatctactgcggggacggtggacacactcacacaaaggttttttgcttacaactcacggaacacgcttttacatcta

SEQ ID NO: 90019 - DNA, 625 bp, Zea mays
  Clone ID: MRT4577_18209C.1
cccacgcgtccgcccacgcgtccgcgacaccaccgtgtggtcgacaaaataaaaaggagagagagagagatggctctgtcgtctcgccgtatggccgccgcaccattcttcgtcgtcgtccttctcgtcctcgtggcggcagagaggacgatgggcagggtggtggtggaagagacgctctgcttgtcgcagagccatgccttcaaaggcgtgtgcctcagcaacaccaactgcgacaacgtatgcaagacggagaagttcacaggcggcgagtgcaagatggacggcgtcatgcgcaagtgctactgcaagaaggtctgctagggcatgaccggcagcaagccccagccgtacggctggttgatccggttgcacaccgtttgggcacgcggtcatgttccggcttctcggctttatttatttcttctttgttataataaatagactctgttagtcaggtgcgttttagtctgggtcgtacgttattaattctctagtgtattggtatttgcgcaacgcgcgctgtacttaacgtagccaggcatgtattcgcgttgcgtggtcgaaaggccaacgatttatcttgattgtacaaaaaaaattatatatatttgtgatggtggtt

SEQ ID NO: 90020 - DNA, 369 bp, Zea mays
  unsure (1)..(369): unsure at all n locations
  Clone ID: MRT4577_1820C.1
gtaactagcatacctcccagagtccgagtagacggactgtttggattcatactcctaatttttagttgctatgagcagcatanaggataccaagtagggcatgtttggatccatgttgctaatagctagcaacttaaaattagtggaccaagatccaaataggtgtgctagctaatggaaagaattagcgaagatcgatgttgctagcaagtgctaaaagagttatgaatagcacactaattttggcaggatccataaataccctagtacgacctattaactgctaattccttcaactttgtaactcatttaatacaggcaaagctcatccactttcacaacagccaaatatgcatttcttctttctaa

SEQ ID NO: 90021 - DNA, 287 bp, Zea mays
  Clone ID: MRT4577_182100C.1
aaccggaaaagaagaaccccccttacaaaaaaactttagcccccctaaaaaagccttctttggctagcatatctagaaaagaaaatttccttacaaaaatttccaacatgggtttcccccggaggtggaaccggcgccccagtttggcaatttttaaacccccaatttttcaagaggccccttctgaggctgaggagcttgaacaagcccttgggttctttttgggcctttaattacccagattacagggttctatttcccccccgacccggtaaaaaattcccaat

SEQ ID NO: 90022 - DNA, 417 bp, Zea mays
  unsure (1)..(417): unsure at all n locations
  Clone ID: MRT4577_182101C.1
cagctacgctaattttgcgatcgaggccgtcgcgtacactaatatgcaccgacatctattcccggctctggctcctgtgctgagagctagaacatactgccgtccaggactgagcgggcatgtcacatcagccatgcgctgctctggcagngtaccctactcctccgcctctggaggtggaggcggcatcggcacctgtgttcaagacttctgccgcgacgagagtgaccgagcctatccctggagccgatacttcacctgctgcgagcgcttcatccaaaatgctctcaagaacgatgtcgacagtgcccctatcgctaccaggatttcacgccaagcgtctcattgccaggaggtataccgatgcctatcgacgccgtgatgtctatctgcggcccttcagggacatacctgggc

SEQ ID NO: 90023 - DNA, 1199 bp, Zea mays
  unsure (1)..(1199): unsure at all n locations
  Clone ID: MRT4577_182102C.1
cgagctgaggagagatggaagcgcagaacggctacagcccgcttcttgccgtggacgaccacgaggcggcggcggcggcggcgatccatgccaccggcgccggtgatgaaggcgacgacgtcaagctcaggctactcggatacaagcagcagctcaagcgcgacctctcgttcaatggggtgggacagtgggcggtgaccaccatcgtggactactccctggcgcagctgatccaggtgatcatcctgctcgccaccggcggcaagaacggcggcggctacctggcgtccaagtacatggtgatcggcttccacgccgncatcctgctcatccacgccgtcatcaacagcctccccatcaccttcctctcctttttcggccagttcgccgcggcctggaacatgctatgtgtgtttgtcctgatggttgccgtgccgaccgttgccacctcgaggccggccgggatcgtgttcacgcaccaaacaaccgagtagcctatctccaacgccgcggcgtcctctgtcctgatgagccctgacgcggtcgagtgcagaccgaagagacgaagaacgcggacaagaacggccccatcggcatcatcagcgccatcggcatctccatcctcgtgggctggggctacatcctcggcgtcaccttcgcggtgaaggacataccctacctgctgagccccgacaacgacgccggcggctacgccatcgccgaggtgttctacctcgccttcaagagccgctacggcagcggcgccggcgggatcgtctgcctgggggtcgtcgccgtcgccgtctacttctgcggcatgagctccgtcaccagcaactctaggatggcctacgccttctccagggacggcgccatgcccttctcctccgtctggcacaaggtcaacaagcaggaggtgcccatcaacgccgtctggctctcggctctcgtcgcgctctgcatggcgctgccgtctctgggcagcctggtggcgttccaggccatggtttccatcgcgacgatcgggctgtacatctcgtacgcgctgccgatcctgttccgggtgacgctggcgcgcaagtacttcgtgccggggccattcaacctgggccgctacggggtcctgggcggctgagtcgccgtgctctgggtggccaccatcaccgtgctcttctcgctgccggacacgtacccgggca

SEQ ID NO: 90024 - DNA, 516 bp, Zea mays
  Clone ID: MRT4577_182103C.1
attcggctcgagctctagccgaattttctctagcgtaaatgtgttacgagaatttgatgttctcattccagaggaagctcgccaattgagaaggaaagctctctctcgtattgaatggctgcaaaaagctgatgtgcctaccatagcacagattgaagagttccattcgatgcagaggatgatgaatgctcctgattcaaatgataatattgatctactgttgagcattgatttgttgggtttacaaggagcaggtaaagcttttccaaacaagattgtttttgatgataagcttgtgttggctaacacacaagaattctttgatggaaattttccagtggattcttggttaccaatttttgtgaattgtctttatcctgtaagtcaattaccttcagaagctgtcgttgtaaatgttacatgtggtagtggacgtggtggtttacccaccactgcttggattagttctgcagttaacaatcgctcctcagacatcaacaaaaggattcgcacagc

SEQ ID NO: 90025 - DNA, 355 bp, Zea mays
  Clone ID: MRT4577_182104C.1
ctggatcgacgcatgcgtcaggtacgatatccgcatgaggccatgatggtttataaggcatggctggttacatgactgggcgggccttgccttgcggcggccaaccgttatcttccaactcacaacttctaccagccatggtggcagctatatgttcgcttggctcatcagctccatggcatgggatccgacttcctgcgcgtagtaggtccgctagcaggtcacgggggccgcccatgggagcgccccacacgccgtggagctctttggatggtaatacagacatacgtgcactggagttcatctcaacacctagctcgtatgttagccgagacctcgccttgagtccaatggc

SEQ ID NO: 90026 - DNA, 850 bp, Zea mays
  Clone ID: MRT4577_182105C.1
gagaagccatccggatcaagaagcgcgaggcagagcaggagaagccagcgaggagagatcgatggaagccaagaacggctacagctacagcccgctcgccggggacgaccacgaggcggcggcggcggcggcggaggtgatcagcaccaccggcgccggttttggaggcgacgacgtcaagctcaggctgctcggatacaagcagcagctcaagcgagacctctcggtggtggccaacttctcggtgagcttctccatcatctcggtgatcacgggcgtgacgacgctgtacgggacgggcctccagttcggcgggccggtgaccatggtgtacggctggcccatcgccggcgccttcaccgtcgccgtgggcctcgccatggccgagatctgctccgcctaccccacctccggcggcctctacttctggagcgccaggctctgcacccaccgccgatggggacccttcgccgcctggctcaccggctgggtgaactaaacaaggcgtttggttgtactgcaggtacaaccaaatcataatttgatttgacaattcgataccgatacaagtctcaagtctctctgtccaacttatattgtgtcaccaattagtaacggggagacggaagtggcgagtgtccggcacgcaattgcacttttgatacgcttactattagccgtgacttttgacaaaaaaatgctcctccggctccaggagaaaaagaggtgaccatctgtaggagttttatataatatctaggccttgtttagttcacctcaaagccgaaaactttttaagattttctgtcacatcgagtcttgcggtatatgtatggagcattaaatatat

SEQ ID NO: 90027 - DNA, 358 bp, Zea mays
  Clone ID: MRT4577_182106C.1
ccttatatttttattttattgttttttttttaggggggcatttttggggggataggggggaataaacctcattagaagcaaatcccacaacatgattttagcctaaccatatgatgttgctggaaatacgaagcaccatggggcaaaataccccattgactacaaaccaactgttggggaagcacccaattagtcgatgaaacaagaagacaactgtttacacatgctggctaggctggaaaaagctttcgggtctttgggttaaaggggaactgcagcatggcataccctaaggtgccattttggacagactttccttacaggatattacatcaaaaggaacaggatattgaaaaat

SEQ ID NO: 90028 - DNA, 1926 bp, Zea mays
  Clone ID: MRT4577_182107C.1
tgggtccctcgcgccggccgggattccatccctccttcaattagcagcggcaccgatataatttatcctcctcccctagcctcaagctcaccgccgtctcctaccgcagtccgcagcacacagcctccgccagtcaccgagctagctagacccacccgccgcgccatgacgtggaacaggtccgcggccgacggcggtggcagcagcgccgggacgaccgccggcgacgacaccggcctggcgcgactgcgggagctcgggtacaagcaggagctgaagcgcgacctctcggtgctgtccaacttcgccttctccttctccatcatctcggtgctgacggggatcacgacgctctacaacacggggctcaacttcggcgggcccgccaccatgaccttcggctggttcgtggccggcgccttcaccatggccgtcggcgcctccatggccgagatctgctcctccttccccacctccggcggcctctactactggagcgcgcgcctctccggcaagcgctgggcgcccttcgcctcctggatcaccggatggttcaatgttgtcggacagtgggcggtgaccaccagcgtggactactccctggcgcagctgatccaggtgatcatcctgctcgccaccggcggcaagaacggcggcggctacctggcgtccaagtacatggtgatcggcttccacgccgccatcctgctcagccacgccgtcatcaacagcctccccatcaccttcctctcctttttcggccagttcgccgcggcctggaacatgctaggtgtgtttgtcctgatggttgccgtgccgaccgttgccaccgagagggccagcgccgagttcgtgttcacccacttcaacaccgacaacggcgccggcatccgcagcaacttgtacatctttgtcctgggcctgctcatgagccagtacacgctcacaggatacgacgcctcggcgcatatgaccgaagagacgaagaacgcggacaagaacggccccatcggcatcatcagcgccatcggcatctccatcctcgtgggctggggctacatcctcggcgtcaccttcgcggtgaaggacataccctacctgctgagccccgacaacgacgccggcggctacgccatcgccgaggtgttctacctcgccttcaagagccgctacggcagcggcgccggcgggatcgtctgcctgggggtcgtcgccgtcgccgtctacttctgcggcatgagctccgtcaccagcaactccaggatggcctacgccttctccagggacggcgccatgcccttctcctccgtctggcacaaggtcaacaagcaggaggtgcccatcaacgccgtctggctctcggctctcgtcgcgctctgcatggcgctgccgtctctgggcagcctggtggcgttccaggccatggtttccatcgcgacgatcgggctgtacatctcgtacgcgctgccgatcctgttccgggtgacgctggcgcgcaagtacttcgtgccggggccattcaacctgggccgctacggcgtcctggtcggctgggtcgccgtgctctgggtggccaccatcaccgtgctcttctcgctgccggtcacgtacccggtcaccaaggacacgctcaactacacccccgtcgccgtcgcgcggcctcctcttcctcgtcctcgcgtcctggctgctcagcgccaggcactggttcaagggccctgtcaccaatctggacggatgaatatgtataattggacatgtatagtagagaggctggcagagacggaagagttgttgccaacgacatgttgtaactactttgttccaaaaaattaactagcaaggaaaccgacaggatgaattttctcgataaaaaaaaaaaggagggcccctattgcgagcaccatgttttgggtgactctaatt

SEQ ID NO: 90029 - DNA, 794 bp, Zea mays
  Clone ID: MRT4577_182108C.1
gtaccctcgggctcgagccggggcctggcagccgcggtccacaaagacattatctcgttgtctgccggtgtcagcttcctccagatcaagaagcggcaggtagagcagagaagccagctagctagcgagctgaggagagatggaagcgcagaacggctacagcccgcttcttgccggggacgaccacgaggcgtcggaggcggcgatccacgccaccggcgccggtgatgaaggcgacgacgtcaagctcaggctgctcggatacaagcagcagctcaagcgcgacctctcggtggtagccaacttctccgtgagcttctccatcgtgtcggtggtaacgggcgtgacgacgctgttcgggacgggcctccagttcggcgggccggcgacgatggtgtacggctggcccatcgccggcgccttcaccgcggccgtgggcctcgccatggccgagatctgctccgcctaccccacctccggcggcctctacttctggagcgccaggctctgcacccaccgccgctggggacccttcgccgcctggctcaccggctggttcaatgttgtcggacagtgggcggtgaccaccagcgtggactactccctggcgcagctgatccaggtcatcatcctgctcgccaccggcggcaagaacggcggcggctacctggcgtccaagtacatggtgatcggcttccacgccgccatcctgctcagccacgccgtcatcaacagcctccccatcaccttcctctcctttttcgggcagttcgcagcggcctggaacatggcta

SEQ ID NO: 90030 - DNA, 307 bp, Zea mays
  unsure (1)..(307): unsure at all n locations
  Clone ID: MRT4577_182109C.1
ttcttctccttctacttctccttcctcctctcctcaccggcagccttgatctaatctcttccatcctagcttgctcggcgctgccaggctctcctccgcctgcgacgactcgcatgggtcatggcgacgcagtctagtggggcgcccttgctgatgcctggcctggcggggctggtgtgctgctccttcgtggcgggggggggggggcaggagcgtgacatgnaagtggggggacntggcgaggcaaggggcttgacaacgggcggatgctgactctgtagctggacgcggacgtgcggtttctggg

SEQ ID NO: 90031 - DNA, 322 bp, Zea mays
  Clone ID: MRT4577_18210C.1
aatctactacaccgggatgcttttcatttctgtcttaacaaaaacaaaagacggattacttattcaaacgacgaacaacatcgtctcaacaccttcatgagctggaacaacatgcatcatgcgaccacacaatttcgccgacgaaggacaaagattaccaacctaatttactactcaaaccaagccccctcttaaataacatgcacccgctccccacctctcaaataattggtcattaactaatggacccttctgcagctatttctaaaatgacccccacatccacttaaccgagtgatgaaccccatattcaccctgccct

SEQ ID NO: 90032 - DNA, 157 bp, Zea mays
  Clone ID: MRT4577_182110C.1
gacacaggcagaaagtgcatggccctaactaatcgatgagtttgtggaactattgacagaagacggtcttgactagcatagaaggtgtaacagaattgagatgacagagggaaaatttaacaaccaaaaagccaacatcattgtataacttaatgga

SEQ ID NO: 90033 - DNA, 266 bp, Zea mays
  Clone ID: MRT4577_182111C.1
cccgggcgaccatgccgcgctaggtgggggagggacaggggcacaggggggcgacgggcgacgacgacgacgcaggcgccacacatgggatcccagctctccgccggcgggccccgggtccacgggctacgggggtacgccgggcccagggccgcggtggcagcgctgccgagcgagagggtgggcaggaagaggacgacgggggaggagatccgctgcagaaacagagggtccgacaccaagccgaacagggtgacgacgacgac

SEQ ID NO: 90034 - DNA, 260 bp, Zea mays
  Clone ID: MRT4577_182112C.1
tggatccccccgtctgcatgaattcggcacgagaaaaccatctgctggtacgtacaagacgtcattcaaggatgcttgattgcttgactagctggacactgaagcaaacgtgatgcaccattgatattaactcgtgaaaatttgagaccgccatctactactgcactggaattgactctcctactcaacgtgactctaccatgaacatgcttaccactaccttgcattataactctactgtcataataactggttccatc

SEQ ID NO: 90035 - DNA, 727 bp, Zea mays
  unsure (1)..(727): unsure at all n locations
  Clone ID: MRT4577_182113C.1
ggccgggnaaaaaaaccaaaaaaaaaaaaaaaaaaaaaaaaaaaaaaaaaaaaaaaaaaaaaaaaaaaaaaaaaaaaaaaaaaaaaaaaaaaaaaaaaaaaaaggtgggcctttcgggcggccaaagaaggggcccctttatttccagggaccaggggaggtcgcacaccaacgcaccgcccttccttttcctcctcctcctccttttcctggaaaggcaaagggacggttttgggaaccatggaaggaaccttactccagccagtggccctggaaacaccattggggggccgaatgaaaacccattgtgggaggccccatggcaccagaaggcctgcctttatgtgggaagggccactaacccgccctgtaaaaatgtcagcattggggggtcaaaaataagggcatagtttctgggccacaccgacggggtccaattccaggtcggaagtggcattttacaggtaatgggaacaaacaaaacaatctcgttttgtcactcggccaatgttggaaaggttcacggaaaaagctataaaggccatcatgcttgcccaaaagaaaccaaggcccctggcccacaactttgtggaaactgaccaaatccttttgggtctgatgggaaagggcactggtattgcagctaaggggctcaagcccatggaaataaatcttaaggatgcacgtgtggaggtggaaaaaattattggccgcggaaatggttttg

SEQ ID NO: 90036 - DNA, 237 bp, Zea mays
  unsure (1)..(237): unsure at all n locations
  Clone ID: MRT4577_182114C.1
atatgcttaatgattaatactttgagttgaagttataggatgggttggggattataagggaagggaggtgcagatatatgtgataaaggtatattattctcttctagatgaaatatttgtgtttaacaaagtcatatgatatgttaaaaaaaaaaaaaacgaaaaaaaaaaaaaaaaaaaaaaaaaaaaaannnnaacaacacaaaaaaaaaaaaaaaaaaattgggtgggttgata

SEQ ID NO: 90037 - DNA, 420 bp, Zea mays
  Clone ID: MRT4577_182115C.1
acgctgccagtacggtccagaattaccgggtcgacccacgccgtccgaccaacgacgatccgaccacacgaccttctcgcgactactgcctagcacaaccctgtacaacgcaatataccctgctaccatcggtcctgacgaaacaggaaaaccaccagtcacagacgcgctagcacgagaagatggagaactcagcggaccgatcgcagttgacgcctacgaagatcaaggtgttctaccagacgttcggcgtgtagaacaaggacatccacgagttcagccacaactgcaccagcaccctcgaccgcaggaactcctccgacgacgtcatgctccactacgagctgctcaaggacgacgtcagccacatagtctccggcaaggtgatcttcagcaccaactgcaactgatccagctaca

SEQ ID NO: 90038 - DNA, 422 bp, Zea mays
  unsure (1)..(422): unsure at all n locations
  Clone ID: MRT4577_182116C.1
ccaggctctcctccaacagggaggccggggggccatggaggggcgagggctacagtgtctgggttaatcagaggctccacagagcggctggccgtttggggggccagtgaagttaagagccagcccacctactggggacgggggcctggggcccaagtcgagtctcttggggaggacgtgcagggtgcctgcccggaggagggtggggcccctgagacagcttgcctgcctgcagatgcggctggggcggggcaacagggaaggcctgcggaggccaggctgtcggcctaccggcctnccaggagctgctcagatcccatcgtcatccgggcacgtggggacttttaactctggtgacagtttcagctacctttgggtcagggactgaaactggagagggtgggggggtgggttcttttatg

SEQ ID NO: 90039 - DNA, 1699 bp, Zea mays
  Clone ID: MRT4577_182117C.1
ggttgacatcaaaccattcgcagcagtcttaatgaagttattgcatagtgcagttctggaggaaaggagttctgccgctaaaaaggccttcgcgtcctcttgtgctactgttttgaaatacgctagtcctccccaggctcagaagcttatcgaagatactacgtctctgcattcaggtgggaaaaacgatcagttgtctggtgcaattcttattaaagcctacttgagcaatgcatcggatattcttggtggatataatgcggtggttatccctgtaatttttgtgtcgagatttgatgatgataaagacaccagtgctttatatgaagaactttgggaggatattcctagtagtgaaagagtaaccctaacactatatttaccagaaattgtatctcttttatgtgatggcatgtcattgtcatcatgggctggtaaaagaaagtcagccaaggctataaagaagctatgtgatgttctaggagaacccctttcagcacactaccagaatattctcaaatcacttctgaaagaattgccaggtcgattttgggagggaaaagatgctattctggatgcattggcttcattgtgtgcttgctgtcatgttgctataactgcagaagactcctgcttgccaagtgttatactaaattgtgtttgtgctgcatgcagtaggaaatcaaaattgtaccgtgaagcagctttcttgtgtttacacaaagtgattacggcattcagagatccaggatttttcaatagtgtgtttccaatgctgttcgaggtttctaaccaatctgccatctcgaagacaaagggctctgctgaactagatgaaagtgaaggtgcttctgtttctctggataaagtgctcaattgtgcaacatcttgcatcagtgttgcttttccacaggatattatcaaccaaaagaagaatgttgtagaattaatattgaattctctcttgcctgaggagagttggcaagttaaactatcatccttcttgtgtatcaaggagttgtgcctcaaatttgacaattctggtgatagtaacacatggcctcaagacacagcttacttggttgaggagctatttcatttggtatcaccgaaattagtagactccataagattagtaaagattgctcaggttcacgttgctgcatcggagtgccttcttgatttgagcaaactgtacagagacttcccgctgtcgaacagaacagaggccaagttcgaggatgaactcacagagctctgcgagtctgaaaaaagcgaacaagcaaaggcgattctgaaggaatgcctggccattcttaaagctctccctggagtaaccatgacgacggattagaaaccagaagagggaacacgcaaagttctcatggtgattgtaaactcgttccgatacatagtaaagttctcttggtgattcgaaactcattcggatgtatgcatgtggtacagaatacggcatagttctccctccgttttgtgtcatatggcaggggagataggcgcatgcttccattagttttgctaatttactgcctagatccttatccttaaccgtgatattctgatacatgtgcatgtaagaaacacgagattgtccggcagcaagaaactgttgcagcagcatttgttgtttagatcgaaaaccgagatattctgataaataaataaaaaacaaaaataa

SEQ ID NO: 90040 - DNA, 150 bp, Zea mays
  Clone ID: MRT4577_182118C.1
agactgcaatcatcgtcattacttaaaatacgatcggagccatgtaggaaaagactacggggatgcacatgttccaggtgcaccaggcggatgcgtagctgctgttcttggttgtgttggctccgttacccgggtcacccaggggacctc

SEQ ID NO: 90041 - DNA, 275 bp, Zea mays
  Clone ID: MRT4577_182119C.1
gggggaaaccccaaagggaaaaaacgggggaaaagattccactattttttaataaaaggaccctaacttgggcaaatttttttattattaacacaaatccccaaagatccccgacaggttttccaccccctttaattttaaaaaaacaaaatggaaaccgaatccaacggggacttcgatctttgtaaaaaaaaaagaaaaactggagggcaaaaaatgttagtttaccatccaagactggaaaacccttggaaacaaccctgggaaccctggaa

SEQ ID NO: 90042 - DNA, 1171 bp, Zea mays
  Clone ID: MRT4577_18211C.1
gactccttagggcgattgggttcctcgaggccggccgcggggcacccggacccgtggctgacgacaccaccgtgtggtcgacaaaataaaaaggagagagagagatggccctgtcgtctcgccgtatggccgccgcaccattcttcgtcgtcgtccttctcgtcctcgtggcggcagagaggacgatgggcagggtggtggtggaagagacgctctgcctgtcgcagagccatgccttcaaaggcgtgtgcctcagcaacaccaactgcgacaacgtatgcaagacggagaagttcacaggcggcgagtgcaagatggacggcgtcatgcgcaagtgctactgcaagaaggtctgctagggcatgaccggcagcaagccccaaccgtacggctggttgatccggttgcacactgcacagctcgtttgggcacgcggtcatgttccggcttctcggctttattttatttcttctttgttataataaatagactctgttagtcacgtgcgttttagtctgggttgtacgttattaattctctagtgtattgtatttgcgcaacgccctgtacttaacgtagccatgtattcgcgttgcgtggtggagaggccaacgatttaccttgattgtacaaaaaaattatatatatttgtgatggttatctttgaaaaaaaaaaaaaaaaaaaaaaaaaaaaaaaaaaaaaaaaaaaaaaaaaaaaaaaaaaaaaaaaaaaaaaaaaaaaaaaaaaaaaaaaaaaaaaaaaaaaaaaaaaaaaaaaaaacaaaaaaaaaaaaaaaaagggggggccccccccccccccctttttttcccccctaaggggggaaaaatgggcccgggggaaaaaaaggaaaaaaaattttcccgggggaaaaatttttccccccccaaatccccaaaaaaaaaaggcccgggaaaaaaaaaggaaaacccgggggggcccaaagggggggaaaacccccttaaataggggggggccaccgccccctttttaaaaagaaaaaaattccgggcccccgtttaaaaaaaacccccccccccccgggaaaaaggggtttgggaaatggggccctcccccccccccccccccaaaaaccccggggccggggattttgggggggggggggggttttcctccccccaaaggggggaa

SEQ ID NO: 90043 - DNA, 375 bp, Zea mays
  Clone ID: MRT4577_182120C.1
agcggctgggcctcgccaaggcgatcggagtgagcaacttcaccaccagtcacctcgacggggtcactggccgtaaccacggtccctcctgatgagaaccaagtagagcttaacccgcaatggcatcatacggacagcatcaggaccgtactgcacacgacagggagcatacacatcaatggctactcgcccgttcgagggcacaactgtaactgccatgttatcaccgagctggactccgaggtgctcgccgagatagccaaggccagtgggaaaaccgttcagcaagtggcgttgcgatggatacatgagcagggagtgacatgcatcgtcaagagttacagcaaggagaggctgatgcaacaccttgggata

SEQ ID NO: 90044 - DNA, 583 bp, Zea mays
  unsure (1)..(583): unsure at all n locations
  Clone ID: MRT4577_182121C.1
cctcgaggccggccgggacatccgtccccaagcgtatagcccgtatacgctcaggtatccctcctcactcngatccgcccgacgacgcgacgaactcgcttgccagaggtgatctaggggtagatacagagattgcctgtatagattaaccatacaagctggtgatgatgccccgacgagcgatgaaaccaactcgggaactgaaacacactagtctgccgacagtggtactcctgctacattctcagtcctgctcctgctcccgtgcttactattgccctacatcggcaagccgggcattcttcccgctgcccactctcacagcgctgctccgcaactgtctacctcctcacagcctgtgaccagctgtggaggttcttgctcatcaaaatgtatgccgacgctaacatatcttacaacgcatatcgtcatacacgccatgcagaaggatctccatgtactccctgatagctgcaccgtgagttctaatttgtacgaagacatgcaacgttgtagcttgcaagaacgacgtcttatgatttgaaatatactgacagtacttgcaaatcgctccagcgcaagg

SEQ ID NO: 90045 - DNA, 355 bp, Zea mays
  Clone ID: MRT4577_182122C.1
aataaacttatgtactagatgtattataatatgttcggttttagatatatatatatttttaaattatattattgtggaccaattaatatatggtacagtatactcaattggtttaaccaaaaaacaagaaacggacatacatgagcaaaaaactgacgccaaacatgctgtgagagaaataaactgaaaaactctgataaaatcgctctcacagacacacgaaacaatacctatgtatggcaggcaactggggctaaattatgaaagtgcaaccacaaacacggggttgagtgataaaaaaaaaaaaaaaggacggcgaacgatgtgatcaaaaggtggagggagactacttgca

SEQ ID NO: 90046 - DNA, 164 bp, Zea mays
  Clone ID: MRT4577_182123C.1
gaacatataatttcgctgcatgtgtagaatacaaaagtctcagaacaggggtaattgtattttcgacgccaccataaacaagccattgaaagatggtgcaggcgtatatttcaattacaaccaccgaggctctaccgcgggcttttggatcctataaaactttt

SEQ ID NO: 90047 - DNA, 205 bp, Zea mays
  Clone ID: MRT4577_182124C.1
aatacttaaatcccctttgtgattgacaaggcctgattttttttttataacatgccattgggacaacgtagggggggcaacatattcacggtgaatattggcggggcgtatacacccttttatgactgggatgcaagagcccacccaccttcttgtagacattgactctggaagcggggagctaacttttttatggggggggcac

SEQ ID NO: 90048 - DNA, 302 bp, Zea mays
  Clone ID: MRT4577_182125C.1
aattaacaattcttttgaatcccaattttgaatgtaatctcaaatgcaaatttaaactcctttgaattaagcatattggtcatcccaaattatgaggggtttatttaattatcaaattattttatttgggatattacttccttttttcctctaaaccccttctcggtattattttatttttggccatattattaggggtttaaaggcccaaacaaagatccaatttgatgcaaagggttattttagggggtattaatttttcaatctcccttttgagggggttttttcacatgggatattaa

SEQ ID NO: 90049 - DNA, 278 bp, Zea mays
  Clone ID: MRT4577_182126C.1
gtttcctgttgtatctcctgtctactgtgcgcgccatgttcaaaatctttacgctgatcgtccacgtatatagctgcaactggggtctttaaagaatgaggggcacaaagtggtttcagatgagactcacacacctttttacaagaatagatgtctaaggcaaaactggtaagtgcgaaagcgattcatattctgacgcatggcttaaatgtttccacaactagtgttttagctggaaatatagcattgccctagagtagcaaaaaactaggacatat

SEQ ID NO: 90050 - DNA, 417 bp, Zea mays
  Clone ID: MRT4577_182127C.1
aggaggccaatcctttattgttatttaggtcccctggcaggaaataaaaagggaccccggggaaaaccctttgggcaaagaatccctccccggggccttggcctctttggtgttttggggaaaaaccttgaagtcccccccccaaaatttttttgaaagggcccttcccccccccacaaaggtgtggggtttttaaaaagccccccaggattcccccccctaaaggtttttaccaaaaaaggggggttttgagggccccccccttttttttgttttaggcccccccccccccttttttttttaaaaaaggccaacgggggggcccccccttttttttaaaaaaaccccccgggcccccccgggggggggggggcttttttaaaaagagggcccccccccggggggggtttttttttt

SEQ ID NO: 90051 - DNA, 228 bp, Zea mays
  Clone ID: MRT4577_182128C.1
ccatttttttcttataccgttgaaagatcaagaaactaagtgcgtgtaagatttataagttatatatttgatatagaattttgttggacaaaatgaattggcatggaggaactagcatatccaatcttctgtcactgagattttagacaatcttgttaatcttacatatgggatgcttacaacatgtttaattgacactgtattcttataaaaaaaaaaaaaaaaaaa

SEQ ID NO: 90052 - DNA, 503 bp, Zea mays
  Clone ID: MRT4577_182129C.1
ggaagtagaggtagttttaccatgtatgctatatgatacacacgggagttcgcgacagagcatagatctatcatacacggtcccacactatgataagcaagaagacacactccgaaggtggggacagctgatagcttgattaattcttgacgtggagaggcaaacacacctgaaggcttgcatggtatgaaccatagatcagctactagtggaataatcctccggaaggattctggctccagaatgccatgttgtacccgtaccccagtagggaataccgaacaaccttttagagaaaccgacccggtccttggcggctttggggcccatggaggagcgggactcgacgcactctaaaccaccgcagatgatgttcctggtcaggccgtatccgggggagcctccccgcatcgcggtaggtggccgagggactccattcgccggacattacggtgtggcacgagggcttgggctactggggcgtaatcaagaaccatgtggcc

SEQ ID NO: 90053 - DNA, 680 bp, Zea mays
  Clone ID: MRT4577_18212C.1
ctcgaggccggccgggccgggatcgcgggctcagatagcaccgcacagctgaggtgcagtttctactagcagcaatatcatggattctgaggtagtgcatgtggtagagtcgtcgtttgtagtgccgagcgagccgacaccgtcggaggggctctcgctctctccgctggacctcgttctgcccagcagaggccacaccccaacagtctacctgtacagccccagcgatgttgccgccgccgatggtttcttcgacgtggccaggctcaaggaggctatggccaagaccttggtggccttctaccccctcgctggccgcctcggcgtcaacaacgatggcagggtagagatcacctgcaccggcgagggcgcactctttgtggtcgctcatgctgacctcagtgttggtgacatcgaggacgacttcaggccgtcgccggagctgaggaggctgtttgttccatgcattgagccagcatccatcatattggccatacaggtgactttcctcaagttcggaggtgtggtgctagggacggctctccaccatgccgacagcgatgcctcaagcgcgttccacttcttccagacgtggacagccttgtgcaagtatggcgaccgcgcgaccgtggagctcccgtgccacgaccgcacactccttggtggacggtccccgccta

SEQ ID NO: 90054 - DNA, 372 bp, Zea mays
  Clone ID: MRT4577_182130C.1
attcggctcgaggttgcaatgtttcagaacctgtgtcttcacccggcgtggaagattatatccgctgggggtggtctgacaaagtacggcagcttttaaaggcactacgccataaaccggcacaagatgactgtactgaccccatcttatcatgctgggagctatccaccagaggatgatagggtcgaccttggacagctttgttacaactgaaggcggccctaccagtttgggcagatcaaagagctggagcaagagatggacaaagatggcaaagggaagactggatgctaagagaggctcgaagcccggaccggtgcacaggaaactggacatgcgagtggtgggagagggaaaccgactatatgagcg

SEQ ID NO: 90055 - DNA, 710 bp, Zea mays
  unsure (1)..(710): unsure at all n locations
  Clone ID: MRT4577_182131C.1
gcggccgtccggaattcggcacccgggaacgaacgacgcagcccaacccgttcccaccaaaccagcggcaccacccatggcttcggcggcggcgagatccggtctccggtcgctggcggcgcgcgccgccccgttgaggcgccgcatgtcctcctccgtccacgacgacgcctatgagacggccaagtgggagaagatcacctacgccgggatcgtgacctgcaccctcctggcggcgtacaacctgtccaagggccacccccacttcgatgagccgccggcgtacccatatctgcacatccgcaacaaggagttcccatggggccctgatggcttgtttgagacgaaggaccaccactgagccctgattagcacacattcaggagctggtgcatgcttaaaagagttatatggttgtttcagttattttcctttccccttgagacctatttgctgcaacaagaaataagaatgaccaaactcttgtattgacagtgaggttttaactgtgttagctgttaccggcttgtctatttttctttgccgtccacgtcatatatggtcacctgtaagttggtcttgcccggtgtcaggaaacggcatcacaattatcaaaaactgttatcatattctgatggcttaagattgcaccctgaaaacaagaagaaaananaaaaaaaaaaaaaaaaaaaaaaactcgggggggggcc

SEQ ID NO: 90056 - DNA, 699 bp, Zea mays
  Clone ID: MRT4577_182132C.1
cattgggtacctcgaggccggccgggagccacgctccccggaacgaacgacgcagcccaacccgttcccaccaaaccagcggcaccacccatggcttcggcggcggcgagatccggtctccggtcgctggcggcgcgcgccgccccgttgaggcgccgcatgtcctcctccgtccacgacgacgcctatgagacggccaagtgggagaagatcacctacgccgggatcgtgacctgcaccctcctggcggcgtacaacctgtccaagggccacccccacttcgatgagccgccggcgtacccatatctgcacatccgcaacaaggagttcccatggggccctgatggcttgtttgagacgaaggaccaccactgagccctgattagcacacattcaggagctggtgcatgcttaaaagagttatatggttgtttcagttattttcctttccccttgagacctatttgctgcaacaagaaataagaatgaccaaactcttgtattgacagtgaggttttaactgtgctagctgttaccggcttgtctatttttctttgccgtccacgtcatatatggtcacctgtaagttggtcttgcccggtgtcaggaaacggcatcacaattatcaaaaactgttatcatattctgatggcttaaaaaaaaaaaaaaaaaaaggaaaaaaaaaaaaaaaaagcggcc

SEQ ID NO: 90057 - DNA, 826 bp, Zea mays
  Clone ID: MRT4577_182133C.1
gtaagcatgccggcccggccgggagccacgctccccgtaacgaacgacgcagcccaacccgttcccaccaaaccagcggcaccacccatggcttcggcggcggcgagatccggtctccggtcgctggcggtgcgcgccgcccctttgaggcgccgcatgtcctcctccgtccacgacgacgcctatgagacggccaagtgggagaagatcacctacgccgggatcgtgacctgcaccctcctggcggcgtacaacctgtccaagggccacccccacttcgatgagccgccggcatacccctatctgcacatccgcaacaaggagttcccatggggccctgatggcttgtttgagaagaaggaccaccactgagccctgattagcacaccttcaggagctggtggatgcttaaaagagttatatggttgtttcagtgattttccttttcccttgagacctatttgctgcaacaagaaataagaatgaccaaactcttgtattgacagtgaggttttgactgtgttagctgtcttattttctttgccgtccacgtcatatatggtcacctgtaagttggtcttgcccggtgtcaggaaacggcatcacaattatcaaaagctgttgtcataaaaaaaaaaaaaaaaaaaggcccctactcttgtgaaaggtggtgttgcccggtgtcaggaaacggcatcacaattatcaaaagctgttattgtattctgatggcttaagattaaaaaaaaaaaaaaaaaaaaaaaaaaaaaaataaaaaaaaaaaaaaaaaaaaaaaaaaaaaaataaaaaaaaataaatatttctt

SEQ ID NO: 90058 - DNA, 700 bp, Zea mays
  Clone ID: MRT4577_182134C.1
ccattgggtacctcgaggccggcccggccgggacgctccccggaacgaacgacgcagcccaacccgttcccaccaaaccagcggcaccacccatggcttcggcggcggcgagatccggtctccggtcgctggcggtgcgcgccggcccgttgaggcgccgcatgtcctcctccgtccacgacgacgcctatgagacggccaagtgggagaagatcacctacgccgggatcgtgacctgcaccctcctggcggcgtacaacctgtccaagggccacccccacttcgatgagccgccggcgtacccctatctgcacatccgcaacaaggagttcccatggggccctgatggcttgtttgagacgaaggaccaccactgagccctgattagcacacattcaggagctggtgcatgcttaaaagagttatatggttgtttcagtgattttccttttcccttgagacctatttgctgcaacaagaaataagaatgaccaaactcttgtattgacagtgaggttttaactgtgttagctgttaccgtcttgtcttcttttctttgccgtccacgtcaaatatggtcacctgtaagttgatcttgcccggtgtcaggaaacggcatcacaattatcaaaagctgttatcatattctgatggcaaaaaaaaaaaaaaaaaaaaaaaaaaaaaaagcacccaagcggcc

SEQ ID NO: 90059 - DNA, 441 bp, Zea mays
  unsure (1)..(441): unsure at all n locations
  Clone ID: MRT4577_182135C.1
cgtccgcccaggcctccnntcccttttaacgaacngtacatcttagtggttgaggggaagaatagaagcatggtttacattaaccaaaagttttccaacattacattanttccaacattaaatacggatgtatcataaacataaagcaagaggatgttgaatgggctgccaatctggcacatgcccatgacttcatcacattactccccaatggatataacacacttgttgatgatgatctgctcactgggggacaaaagcatagaattgccattgctcgagccattcttatagaccctacaattctcatccttgatgaatcaaccagtgcattgtatgcataaagtgaacacaatgttaaggctgtgcttcgttctgtcaaaagtgatttgtcatctataacaaccgtcatagtaattgctcatcgactttctacaattc

SEQ ID NO: 90060 - DNA, 1007 bp, Zea mays
  Clone ID: MRT4577_182136C.1
ctcctcttcgccgtcggccccctgcagcttcccaagcgccccctctctcccatggctgagcagcagccgagctcgccctagcctccatttttccagccggtgcttccccctgcgagcagttttctccgtcgtcttcaacctccagcagccatggcactcggcgcccttgctgcaggcgagcagcaggctccctgctccacgcgcccccccagccatggcgtcctgcttcctcccatggcgcaggagatgccccagcgagctcccttcccttccccatggctcgagctcgagtttcctcatggcgctgcctccctatccatggcgacgcagcagctcactcccatggacgcccagaaaaatcccccatgccgacgccccttcttttcccttactcgttctccctcgcgcaacagcagccgggtgttcttcctccccctgctgtccacggcgtgcagcaaacagggagctgagctccatctccccctcatggcgcggcacagcagcagctcgccccgcctctcctcacaggcgcagccctctcccatggcgcgctgcagtagatgccgtggagcattccctccatgccttgcgactcggtttccttcctgcgtgtgtgctgctgcgcctgcgctgttgatgcttgctaggcgctcgacaaaatgcgcagcagccccaacgtctccgcgcggctcgctgctttgtgctgcgcagtgaacagcacgccgtcgacgctcgtcgggtgtttgctgtttttgcgcagtgaacagcacgccgtcgacgctcgtcgagtgtttgttgtttttgcgcagccccatccgcgacgtctttcacccccggtgagacaacgacgctccttgtttgattccacatcggcgttattttcatatgattaattgtgtatgtgtgctgtgttatttttgttttgtggaggagaggcaccccgtgttttgagtggagaagaaggcaagccgctcgacgctcgtcgatgttcgtagcgatgcacaaat

SEQ ID NO: 90061 - DNA, 704 bp, Zea mays
  Clone ID: MRT4577_182137C.1
cattgggaccctcgaggccggccggggagccacgctccccgtaacgaacgacgcagcccaacccgttcccaccaaaccagcggcaccacccatggcttcggcggcggcgagatccggtctccggtcgctggcggtgcgcgccgccccgttgaggcgccgcatgtcctcctccgtccacgacgacgcctatgagacggccaagtgggagaagatcacctacgccgggatcgtgacctgcaccctcctggcggcgtacaacctgtccaagggccacccccacttcgatgagccgccggcgtacccatatctgcacatccgcaacaaggagttcccatggggccctgatggcttgtttgagacgaaggaccaccactgagccctgattagcacaccttcaggagctggtgcatgcttaaaagagttatatggttgtttcagtgattttgcttttcccttgagacctatttgctgcaacaagaaataagaatgaccaaactcttgtattgacagtgaagttttaactgtgttagctgttaccggcttgtctatttttctttgccgtccacgccatatatggtcacctgtaagttggtcttgcccggtgtcaggaaacggcatcacaattatcaaaagctgttattgtaaaaaaaaaaaaaaaaaaaaaaaaaaaaaagaaaccaaagcaaaaaaaaaaaaaagcggcc

SEQ ID NO: 90062 - DNA, 411 bp, Zea mays
  Clone ID: MRT4577_182138C.1
ccggccggaaaatccatcaaagttgacggatgaatggaattccatgaaactctcttgggtcgccatctggaggatgcacactggcaatgcgctcaacggccccttctccatccacctcaccatagagtccggcaaaaacgtcatcgccaaagactccatcccgctataactgcagacccgatgccgtctacacttacaacgtccaattctactacactttgaattcccttatattcatccctgacaacggcctatggaccttcaccaacaagctaattaagatgccagcatgcaccgctaaccttatatactactgacacttccaaaatctactatatgtaatccttctgatcggcatcatgatcgaattccaaagagcgcaagactaaaaaaaaaataaataaagcggcc

SEQ ID NO: 90063 - DNA, 537 bp, Zea mays
  unsure (1)..(537): unsure at all n locations
  Clone ID: MRT4577_182139C.1
ccggccggcgtcaggattattagattgtcnnannaaaaaattttacaaaaaaaaaaaaaaaaaaaaaaaaaaaaaaaaaaaaaaaaaaaaaaaaaaaaaaaaaaaaaaaaaaaaaaaaaaaaaaaaaaaaaaaaaaaaaaaaaaaaaaaatccaaaaaaaaaaaaaaaaagggcccttggggggggggcggttttaaaattttggatcccccgggtttgcggaatttgaatttaaagtttttaattcccgccacccctagggggggggccggggccccattccccctttagggggctttattaccggccccccctgggggcttttttaaaaagggggggttgggaaaacccctgggttacccaatttaattcccttggtagaattccccctttccccacttgggaataaaactaaaaagccccttacctttctcttttctcaaacatttgccatctctggtgtgccatatggttttgtacagctttattttttggttaaatccccggtaaatttttgtttaaccccctttttttttt

SEQ ID NO: 90064 - DNA, 296 bp, Zea mays
  Clone ID: MRT4577_18213C.1
cttaaaaactgattggcgttaacagagacatgcggtgcttgcactagaggagggtgttgatgcataccttgttggcctgcatgaggacaccaacctgtgcgccatgcatgctaatcgtgtgaccatcatgcctaatgacattcacctggaaaggaggatccgacgtgagagggcctaatatccacctcaaacatagggacaaatacatgaagatctggggttattgataatacggggccattgtaaggtcatatgagtagggtacggttggagcatcgcaagattcatgctatgat

SEQ ID NO: 90065 - DNA, 484 bp, Zea mays
  Clone ID: MRT4577_182140C.1
aacaatagacgatgatatcatgtgaaaaatgcgccaagaactatgcaaaaaaaaaaaaaaaaaaaaaaaaaaaaaaaaaaaaaaaaaaaaaaaaaaaaaaaaaaaaaaaaaaaaaaaaaaaaaaaaaaaaaaaaaaaaaaaaaaccggccccgggggtcaaaccgggaaaattcgggaacgggacccgggagaggggaacaagcttttcctaaaagggagtccgattaaaagctgggggaaaaaagggaaaaagcggttcccggggaaaaatggtaatccgttaaaaattcaaaaaaaaaaaaaaccggaaagaaaaaagggaaaacccgggggggccaaaggagggaccaaactaaaataaatggggtgggcctaactgcccgttttcaagtgggaaaacctgtggggcaagttgaataaagaaatcgccaaacccccgggaaaaggcggtttgctaatgggccccaagggggggtttttttt

SEQ ID NO: 90066 - DNA, 283 bp, Zea mays
  unsure (1)..(283): unsure at all n locations
  Clone ID: MRT4577_182141C.1
cccaggcgcccncggccgcggcgcgcgcncttcactccttaagtcagccgccgcctattgctcgggctcccgggcttcgcttttccgaccagccgaggccgacgcccttgctccaccgaaccaggcatcctgccgagccacgcgacgccgagcaccctgctctcgcgccctgtgcgcaagccgcgcgcactgccctgcacctgcgtctgcacgagctgcgtcgcccattcgcaccgagcgcgctgagtcgatgcgcgcagccgcgccttgctcatacgtgcac

SEQ ID NO: 90067 - DNA, 746 bp, Zea mays
  Clone ID: MRT4577_182142C.1
cttgccctgtccgccgctacctctccttcgtcatgtacgagttgatagcctagcggcggagtaccgctcccgtcctcccatcgacccatagtgcgtcgatatatagcgtcgtactgctgcgctgccagattgatatgtggatgctcataggtccgtggtctcatacatattgtgtcatggattgtgaatccagctatcgaacaggtagtcctgcagtcagcgcattctcactccaatgagatgtcgaagagacctgcacagaacagtcttgcggttgatcttgatgaaaggcgcccatggtagagaattctaggttaggcccccgtgcgcatgcctaccatggagctccacatcgccaacaggatacctccctgtggcgaatgtacctactcctgagatcgctttgagatgaggagtcgcaaaaggatgatcgatctcgtcaatacaccagaatttgtcaagcagatcacctcaatcaccattgaaccatatgcctagggtgaggagaatatcagctgacgcttaatatagtaatcttatcatttcgaaaggcttctaatgaacaggatattttcgattcctagtgagaacttgtgaaacagaagaatccaagtatttcgtatcagagctgaaaagtcttatgcgaggattcgcgggtatggatgtatcctgattcaaatgatctctcctaatgtgtgaatgaaaacggttaatgaatgccccagtatgcgttgattttcgtgacg

SEQ ID NO: 90068 - DNA, 1196 bp, Zea mays
  Clone ID: MRT4577_182143C.1
tccgcccacgcgtccgcccacgcgtccggtcaacggtctcgagctacgcttctgccagcagtgcagcaggttccacaacctggccgaatttgaccagcaaaagaaaagctgtcgcaagcgtctagcaggccacaacgaacgccggagacggccacctcctggaccccttgcgtcacgatatggccgtctcgctgcaccgctcggtgaagagcccggcggcaggttcagaagcttcatgctggatttctcatacccaagggttccaagcgccatgagggatgggtttccagcggttcgacctggtggtgaaagggtgcctggcagcaatatccagtggcaagcagcgagcctagatcctcctccccctcaccatcagagcgcggcagcaggatacggtgcccactcgtacgggagcccgggtagctcgtcgtcgtcgaggccaccggtgttccctgctggcccggagctccccccaggcggtggatgtctcgcaggagtccccacggactctagctgtgctctctctcttctgtcaactcagccatgggacgctgctggccacagcgccggccacggccacggccacgccgcgtcactgcccgcaacagcaggcttcgacggcaaccccgtggccatggcgagtagctacatcgcgccgccaagcccctggaccgactcccgggcccacgaaggcgggcggcggaacgtgcctcaactgccacccgacgtccccctcggcgacgtgcactctggcccaggcacccatcacggccagttctcaggtgagctcgagcttgccctgcagggaaacaggccagccccggcgccgcgcaatggccagggctccgcgggcgcgttcgaccaggccggcagcacgacggagtggtcgctctaggaggccaaataaaagcgcggcacatcgtcgtagccgcacagcgagatggagcttgaagcctggctccgctagctacctgcatgcgctgtttgcttgcctagaggctagagcatccagtatgataataagcgaggaactagtgcagtgccggccaggagactgatttcttttgcgcttgtccatgaactcgtctgttgcgtctatgtacacctccatggtttgaactcgtcggggacttcgctcgatgtgttattaatctcatgctcatccttccgctaaaaaaaaaaaaaaaaaaccgatt

SEQ ID NO: 90069 - DNA, 331 bp, Zea mays
  Clone ID: MRT4577_182144C.1
tcatccttgcatctaacttacactttatttcatgctaaaatatttatatgccttgagaggctttataactcaaaccacctatcccaatgattaataaacaaaaaagttacaagcctaaggcacttacattaatgcataaaggttttttatatgaatgatagatcaaaattaatatttaatgatagcttaatatactatcaaaataaattataataaacacatttcaatcaatgaatttaatttcaaaatataaaaacttccataaaataaatctaaaataaaattaatatatgtctcgctacacaccaaacttatattaatctatcatctt

SEQ ID NO: 90070 - DNA, 1008 bp, Zea mays
  Clone ID: MRT4577_182145C.1
cccacgcgtccgcccacgcgtccggaggagctgttgatcgaggtgagtgaggttgaaaagcaggcggcgaacaaaggcaccatcgtcatggacggcggatactacggcggccgcgatcagcgctacagcggcgggtactacggcggcggtggcatcgcgacgccggggtacgctccggcggtcccgtacgggatgtcgcaggtgaacatcgagggcaacgggtgcgggcgggcgctgccgccgcagccgaccgtgaaggtgtactgccgcgccaaccccaactacgccatgagcgtccgcgacgggaaggtggtgctggcgccggcgaaccccaaggacgagtaccagcactggatcaaggacatgcggtggagcacgagcatcaaggacgaggaaggttacccggcgttcgcgctggtgaacaaggcgaccggggaggccatcaagcactcgctggggcagtcccacccggtgcgcctggtgccctacaacccggacttcctggacgagtcggtgctgtggacggagagccgcgacgtcggcaacggcttccgctgcgtccgcatggtcaacaacatctacctcaacttcgatgccctccacggcgacaagtggcacggcggcgtccgtgacggcaccaacgtcgtgctctggaagtggtgcgagggcgacaaccagcgctggaagatccagccctactactgaagtactgaaccaacggatgatatgaccatcgcgcccatcgatcgtgcacatgcatgcatacgtactagcagaataacaggggtcttatctcccgaggcgtcttttgcatgcatgccagcagttgcatagataaacaggagcgagacaaagggtgttcatgtatacgttattgcagctgtatgtatgtgccttgtaataatacatataataaagttgctcggggtgtattaattagaacatacatatatctattatactccctccattctaaaaaaaaaaaaaaagggcggccggacgcgtggg

SEQ ID NO: 90071 - DNA, 613 bp, Zea mays
  Clone ID: MRT4577_182146C.1
gggaccgccccactggacgatatcctatatactatactctaggctgcagagtcaccaacgtcgatgccaggcaagatcctgagcgtggtcgttgctctcacttgtttgcgcaagcagcaccggtgccgaccctatcgcagggtgcttgtcgacaaccctaccattggagtaccatgaacccatgcaatcagccctgtatgatgtatacaggcgcttgccagcttgatgacgtatgcgaacctgatactgaaccaactgatggccttaccggttaagacgatgccagcggtgatgccacaagtgatgacagccaacatcatgtcaccattgatgatgccctgcatcatcagaccaatgctgttgccacgcatgatggctcaaatcatgatcccacaatgcaactgcaacgccgtcaccaaataaatgctgcgacaccagtgaccattcatgagcaacccaatggccatgaccatcacacccatgttgcttacagaaaccctttgctagcgctcggtgctaaatacgaacaatggagcggagccgcataatgagatgacatgccatgagctgcgacagattgttaacagcccttcaagcgcacttgtcattatgt

SEQ ID NO: 90072 - DNA, 573 bp, Zea mays
  Clone ID: MRT4577_182147C.1
atgcgttcggaagggacctgaggttcaatgttgtgattatttggcatcccaatgaaggcaaagttgataagcagcagattctctcagatcgctgtttctgcattaagtaatttatctgtatgcttgtgagatttggcaccgttcttctgtgcctccagttttttgtatactgtgtcaatctcagactgcatgcaaaaagactctggattagaaatactcaaaagcaacaagaaaggccaagaaatcagtgactgaagcggatcaagagtcttaaatgccttcctcacctagtaatagttcagcatattctttcttcttttcttcgtttttgcagtcaccaaatccctttcaatgtcaaaaggtacagggtccaacactatgcctttgatgtattcaaaacctcatagctgatttgtggcatgcaacgagggttaccatatatagaattatagatccaaaatacagtgaaagtttgaaacacaaggagtctacaaaactaagcttattccctctttgtgtttcttatacaaaacaaaaaacacattcaataatacattatgatactttaagttg

SEQ ID NO: 90073 - DNA, 1031 bp, Zea mays
  unsure (1)..(1031): unsure at all n locations
  Clone ID: MRT4577_182148C.1
ggtagccatgcctcgggcgccaaccggccgtcagcctcatctctctgctcgcctgtctccttgcctccctgtgctcaccacgccggacgccgctcccaaccctccacacttccctcnccaggccgcggcggacttcgctccagctnagcctcgccatcgactgagtccccacgtncctgcgcggcgacgtgctcgcncagaccctgccaaggagtggtgcgaactcaacctttttctagccncgnaccgtntnaaagagtgatcattnagaggtnctcgcgctcatcgcatgatcatgctgggcgacactgaacaggaagagcaggctgagcagaaggcaggtcgccatgcgggtgcagtcgtggcgatcaagggccatgtacaaccagtcggtcgtgaacaccctgaagaacaagctgatgcaagtggtggcgcagaacaccaacctcgcgagacaaggcatgggcgacagcgaggatgtagcctccagccaaagccccgacgccggaggagacgccctgggtggtctcaggggcacggctaccgtcgggctgggggcctgcaggtgttgcggcaggaaggaggcgtcggtgctggtgatggcgtgccgccacctctgcctgtgcgccgactgcgacaaggtctccgacgtgtgccccgtctgccggttccccaagagcggcagcgtggagatcaacatgtcctgacaaggacctatgctatgcaaggacgtcgtgtcgaccaaaatcatcatcggcggggcagggcgggggtatacacagtgactagtagatggtgtacatgtcagcatacttttccttgacttgggatttcttcttcagatggtaaaggaggagatcaatatgtcctgacaaggacctatgctatcgatcgaaattggcggggcggaggtatacacagtaactagtactagatggtgtacatgtcagcgtgcttttccttgagttggcatttcttcagatggtaaaggagacgatcaggtttgcgtattgcaaatctgtttttttccc

SEQ ID NO: 90074 - DNA, 887 bp, Zea mays
  Clone ID: MRT4577_182149C.1
cccacgcgtccgtataaatagtattctatgccaacttctggagtcgtccaagcaccttactacatattatctgaactttgaaatgcatagcttagaagttattattattttttatccttttttccagacgactcgagcgacacgagaagttctgtagctgaattactaagtatttaagtaacctaccataacatggagttactgaattgcttagtcagtaactagcatttgtagctcttgttttttaatacagcaatctcaaatacaatttcctttgtagaaatattttagttgagcaatctgctggaaatttaatattttcgattcatccaggatgaagctgttcaaaaggtggtagagtttatggatacatactctttaagccaggaagacttcgatacaattgttgaagtatccaaatttaagggtcatccaagtcctatggatgggattcaacctgctgttaaaagtgccttgacaaaggcatacaaacaaggaagtagttcccgtgttgttcgagcagcagatctaataaacattccaggcatgaaaaagcctttaaagaaacgagtggcggcgatcttggagccggtagaagagagcctacctgaagaaaatggactagcatcagctgaagatgatgaagatggttcttctgatgctgaaaataatggtgcatgttctcctttcccacgtaacaaacataaaaaatctggtagatgcctgtttgtttggctaatgtgtcaggcattaggataaaatggatctgttttgaggcaactttgtggtgccacactgactgacttcatttaacgcaattgtgaaagtacccatttttatggagatttgtagcatcattcaggcaaatgcaaatcgagatcatatag

SEQ ID NO: 90075 - DNA, 273 bp, Zea mays
  Clone ID: MRT4577_18214C.1
ttggtgggctttcacgcatggggggggtgtgctaacatagacaggctctgcacccacttggctctttctagacccagaaatcgactggctggccggatccaaaaaaacatgggctgtatgtgctgatccgcatttcatggtaactccagtagcttttcctccacgtaaggatacctccaggccaacgggcggtgcgtataggatgtacacggatatccgcgcccagagcttaaatggaatcgcccaaaaaggtctctcctggtggagagaggt

SEQ ID NO: 90076 - DNA, 425 bp, Zea mays
  Clone ID: MRT4577_182150C.1
ccctcactccccgttccactgctcctacactttcgaccagatgacgagaggcttgggggccgatcccatatcatagtgcctggcgctaggagcagcggcggtggtgctgctcgtagcagcggcgctgccttaccaggcatctggagtcgacgtgacgaccgtactctcggtgtatcccaacttcgcggactttgcgcgtatgatggcatacacccacgtggtcagcgagctgtcctggagatcgtgaatgacgctactgtccgtgccgaatgccaacctgccgtagtcaccctaggctttcatagctagcgccagcgccgacattgccgacgtgctgaagtatcacgttctgctggagtacctctacgcctgcgacctggaccgcctctatccctccgggaagctcgtgacgactctgtttcaaa

SEQ ID NO: 90077 - DNA, 303 bp, Zea mays
  Clone ID: MRT4577_182151C.1
atccaacattcacgaggaagaacacgcaggaaatcactggcaaccccagggctctccgtaggctgaggaccgtgtgtgcgaggacgactaggactctgtctttcactgtccataccacaaccgagatcgactcgttgattgaggccatcgacttatactccaccatgacccgcgccagggatgccgatctcaacatagacctgatcagcaagcccatgctccctgttatgaaacgactgtgagatgccaacatagccacgagcactgtacatgtggttagacctggagggcgctgcactacta

SEQ ID NO: 90078 - DNA, 336 bp, Zea mays
  Clone ID: MRT4577_182152C.1
gcgtgcgttctttctctctctctcttccggcgactggtcagtgagctaccgcctccgccctacgccaggtgctgaggtcttgatgatgtgctctatctcccacaagggaagctgtccatgatggtatacaaccgccacatgcgtggccggggatcatcctcatcgtcttctcgccgcaccaagcaagaagcctcgtgtgatgattaccttggtacatcacttccaaggcaagatgaaggctcagtatacgaacttaaaggttcaagaattcagcttgcaatgtgggacctttgttcagtgtgatgataaaagatgcactaggttgtatacttctaa

SEQ ID NO: 90079 - DNA, 614 bp, Zea mays
  Clone ID: MRT4577_182153C.1
gtcgacccagcgtccttcccgcgtccgctcaaatttcgtacagtggtgtgatcttgatattcacaacaacagcctcaacgggagcttgccagcagcactgtccaatctcagtttgctctatcttgatgtctcaatgaatgatttcagtggtgccatcccctgtggtatgtgcaatctatctaacatcacgtttgtggatttctctggtaaaaatactggcatgcatagcttcgcagattgtgcagcatcaggcatttgtgctgctgatattaccagtaccaatcatgtggaggttcatacacctcatggaatggtaataacaatgaccatttgtgccgccattctcattgtggttcttcttgtggtttttgtgaaatggatggtgttgagaaacagttccttacctcttgtatccggccttgaatccaaggccacaattgagccagcctccagtaaagagttgctaggaaaaaaatcaagggaacctctaagcatcaatctttctacatttgagcatgcactgctgagggttaccatggatgatatcctgaaagctaccaataatttcagcgaggtgcacatcataggacatggtggttttgggactgtctatg

SEQ ID NO: 90080 - DNA, 764 bp, Zea mays
  unsure (1)..(764): unsure at all n locations
  Clone ID: MRT4577_182154C.1
gggagggttttagggtcttcgtctcccgctcccccggttccattcgcacccaacgcagctacagacggtctccatggcgaagaaaggggcgaagagaaagcagcagttgccgccggctcccacggcgaagaacgggagcaaggctgtgctcccactgaaggccgcgaagagagcgcccaagaagcagaaggttctggagtcctccgacgattctgatacggagcagcagcagcagcttcaggaggaggactccgacctcgacgtttcctctgattccgacgccgaggagctctctgggtcggacgctgaggctgacgagctctcgggctcggacgccgatgctgacggaggctcgacccgcggcgacgacatggatgatgacgacgacgacgaagatggtgaaagcgatgatgactctcttgcggacgacttcctcgctggtagcgacgaaggaagcgagggtggtgactctggtctggagtcagatgggtctgatgaccttgaggcaaagtcacgagcaattgacgagcagaaactcaaggcggaagaagatgcagaggaggaacttcaaaccaacataagatcagaatctgatgaattcagattacccacaacagaggagctggaggaagaggcacacagaccgnctaacctaccaaatctcaaaaggaggatatccgaaattgtacgagtgctctcaaacttcagcaaactgcggcagaaagatgttccgcgaaaagattatattcatcaactggaaactg

SEQ ID NO: 90081 - DNA, 168 bp, Zea mays
  Clone ID: MRT4577_182155C.1
tatgccagtaagtaaggggagagctcggattgtattgatctagaagtatgctgacagtgcctacgaaggcctatggtgtagacttaaagagtgcgatgctaagagaaacttatagggtctgatgtcaaaagacaacaatatgatatcgagctcagaaggaattgctga

SEQ ID NO: 90082 - DNA, 1293 bp, Zea mays
  Clone ID: MRT4577_182156C.1
gccggacggttcgggatcgctcgcttcccctccaccccactctgcccaccgagcgccagtggagcgcttacttgacttgacctcgccgcctcctgccctccccctcccctccccctgccggcgcccgttctttcctttcctcgctggacgcccaccgccggagcggaagaggggggaatgcagccgccgcagcaatacccaccgtggatgaggcgtccatggaacgcagcaagagcttcatcaaggccctgcaggagctcaagaacctgcgcccgcagctctacaccgcctccgagtactgcgagaagtcctacctccacagcgagcagaagcagaaggtgctggacaacctgaaagactatgccttacgagctgtcgtcaacgcggttgatcatctgggtactgttgcatacaaactgaccgatcttttcgagcagcaagcttccgaggtgtcaacatatgaactgaaagtcgcacgcctgaaccagcaaatcttcacatgccaggtctacacagacaaagaaggcctcaggcagcagcagatgatgggagcaaacatcaagcaccacaagcactacatcctaccccccactggttataaaagatccctggcaaatggacacctgcaagcggacactgatcaggaatccaagcctagaccttacccctccgcaaaaaccctttcctggcatctgtcttcggagaacagcaccaaagcaaacgcacataagcctacatttgccctagtggacacggcaccatcaaaaccttcatcaggtaaggagcggtttgcttctcctatgcgcaggccgctgcagttcaacaggagccccagttctgatactacgcagaaggttggcgctaagaacatatctggtgtaaaggaactttcaacattccattccttcgacacccccaaaggtggtgcgatccaaaaggcccctgttggccctaaaagcatgctgggggctcttttcatcagacacaaatcgtccaaggcgaaaaggatcccagttccctgccaaccgggggccgggtggggggcggccccacccctgtaaatttcattctgtggaggcccggaaccctgttaattgtacatctggcctatcgttatgtgttggggcaccccccccccccctatttcatttcagaatatgacatcttgcaggtgcccgaaatgtaatgatttcgcataatctcatcttggcattcagcataaataaatgcctcttggaaataaaaaaaaaaaaaaaaaaaaaaaaaaaaaaaaaaaaaaaaaaaaaacccccc

SEQ ID NO: 90083 - DNA, 1640 bp, Zea mays
  Clone ID: MRT4577_182157C.1
gccggccgggctgcggaatgattcccctgccaaatcgaaaaaatctccctgctaggctaggcaccaagccaagcaaatccactcgagaccagaccggcgacggcggccccgcgtccgtcgccatcaaagccaccgctgcggtcgctcctccgggacccctcctcctccgcggaccaccgccagcgctcgacagcaacacgcgcacgcccacgcgcgaagagtcaacaggagagagactggcggtggtggaactggcagtagaataagcttgcgtcgagtgggagttggcgaggcatcgctcgcttcccctccaccccactctgcccaccgagcgccagtggagcgcttacttgacttgacctcgccgcctcctgccctccccctcccctccccctgccggcgcccgttctttcctcccctcgccggacgcccaccgccggagcggaagaggggggaatgcagccgccgcagcaatacccgccggcgcccggctcctggggcggggtcgcgggggccagggccggcgccaccaccgtggatgaggcgtccatggaacgcagcaagagcttcatcaaggccctgcaggagctcaagaacctgcgcccgcagctctacaccgcctccgagtactgcgagaagtcctacctccacagcgagcagaagcagaaggtgctggacaacctgaaagactatgccttacgagccgtcgtcaacgcggttgatcatctgggtactgttgcatacaaactgaccgatcttttcgagcagcaagcttccgaggtgtcaacatatgaactgaaagtcgcacgcctgaaccagcaaatcttcacatgccaggtctacacagacaaagaaggcctcaggcagcagcagatgatgggagcaaacatcaagcaccacaagcactacatcttaccccccactggttataaaagatccctggcaaatggacacctgcaagcggacactgatcaggaatccaagcctagaccttacccctccgcaaaaaccctttcctggcatctgtcttcggagaacagcaccaaagcaaacgcacataagcctacatttgccctagtggacacggcaccatcaaaaccttcatcaggtaaggagcggtctgcttctcctatgcgcaggccgctgcagttcaacaggagcaccagttctgatactacgcagaaggttggcgctaagaacatatctggtgtaaaggaactttcaacattccattccttcgacaaccccaaaggtcgtgcgatccaaaaggcccctgttggcactaaaagcatgctggcggctctcttcatcagacacaaatcgtccaaggcgaaaaggatcgcagttcgctgacgagcgggggggtgggtggccgacagcactgtaaatttcattctgtggaggaccggaagcctgttaattgtacatctggcctatcgttatgtgttggggcagagtctgtagccgtatttcatttcagaatatgacatcttgcaggtgaccgaaatgtaatgatttcgcataagctcatcttcgtcgtgtaattctgccttggcattcggcataaataaatgcatcttagaaatagcctttcagagtaaaaaaaaaaaaaaaaacggacgcgaaggccggcgcccgct

SEQ ID NO: 90084 - DNA, 390 bp, Zea mays
  Clone ID: MRT4577_182158C.1
ggttcattcatgaaaggggcccgggtcggctggctggcccccccaagccccaaaaataaattgcggggttccaagaggcccaggggcaatagcttcagcatcacccgacccccccccccttttaaccccccagggataaaaataagggggaaaggtgcaggggcaactaaaaattgctcaattcaacatctaaaccgcttttagtatgacatgccccccctggactggaataagcccacccttaaaaacggctcagggctcttttatttttttcaaaaccctcaaatttggcggggccacaggtgttccaaaaaaagcaatcttgggaattttggaaactcacttccactttgggggcccccaaaaaatataggcagactgggaacattt

SEQ ID NO: 90085 - DNA, 422 bp, Zea mays
  Clone ID: MRT4577_182159C.1
cctaattgagcttgagcctaacaacagtgggaactacatactcctgtcgaatatttttgcagaacaggaaaggtggggtgatgtgagcaaacttccaaaggctatgagagaaaggggactgagaaatgtgccaggggcgagttccattgaagttgatggcatggttcatgagttcacttccagggattggtctcatcctttcatacatacaatatgtgaagtgttatgtgagatcgacactaacatgaaatctgttggttttgcttctgttttccctgaagtactacatgttattgaagaaggctaacatcactaagcaagcgcattattcacatcattgacagatctgcgcatgagatatctgattatttatatgacatccatgcttaaaataaaaataatactaagtgtaactgaattca

SEQ ID NO: 90086 - DNA, 350 bp, Zea mays
  Clone ID: MRT4577_18215C.1
ccttcttgttgaggggagtatgcatcgtgctagcaagggggccacagatgatatccttcatctggtcctcctcactgcagatatgatatgaatggaaacagatgctagagacaaactacacgagcgccaacggtgcacactagacgtggacaaccacagggtcaacatgctatcaaaaaagccactgtgcggcgactgggagcgatgactaatatgcaccattgaccggcttaactcatacacaatgcagatgaggcaacagattgccagcgcaaaggtgaatgtacgccaataagtaggtggcaagactgctgtccctacagaacacaagtatcggatggtaaaaggct

SEQ ID NO: 90087 - DNA, 412 bp, Zea mays
  Clone ID: MRT4577_182160C.1
ggaagcacacacagcccggaccccgaggggggggccgcgcgacgaaccaagaagcacaccgacggcaagacccccactggaaagacgcacacccacgaggcggaggccaccagacaccagggacaacggcaaggccaaaaaccaggacaaggagggcacccccccagaccagcagcgacacagccggcgggggcaagcacctacgaggacggacgcacacccgccgaccacaacatgcagaaggagagcaccctacaccgcgagacacgcccgagggaaagcaggcagatcgtcgtcaagacccgcaccggaaagaccatcaccacagaggacggagactacgacaccaaggcaaacgataaggccacgacccaagacaaggagggcatcgcctacggaccagtaacggctg

SEQ ID NO: 90088 - DNA, 368 bp, Zea mays
  Clone ID: MRT4577_182161C.1
ggcagccaaaatggggactatttcctcccttttcaccacgccacaataaaggccctaacaaataagcctttggtggcgaaccctaacaaataaacaattgcccgatacaattggcggccaaaactgggacgggtacctcccccttttccccaggcctaaattttttcactaacaaaataagccttcgttggcgaagggtaacaaataaacaaaagcccgatacagtggcggccaaaactgggacgattccctcccttttaataaaaactacgtcgaacacaaacatagttttttgaattcggaaagggccataaagatggaagccgcttttaattcctccgggtaaaactacggccggcgccttcttt

SEQ ID NO: 90089 - DNA, 207 bp, Zea mays
  Clone ID: MRT4577_182162C.1
tcgcgctcctcgacccccgcccaacactaccagacgtcacgccgtcgtcgccgcgagtgcttcattcaccatgatcatctccaagaagaaccgccgcgagatctgcaagtacatcttccatgagggggttctatatgccaagaaggactacaacctcgccaagcaccccaagcttgacgttgcccacctggaggtgattaaactcat

SEQ ID NO: 90090 - DNA, 477 bp, Zea mays
  Clone ID: MRT4577_182163C.1
ccccgccccgccaccgatccccaccgccgaacaaccgacgggtgctgctgctcctgctcctgccgccacctgctacgtagcatacgcggacggacgtaccaccaaacccccaccgaactagctgccggtccatcgcgctacgccgctacctacgacgatcgggcaagcgaagcgcgcgagttcgacgtcgtcgtcctctggcatcatctctatccgccgtcctgtggtatcgtcagcagcaccggtgtcgtcgtcgtcgatcgtttccggttgtgaggagaggcggcgatgaagaggaccacgagcaggagcggcgcgtcgcccgccgccggcctgtggctccggccgggccggctcggtgaggttctcgccgtcgcgactctgctggcttcggcgttgatgccgtcggcggcggctgcgaccgacgcgccgccgccggcgtcgtcgccgcggcacgactacgaggacgcgctgcgc

SEQ ID NO: 90091 - DNA, 111 bp, Zea mays
  Clone ID: MRT4577_182164C.1
accgcagccgctggggggtttattttagaatggcgttcctaatgtaccagtgcagccctttggtaattgccttcttctttcaaatcactgtttcgtatacaatccaatgta

SEQ ID NO: 90092 - DNA, 324 bp, Zea mays
  Clone ID: MRT4577_182165C.1
acggtggtgactgccagaaagaaggtttctgtgctgagccagatagttcatcctcagaacacgaggggatcaaagacgttgaggatgagccctcaaacaaacgccaaaaaaccagcgacggcgaaccagcaagcgaaccttgatttgtgctgtgcctgtgctttgcttgtttgtaggtggccgatggttatttatcttgcctgttggattttcatcgaacaaattggggcaggttttttgtaaactattgttgcttgtgtgatgctccttctattctcatgaggaaaagacctatttaagcattatttatatttatgctttttg

SEQ ID NO: 90093 - DNA, 423 bp, Zea mays
  Clone ID: MRT4577_182166C.1
ggaaacaaagaggagaacttttttttttttcatttaaaagggccattcagggcattggtcacactgaccctgccccccagggggaggcgggacccaatataacccaaacctcccccctaaaagacccaactagctagctagcccgggggtaaacaaaaacaaaaaattttttcagggggggaccccccccgcaacaccgaaggggcatggaatcggttggtgcaggcccaacaaccccggaagggggtgggctatttggccccccaaaaaccccggaaacgggccctttttgggttgttgctgcaaaaaggactggaaaaccaaccccaaaaacccctggaaccggggctggggccccacccgcctaagctggggggaaaactggggccgaaaaaacggggactggggcaaacaaaagggggg

SEQ ID NO: 90094 - DNA, 294 bp, Zea mays
  Clone ID: MRT4577_182167C.1
ggaaccctgccctccccaggcttcctaagtaacaactgcagaatatttacataaagctgggtgttgtcaggcaaagcccttccctgctgccaggggtgggagcaaggaggaagtgccatgagcaccagccccgccctcacaccacgggaggcagcccagaggccaccggcacagggtggtggcccccagatcatacagcagtgggcacaggggaagcaaacctgagtgaggacacaagagcctggtccggctccgctgcacagggcaggtgtgatggcccccacgagtctttgg

SEQ ID NO: 90095 - DNA, 266 bp, Zea mays
  Clone ID: MRT4577_182168C.1
gactagttctagatcggaaaaatcctcctcctccgggtcttcctcaaccaaatccaaggtcccaccggcgaacctctcggcttaatcatgtctaggccgcggaagggccggaaagggtcctgggcaagggcggggccaaccgcaaccgcaagtgctgcgcgacaacaatccagggcatccaccaagccggcgattcgcagtttggcgaggaggggcgcgtcaacgcatctccgggctcatctacgaggagaccgcggcgtgctcag

SEQ ID NO: 90096 - DNA, 2416 bp, Zea mays
  Clone ID: MRT4577_182169C.1
tgggtacacctcgcgggccggccggggagtttcctccctttggcttcccccatctcctttcctcttccgtctcggcgtttccgtctccatctccgcctccgccttccctcctcgcctcgcctcgccacgccgcatttgcatttccggatcccctcctctcgcactccccattcccctccgccgccgtctcacgcgcccgcgacccacccggactcccgcttcgatctcgccccgattcccccgctcgcgcccccaacccgattcgtccctctcacgcgcgcgcgggtgggaagacagcgatggcttggggcgggggcctctctccccgccgcgggtgacctctcctcgcgcggggagccctcccgcgtgcccacgcggaggatcccgtcgcggctggtgcactaccacctcctctccattcgccactcccccgtgctctctcgcgcgtcccctcgaccatagatagggtttgctcccttccttcctcgccgcccgatttgatctcgtcccttccgggctccggctaggctgctccgtctctcctcctccgccatgttctcgcacggcgctgattccgcccacgacgccgggaccgttggcgtcagcagcggcgtcggggccaccgtccccgcccgcttcgtctggccctacggtgggaagagggtcttcgtctcaggctccttcaccaggtggtcggaacatttgccgatgtctcctgtcgaaggctgccccactgtatttcaggctatttgcagcctgtctccagggattcatgagtacaagttctatgtggacggggagtggcgtcatgatgagcgccaacctactatatctggggagttcggtatagttaacacactatacttgacaagggaatttaatcaaataaatgccttattaaatccaagcacacctggaagcaggatgaacatggatgtggataatgaaaattttcaacatacggttacattgtcagatggtaccattccagaaggtactgtgagagtttcagaggctgcaatacaaatctcaaggtgccgtgtttctgagtatctcaatttgcatacatgctatgatttactcccggattcgggcaaggttattgctctggacattaatttacctgtgaagcaatcttttcatattctgcatgaacaggggattcctgtagctcctctctgggactcattcagaggtcaatttgtcggccttctgagcccattggatttcatacttatattgcgggagctagaaactcatggctcgaacttgacagaagatcagcttgaaacacacactatatctgcatggaaagaggctaagcggcaaacttgtggaagaaatgatggtcagtggcgagcacatcagcatctagtgcatgccaccccttatgagtccttgagggacattgcagtaaagcttttgctaaatgacatttctacagtgccagttatttattcatcatcatcagatggatcattccctcagttattgcaccttgcatccctttctggaattttgaaatgtatttttaggtattttaaaaactcaactggtaatttgcctattctgaaccaaccggtgtgctccattccgctgggttcctgggttccgaaaatcggtgatccaaacagtcgtccattggctatgttgcgacctaatgcatcacttagctctgcccttaacatgttggttcaagctggagtgagctcaataccaattgtggatgaaaacgactccctgcttgacacttactctagaagtgacatcacagccctagctaaagacaaggtctacacacatgttcgcctggatgagatgaccattcatcaggctttacagcttggacaagatgccaatacgccttttggattttttaacggtcagagatgccagatgtgcctccggtctgatcctttgctgaaggtgatggagcgactggctaatccgggggtgcggcgggtgttcatagtagaagctgggagcaaacgtgtggagggtattatatcactgagtgatattttcaagttcttgctgagcttgtgataagagaagaggagcatgacggacatttgtttgtgatcaatagtaagaaaacagcagggtatgtgaagcaagctgccatggatctcgcatttcccctccccctccggcctttggtcaagtaaggcaggattgaaggtggcgggctttgtctttgctgataatggctgttggaattcatggtctgtaaagttctttttttcccctttgtttttcgttttaaccattttgtgcctcccgttgttaccaaaaatatctggtgattattattattatttttggattgtttctcaaaaaaaaaaaaaaaatccgccccgcaaaaaaaaaaaaaaaaagacccgggaattaattccggaccggtacctgcaggcgt

SEQ ID NO: 90097 - DNA, 106 bp, Zea mays
  Clone ID: MRT4577_18216C.1
gaatcccgggccgaccgacgctttcgcatggccccctgcacaagaagatggctgcatgagccggactatcgggaactgttccaatacccatgatgactcacataag

SEQ ID NO: 90098 - DNA, 2395 bp, Zea mays
  Clone ID: MRT4577_182170C.1
ccggactcttcccttctcctgcctgcctccctccctccctccttctcctcctccgctttccctcctcgcctaggcctagcctagccgcccccgcacgccacgccacattcgcatctctggatccccctcccttcgccctctcccattacccgccgccgccgcctcgcgcccgcgacccacccggcctcccacttcgatcccgccccgttcgctgcccccgccccgattccgattcgtcactgtatcgcgcgcgcgcgggtgggaagacagcgatggctcgtggcgggggcctctcgccccgccgcgggtgatctctcctctagcggggagccttcccgcgtgcccaagcggaggatcccgtcgcagctggtgcctcacctatccctctccttcgcatctccgccgtgctctctcgcgcaccccctcgaccctaggtttgctccttccctcccttcctcgccacccgattcgatctcgctccctccggcctccggctaggctgctccgtctctcctccgccatgttctcgcacggcgctgattccgcccacgacgccggggccgtcggcgtcagcagcggcggggctaccgtccccacccgcttcgtctggccctatggtgggaagagggtcttcgtctcaggctccttcaccaggtggtcggaacatttgccgatgtctcctatcgaaggctgccccactgtatttcaggctatttgcagtctgtctcctgggattcacgagtacaaattctttgtggacggggaatggcggcatgatgagcgtcaacctaccatatctggggagtttggcatagttaacacactttacttgacaagggaatataaccaaataaacaccttatcaagtccaagcacacctggaagcaggatgaacatggatgtggataatgaaaattttcaacgtacggttacgttgtcagatggtaccgtttcagaaggtactctgagagtttcagaggctgcaatacaaatatctaggtgccgtgtttctgaatatctgagtttgcatacatgctatgatttactcccagattctggcaaggttattgccctagacattaatttacctgtgaagcaatcattccatattctccatgaacaggggattcctgtagctcctctctgggactcattcagaggtcaatttgttggtctccttagcccattggatttcatactcatattgcgggagctagaaactcatggctcgaacttgacagaagagcagcttgaaacacacactatatctgcatggaaagaggctaagcggcaaactaatggaagaaatgatggtcagtggcgaccgcaacagcatctagtgcatgccaccccttatgagtccttgagggacattgcagtaaagcttttgcaaaatggcatttctacagtgccagttatttattcatcatcatcagatggatcattcccgcagttattgcatcttgcatcactttctggaattttgaaatgtatttgtagatacttcaaaaactcaactggtaatttgcctattctgaaccaaccagtgtgctccattccgctgggttcctgggttccgaaaattggtgatctgaacagtcgtccattggctatgttgcgacctaatgcatcacttagctctgcccttaacatgttggttcaagctggagtaagctcaataccaattgtggatgacaacgactccctgcttgacacttactctagaagtgacatcacagccctagcaaaagacaaggtctacacacatgttcggctggatgagatgaccattcaccaggctttgcagcttggacaagatgccaatacaccttttggattctttaacggccagagatgccagatgtgcctccggtctgatcctttgctgaaggtgatggagcgactggctaatcctggggtgcggcgggtgttcattgtggaagctgggagcaaacgtgtggagggcatcatatcactaagtgacattttcaagttcttgctgagcttgtgaggagagaggggcatggcggagttttttttaacagtagcaaccctctgggcctttgggtccttgcggataattggctatcgtcagggttcatggtctgtaaagttcctttttttgtttcgttttttaccatttggccctcccgttgttaacaaaacatacatcaggtgatttttatttattggattgtttccttgcttggcccctttgttgctggatcggccgtcgagccaactcttgcttggccctgaccgcatggtgtagggtttccatacccttaggggcccgcttgtataacctcaattaatataatggcaaccttcatttaaggtatagggtactaaaaaaaaaaaaacaagggcgcccgctcgcgatctagaactagtc

SEQ ID NO: 90099 - DNA, 137 bp, Zea mays
  Clone ID: MRT4577_182171C.1
tatcttcccaaaatactccatctatcagctcatacttatatcacttcccataccagcctagcatcttcccattctttctttctcaataaatacataccactcacatattactcctccatctttcaattcaccaacac

SEQ ID NO: 90100 - DNA, 388 bp, Zea mays
  Clone ID: MRT4577_182172C.1
actaacttcttgaagctcctcgcgaaccgactggacagattctcccgggagctgcaagctgctggcctcattgccacccccctctatgctagccgcggacgccatttgtcctgtgccggcaggcttggactcgccttctacaattatggcgatcgatctcctattatcgtatgagaagtctatgcagccactcacggaaggaagcttactgccaataagcaggctccaggaacagtgaacgaggtactgaagttgcggcactagcctcagctccatatggtgcgtggacaacccagttaggcaagcggcgctgtcaatcgtgcaaaaaaaggaagactagctatctagaggaaactaagtatgtccatctagaacaagctgctaaaga

SEQ ID NO: 90101 - DNA, 233 bp, Zea mays
  Clone ID: MRT4577_182173C.1
cgtgaacactcacatgtaagtagccttatctagcgcgcgctggcgatgcacaaataccctacgtgtggtatcaggccgaccatcattgcggcattggtccgtggcaacaggaccatatactcaactcttcatagcttacgcttgggagtcacacaggcactggcaggcgtctgcgtggatcggtgcctcactatcatgggcccccttgatgagcaaccgtacatgatatctac

SEQ ID NO: 90102 - DNA, 519 bp, Zea mays
  unsure (1)..(519): unsure at all n locations
  Clone ID: MRT4577_182174C.1
gtaaatcaagcatcatttattgatagagtgcatgaaatcagttctcggttctcgagctggcaaacacttgcttgagaagctcaaaagttaaatgaaaggacagccatggttccagacgtgaattgtctgctacaaatagggatcaaaccgtgttcttgccttcttccccgacctttattgggtcgttggtgctctgcctgtaccttccctgaaacctcactgatgctaacatcaggcccacgtctcttgagtagcaaaaaagatgctagcaagctcctccatcttctttgcacccggagctggatctgccttaaacttaaagcacttaggcgcctccgtcaccttgagcacgaccttcccctcccagggccggtacttaatcacgtaccgggaggttttggggctctctgnggaagattgctcggaccgttccacaaactcgtaccaagaatccacgtacaccatagcgtgtggccgagaagagcatcaagcggcctggccctatctatatgggaaacc

SEQ ID NO: 90103 - DNA, 464 bp, Zea mays
  Clone ID: MRT4577_182175C.1
cttattttttgactatatattactggcaagaggcagagaatcaaccttcttactccatatattctattataatcacatactaaagcaatattatttacgctacagacaactcactaccaacattaataaacccttaccagattctacatcaaaaaacctcgatgtaacttatactggaggggttacttgcacaagaggaaatccctactaacaaagaatctaactgatgggcataaaccccatgttcatattataagagatacatacaacagtctaaagaaaaggtttctctacgagcttctccatcaaaacttaacctccacaagaaagatcctatctactcggatgatgccctactccttgcccaaatatgcacagcttatattatattaacagcccacaaaattaccctaggagcacaaaacgatgtatcagcacacagtgaccagcatgaatggagtcat

SEQ ID NO: 90104 - DNA, 200 bp, Zea mays
  Clone ID: MRT4577_182176C.1
acgccaacgcgtcggatccaatcgatggatcgttcgatctcaaacctctcgcgagtcgaatggggctccgtgctgtttttgacctgcgtaattaccaatctgcgtggcttactgaacacaaggctgccttgcttgtactgtaccttcttgaagcccaaaactgagtatatattattgatgaatgacgacatgcaaatgtc

SEQ ID NO: 90105 - DNA, 413 bp, Zea mays
  Clone ID: MRT4577_182177C.1
gccagtgaattccgttgctgtcggttaaggagcagcaattaaacagtacattattctatatatattaaacctcacgacaacattaaattgcagataaattataaattcttcttactgagaaatgagtgcatgcttctccacctatataggtgtgacatacttaattagtgaagcatgcactcattaagtatgtcaacctatataggtggacatacttaattagtgaagcaacagtacagcccaaggggttttcattttcccatggaaaattagtttattttccctttggaaattgaaaatcccatagaaaaatgaggttgccaaactagccctaaacatgtttaacttgtgcccacccgtgtttgtgcatatatatacacatatatatatctctttccgcaccgacagcaacg

SEQ ID NO: 90106 - DNA, 137 bp, Zea mays
  Clone ID: MRT4577_182178C.1
accggtccggcatcagatagcgggggtgcacacacatcgagatccggaggccgcgagtcggagcgccaccaccagcgtctgcagcaattgcttgcaccgtgaccgtccctcggtcgtcgactacctccacgccgctg

SEQ ID NO: 90107 - DNA, 348 bp, Zea mays
  Clone ID: MRT4577_182179C.1
cctgacaattttatgaaggaaaccccccggggggggataacttcaaaaaggggggaaaaaaaattcaaaaaacccccccccccaacccatttgggggggcatcggaatataaacctttaaaggtattttaatttaaaaagggggccgggctccaaaaaaaaaaacgggggaataaactaaccgagaccgaggaaccggcccttcaaaaaaaaaaagggggccccgccccgggttgaagtgttaagatctttaaagaagacaccccacccttttttccttttgggggcccaaggaaaagggttacaaaaggcttgccaacacccgggggttttgggaacatcataatgt

SEQ ID NO: 90108 - DNA, 661 bp, Zea mays
  Clone ID: MRT4577_18217C.1
ccatgcacgccacgcaaaacgaccgcctgcctctccggttggtggttcaggtcctcttcttccagcagctgagggccggctcgggcaaagaactcgccctggttgacaacggagaacacgcttgcacacggcctacgcaggatcagtgcgaaccctgcgaaaggcggataccgaagcatccagagtcactagataagcaggtgacgagcctgagcgcgagggagagccgccagcaccaccggaccagcgacagcgagcacaggggcggcggcaggaacagcttcaaagaccagctcgggggcctcctgccgcagtcgcggtccaggaggatcttcgacaagctgtggagcagcaaggggcaaggcgagcatggcggcaaaggctcggagacgtctggcagctcccagagcccaccgttgtcagcaaagcctgcagaagtgaagccctcccctcttcccgctgttaggaacaggaggtactctgtttcatagttttttttggctctcctagtttagagctctgggttaggttgctgtacagaaggaagctaatcactgctgcccatcctttttgtaagcagatcaacctgctgttctcaatgtgatcatccatgctgtagcttttactctagtgtaattccaactgggagcagagattcgcc

SEQ ID NO: 90109 - DNA, 2164 bp, Zea mays
  Clone ID: MRT4577_182180C.1
cacgattcgtgcccgccggccatcaggtccgcggtcgagctcatgtacgcggcgtgtaccttcaagatccccgagctcacctcgctcttccaggcgaacctggtggcttgaagtctatgaattgaaatggaatcattattcattaggctgctcaacatttgaatattacatttatggctgtatagtttatcaatcagtttaacatcaattgagctttgctttgtctttacggaaggcaaatggttaacatggtcttcttctacagcggcggcttcttaattttgtagacaagactctagtggaggatgttattcctattctggaagttgcttcccactcagggctgactcaagtgatcgacaaatgtattcaaaggattgctagatcagatctcgacgatatatctttggataaggagctccctccagaagcagttgatgagataaaaaatttgcgcaagaagtcacaaactgctgatggtgatacgttcatttcggaccctgtgcatgagaaaagagtcagaagaatccacagggcacttgactctgatgatgttgagcttgtgaagttgcttcttaatgagtccgacatcacattagatgatgccaacgcattacactatgctgcttcttactgtgatcctaaagttgtctcagagctgttagatttggcaatggctaacttaaatttgaagaatagccgtgggtacacagcactccacttggctgctatgaggagagaaccagctataatcatgtgtctccttaacaaaggggcaaatgtgtcacaactgacagctgatggcaggagcgcaattggtatttgtcggaggttaacaagagcaaaagactacaatacaaagatggagcagggtcaagaatcaaataaagataggttgtgtatagatattctagagagggagatgatgcggaatcctatggcggtggaagatgccgtcacctcgcctttgttggcagatgatcttcacatgaagcttctctacctggaaaacagagttgcatttgctagattgttctttcctgctgaagccaaggtcgccatgcaaatcgcacaagcagacaccacagaagaattcggcggtatagttgcagttgcagcaagcacttctggtaaactgagggaggtggaccttaatgagacgccagtgacacaaaacaaaaggctccgttcaagggtagatgcactgatgaaaacagtggagctgggccgtcggtacttcccgaactgctcgcaggtgctggacaagttcctggaggacgatctgccggaaggtctggaccagttctacctccagaggggcacagccgatgagcagaaggtgaagaggatgcgcttctgcgagctgaaagaggacgtgctgaaggcgtttagcaaggacaaggcggagggcagcgtgttctcgggcctgtcctcgtcgtcgtcgtgctcgccgccccagaagtatgcccagaggtgatcaaggcaccagtttttgccgtatagtttgttatcatggtcttcgagacttggacccggacagcatatagggacatgtacacctgtgtatgtatagtgcttacaattggcgtaagtagaactatatgtatggaacataaggaaacatggcaggaacaccgtgcaaaaagatgaaaagatggccgaagtgctctatgcgagtgcccacctgattcgatggccctattcaacggcgccctgtcagcatgctgcatgcccactgagaccttcggttgcatagggataggaggagatttctgttcaattttggctagcaagtgatataggggtgtttaggactgtttcactttatgaaaatcaacttagctcataaacacttttaacttcaataacttaggtcctgtttggagtggctgtatttttctagtcccaagaaaataatgtggtatctgagaataccatggtctagaaaccaaaatgtgtttggcagactcttttaaaccatggtatttaaaatcttggttttgacaagaccacattatttctgggtatagaatactgtcagccgagttcggctcggctcggtgcggctcgttgactgaacgagctcgactcggctcgtccattccacgagctggtgaaagaggctcggctcggctcgaccttagctcgcgagccatattcttgt

SEQ ID NO: 90110 - DNA, 599 bp, Zea mays
  Clone ID: MRT4577_182181C.1
cattgggtacctcgaggccggccgggaccgtcttcctattcttatatacttgcatacgatcgcacctcctccggtgcaatagcgctgatcttccgcaccctcctcgcctgggctgccgtacgagcgactgcgttcacctcgacgaatcagtagaccgttcaccgtgtgatccgcgaacatgtatgtgtccgtggatctgcaattgaacctcggagagaactgaggaatcatctcccccgcggtgacgatgccagcaagcatgctcaaggggcactacgagccagttcgacacgagcaggcccccgagctggcgcacggaggactgctgtagcctgatgccatgcactgggtaccattgcggggccaacacaatgtcctagtacacggtgaatgagttcaaccacctcgacttcttctacatctccctcatagacagattcaacgtgaccattatcttcctcctcgacggcgcgtccaggagcagtcgcatgccattctgcaccgagaacctgtactcgcgatggactgccaagctgcgcttggacggcccgtgcaacaattcctgccccctgttcaagaataataatgactgatgcgtc

SEQ ID NO: 90111 - DNA, 477 bp, Zea mays
  Clone ID: MRT4577_182182C.1
aaaccgggacaaaaggcccaaaattcccagggacattcaccaatcaccaatcaccacccccccccccaccataagggcccctaaaagggccccgggggccaaacccccaaaaaaaaacccaaaaaccggccccacaggcccttaaaaggcagaggaaccgggagagagaaaaaaaaaaaaaaagaaaaccgccccctacctaggcaggggaaaaaaaaaaaacaaaacggggccaggccggaaaaaaaaaaaaaggtaacccccgaacccaaaaagggggggagcatccggggccgcccgagggaaaatgccctggccggcccccaggaagcccagggggtaaaaccgggccttggggcccggaaaacccccccagcgcccgcccaagggctgttgccaaggggccggggtcggggggggaggaaggtactggttggcccccaggcccccccccgcggggttggggacccggggggg

SEQ ID NO: 90112 - DNA, 405 bp, Zea mays
  Clone ID: MRT4577_182183C.1
ctcgaaacatgcgtatatagaaattttttttcctaaaatctcgccggcaagcatacatgcattatctaaaacttcgcaggggggagctgggggggtttatatgaggactagcatcagtcctaaaataggtttgggtcaggggcacacgtccgggatcgaccagagcaccatgcaggggccatgggtcatatcatcattatcatgggttcatgggaggggaatgggtcggagtacttgcttaaccatgatcaggacacacgtttctttggggggggcgggggtatcccgggggagggccgggcgattaattaggagctggaggttttgacgaacattccctccttgggctcgggggcctcgccggggggggggtacttgccaagctgcgccagggagttggccttg

SEQ ID NO: 90113 - DNA, 173 bp, Zea mays
  Clone ID: MRT4577_182184C.1
gtctgacgtggggacaaagttcgctgggggggggtaaattcaaacgccttaggttgatactccacgggaataagagaagtaccatcagttagcgcattgtgaggtgagattgcgatctatggtggccgaaaacttcctctacaaaaagaatgctcctgtaatgatggaagatt

SEQ ID NO: 90114 - DNA, 621 bp, Zea mays
  unsure (1)..(621): unsure at all n locations
  Clone ID: MRT4577_182185C.1
ggcaaggcagctgcacacagnacgtgtcgtaacatctcgggtagcacttgagtattagcgtacaacgtcgggtggcgccgccgtcagcggcgagggcacgctgcggctcctcgccgcggcgatggaggccccccggaagggaggggcgcgggagccggaggaggcccggaggcggtacctcgacttcgtgaagcgcaagaaggggaggaaggagagcaaggcgcgccgcgaggcgctcgtggacctgtgctgctccgctgccagcgccgtcgtcgtgctcacctgcctcgccgctgtcgcgctccggtgaccggcgcctgctgcctgctgcccggacggacgagcgcgtgtagtgggcactaggcaaggcagctgcacacaggacgtgtcgtaacatctcgggtagcacttgagtattagcgtacaacgtcgggtggcgatcttttctccaacgctctttttctctctctcttcttcttcccggtaacagttaggaacagcacatcatcatgtcctgcactggtgtgcatcgttttcctatcctataacaaacgacgtgacagcaatacagaagaaaaaaaatatccccccgtccaaaaaagactatcatcttttcactgt

SEQ ID NO: 90115 - DNA, 114 bp, Zea mays
  Clone ID: MRT4577_182186C.1
ttgtcttagtcgtgtgatgccgcgacgcagctcgaattcggtcgagcaagatgtggagaccatcttgcctccggtctgagagatgctgtgatggaagggggccgagaggatctt

SEQ ID NO: 90116 - DNA, 521 bp, Zea mays
  Clone ID: MRT4577_182187C.1
atgtgttcattcttttattgtccattgttttaacctgactgaatacaagatcaacaagagcactgtactcctggcaattattatatatgttagaacatggattttgcactgtagacaacatttaacaccagtctatggggtactgcattgctttttataaagtccaaaataaagatttattttcaaacaagtgactttggtttatttcatacattacactttttcttgcagaaaaaaataaaattgtacaactgcataaatataaaattcttccaccatgaaaatggttaaaacattcataaagacacagcaccagcatgtgatgcctccagagaaaggaaaaaaggaaagtaaaagaaaatgtacaaagcaaatgaattaggcctgtcaccagcccaagtgacaggcgatccagatctcatacacagcttcagaacgtaccagaggacaagggaagagatgtcaagacggcattcaatacaaagcacaacacaacccatcacctttttgtgtttttctgt

SEQ ID NO: 90117 - DNA, 777 bp, Zea mays
  unsure (1)..(777): unsure at all n locations
  Clone ID: MRT4577_182188C.1
ccggccgggccgaggaggagcgcaaggagctcggcgaggctctcaagcctatcgcagagaagtacaagggcaagatcaacttcgccaccatcgatgctaaggctttcggtgcccacgctggtaacctgaacctcaagaccgacaagttcccctctttcgccatccaagaggttgtcaagaaccagaagttccccttcgaccaggagaaggagatcacccacgacaacatcgccaagttcgttgagcagttcgacgctggcaagattgagcccagcatcaagtctgagcccatccccgagacccaggagggtcccgtcacagttgttgttgccaagagctacaacgatatcgtccttgatgacaccaaggatgtccttgttgagttttacgctccctggtgtggtcactgcaaggctctcgctcccaagtacgatgaccttgcttctcagtacgctgcttctgagttcaaggacaaggttgtcatcgccaaggttgacgccaccctgaacgacgtccccgatgagatccagggtttccctaccatcaagctctaccccgctggtgccaaggacgctcccgttacttaccagggctctcgaaccgtcgaggacctcgccaacttcgtcaaggagaacggcaagtacaaggctgagatctcctcaaggagganggtacagaggaggctgcccctgccgccagtggaggagaagagggaggagaagaaggcgagaaggccgacgaggatgttcatgatgagctgtnaagaattgatatcgc

SEQ ID NO: 90118 - DNA, 614 bp, Zea mays
  Clone ID: MRT4577_18218C.1
cattgggtacctcgaggccggccgggggttctcctcctgtctccgtcctctcaccaccgctgcctccgcggttcggtttcccgccgagttcgcaagactttgcttcgctcttcgttgcggattccctctggtcatggccggaagaggagagaggcgatcggctcacgagacgccaagaacgacatgtccagcagctccatacgcgccgggctccagttccccgtgggaaggatcgccaggttcctcaaggccggcaagtacgtcgagagggtcggtgccggagcccccgtatacctcgctgccgtgctcgagtatcttgctgctgaggttctctagcttgccggaaacgcggctcgtgacaacaagaagagccgtatcgtcccgcgccacatccagctcgacgaccgcaacgacgaggatctctaccgattgctgtgcacggggaccatcgacagtggctgaagacatgcccgacatccataacctggtgctgtccaagaagactgcctgctaccagcgacaaggctgcagctggtgatgaggactacaccgaccacgactaggctttcatccggtgcagctacctcttgtggacactgccggatcagcttgtg

SEQ ID NO: 90119 - DNA, 451 bp, Zea mays
  Clone ID: MRT4577_182190C.1
cctataaaacatacaccccttctttttctctttttttttaaagcaaaaacaccatccattatattcaaaaaactgcaaccaaactacccacacaacatatctatcaatttattataaaaccaatatttatagactcatcacaaaactcgaccttttccattttctatcacacatttataccaacccattcatttacatatccattcctcttaatcaaattccaccaaactattctcacaacataatcacaaacaatttaccatattcctccaacttcttctcaaaatcatcccttaatcaattaactatgaaacttcatcatcttccataaaccttacatttcatccaaacacctcctcattacaaactagacataccttgttaatcttaagccaacaaattattcaatctgcataataacaattactgcaatatagtcttatcatattct

SEQ ID NO: 90120 - DNA, 530 bp, Zea mays
  unsure (1)..(530): unsure at all n locations
  Clone ID: MRT4577_182191C.1
actgtgcggcgctcgagccggccgggctcggnagatgtgcgaaaagaccacgactacttcgttgccccgaagtcatagagggataggaggctagggatagagcagcgtcatctgcaccgctgcgccggcgagccagaacatcagtaaggcagcgatggcggtggtggagctgtgggagacgctgatagcaggcgatcgttgcgtacacggggctgtctccggcggccttcttcacggctgtgggggcgtcctccttatcatcctgactggtgctacatcatcttctgcgtccattgccacggcagatctacctacacagcaaggcgatcccgagacgtggcttttccaatcatctacgtgcggacggcagaggaatggctcccgcccaccacacttctgcaagagcagtggtgctgttgcacgcaacatcctgcagcagctgcagattatgggcatcatcgatgtcgatcccaagggtgtgcgcctcttcacccatcacggaaggcttgatctggaccaagtgactggaa

SEQ ID NO: 90121 - DNA, 853 bp, Zea mays
  unsure (1)..(853): unsure at all n locations
  Clone ID: MRT4577_182192C.1
ttgggaccctcgaggccggccgggattccgcctcctcccgaccacctctttaactcgcttccgtttccaaaaaaatgctccagttaatttaatccagacgaggaatcgcctcgccgcggatctctccgctcgccgacaagacccgctatcggctccggcgggaagactcgcactacggtggggcgcgtcgccgccgctcggcacgtggctcgtcggttcgacgttcgcttgtggaggtcggcggggccagcggtgccggggcaatgcggtcagtttgtggagccgtctgaggcgcttggctgggatctgagggtgtcaggtagggggcgcgagcgagctctgtcggtggggagttggtggtggttgtagcgtagggcgcgtcgcgtgtttggctgccgggatggagcacgtagttgggggcaagttcaagcttgggaagaagatcgggagcggatcatttggggagctctacctcggcgtgaacatgcagagtgacgaggaggtggctgtcaaactggaatcggtcaaatcacgacatccccagcttcactatgaatcaaaactctacatgcttttgcagggtggaactgggattccacatcttaagtggtttggggtggagagggagtacaatgtcatggtgattgatctgcttggcccaagtatggaggacttatttaactactgcagcagaaagttctcccttaaaacagtactaatgcttgctgatcagatgatcagtagggtagaatacatgcacacaagggggtttctacatcgtgatatcaagcctgataatttcctcatgggtttangacgtannagcaaccaggtatttgtcatcgactatggc

SEQ ID NO: 90122 - DNA, 540 bp, Zea mays
  unsure (1)..(540): unsure at all n locations
  Clone ID: MRT4577_182193C.1
gggtnaccctcgggccggtgattctgtgcctgatttccatctgtaaagcagggatcgtggcagcacccagatccctggctactgaggggatgaattcgtgaaggcgttcagtgcctggggccccccaatatatgcagctgctccttcaagcagcctcggaaaagcccctccgtccgaaccagaattctagatgtccaggcagcaaagaggtctgaacccaggggtctgggttggcatttgtggggtgttcagtggtgtccaggaaaatatgccaggatggtgccatgggagccgccatcctggtcacctcaacccacctgcccataaagagggccgggcccaggactcaccaccatgacgtagcgcagccggtactggatggtgccgaagagtcccaggatgacgatgatgatgtggacaaagttggccaggatgggcgcccactggtagcccaggaagtcaaacacctgcctctccagggcggcgacctaggagcagggcgggcgccatgaagggtggacccgagggaggccccaggcc

SEQ ID NO: 90123 - DNA, 597 bp, Zea mays
  Clone ID: MRT4577_182194C.1
cctcgaagccggccgggaccgctcacacgtgtcggtacagaccttgcctctgctttcgccctcgtgcgatcgtgctactagccgccttctccgatgacgccgctgcaaccggtattcgctgcagatgcactagtcacagatactagcggatctcctgccttcggatctgcatggacggtaagaataactaggtgctccattagtcgcgcatgctgtctccaggactgcctcctcgcgtcgtacctctcacttcgctctccgcgccacgactcacttcccagctaccacccacatcttcgcacgatctgcatgcgcgcgcttctaccactccatggtctctctccacccgctatctgtccgtcgccaataacctggggtccaagagggccagggtgcacattacagcatccactatgacatgcaaggacacctccaactagcttctccagcacgaccttctcatgatccgtcgcaaggttatggtcaatgtcaactccgagctgttcattcccactgacaccagagtggaggtagatgacaagaaggatgcgctgatgatcagtacctcttcaaacggacgccagtgtacatctccag

SEQ ID NO: 90124 - DNA, 678 bp, Zea mays
  Clone ID: MRT4577_182195C.1
gaccgcgcccctctcgagttttttttttttttttttttttttttttttttttttttttttacacggcaatcatgtgcacagcactagtactagtacagtacaccaccggtcggctgtgttttgcgccgagcaccctgatcgatcgaagaggccgcgcgcgcgcgtgctatgtacagtacagacggcggagagagagagcagctcaggcgcagagggcgccgagctcccggagccggggcacgaggcggccgctgaggtggagccgcatgaggccctcgaggccgccgacggggtcgccgcccacgaacagcgccgggacgccgccgccccgccaccctcggccgccgccagctcctcctcctcctcgccgccgcccagctcgatgacggtggcgtgcgcgcccacggccgccagcagccgccgcatcacgtgcgccatgcagcagccgcgccgcgcgaagatcaccacggggctctcccggaccagccgccccacgcgcgccgcgggggcctcctcctcccccgccgggtcgatggtcagcccgcgccgccggatgcccaccgcctgcatgctctcgaccagtaccacccacccacccacccacccaccggccggcctgcgtgccgattagctgagagcggcggcctggaagatcgaccctaccggacgagctccccg

SEQ ID NO: 90125 - DNA, 507 bp, Zea mays
  Clone ID: MRT4577_182196C.1
ggtacattaataatcctgtgcactcgattgaaacggacattgctgtctttacactgcaaaccgatactagaaatatgcagtgaatacatacaacgaatacacatgagcctggcgcatgacttgtcatttacgaacttcaggagggggatgctgcaatttaaaccctagcaacggaacatatgaagggccctggactccggaaaaaacatgccatgcctggacaaaatgagcactgcacgcaaagcccgctgaaaccttattggggaaccaggcgccttcaccatgtgtaagaatgccgcggaaacaccacagaaaagcgacagtagaaacatcttgtcggtggactttgcgcagcacaaacaacaatggggccaaacgggccattactaccaaaacgaatattctgtactgcaaaccactattgtaacagaaactcgcttggtaatcgcacagctatgtgattctacaattccgatcgataacggcacatttacctttactatttga

SEQ ID NO: 90126 - DNA, 187 bp, Zea mays
  Clone ID: MRT4577_182197C.1
actttccgcgcctcttcttctgcgcccctctcctcccaaactgcggatagagcagcagaggcagcgacacgatcgcgagcgcacgcacgtaagcacgttgtcggaagctccagttaaaaggaagaacaaggccttattcgttgcgggccaagctcttcttttcgggcggcaagttgttgggcggccc

SEQ ID NO: 90127 - DNA, 1890 bp, Zea mays
  Clone ID: MRT4577_182198C.1
tttttttttttttttttattttaaactaaaattaattaagagatcaaacgactcgtgaataaacatttatatatccattaccaatctataggcaagtggaagagttgcaacaaatttccagagacagtgtacattgttccctaatttcaacgattctacaatttaagcctttttttaatgatgactcctattagaatcacgagcctagacttgtcatttgtcatctcttttgatgtgtgttcgtacgttgctcatcgattctgaagttttgtcgccttcgtcttatccgctgccttcctttgcctcgtcttcctctttggactttgctgcctcggccgccgcctctaccttcttctttgcctctgcttccaccttcgccttggcctcctcctccttggcctgcttcagagccttcgcaagactctccaagcacgcgttggcgtccctcttcttcttcttggacatggacatcaggttctctgccacatctgccggcgacatgtcggtctcctcgagcagctgccctatctggtcgaatagctcgtggctcctcgacgtccaggtagttcttggcgagcaccttgaaggccgggaagcggcagtaggacatctcgatgtgcctgtccatcctgcctcgccgtatcagcgccggttccagcttgtccttatggttggtggtgaagatgatgatgcgctcgccgccgcatgccgaccacaggccgtcgatgaagttgagcatccctgaaagcgtaatcttgctgccttcgtccttttcaggctccatcggcagcttgggcttgtcgtcggcctcgcgttcggatttcttgtccttgcgcttgccggtgaggtcgacggagcagtcgatgtcctcgacgacgatgatggatttcccggtggtctcgatgaatagcttccgcaggtcggtgttgttgttgaccgccgtgagttcgaggtcgtagacgtcgtagtcgagcaagttagccatggccgcgatcatggtggacttgccggtgcccgggggaccatagagcaggtaccctcgcttccacgccttgccgaccttggtgtagtagtccttggcctcccggaacgcctccaggtcgtcgacgacagcctccttgtcgtcgggatccatggcgagcgtgtcgaacgtagacgggtgctcgaacgggacgtggctccagacgtcgcccctcccacggccgccgccgctggggttgttggtgaagaggcggcgctggcggttgcggacggtgacggcgcgtccttccttgaggacgtggggcaggtacttgccgacgacgaggtcgcggtggcgcctgtggaagacgacccggtaggtgcgcgggtcgtcttggttggcgtacaagctgatgacgttggacctgggcaccttcttgacgacgtaccaccagaccgtggctccctggaaggcgtcggtgacctcgtcgttgtcgccgacggagacctggaggttgctgctgtccctgccgagctcggccttgagcttgcgggcgcggggcgcgcaggcatcggacaggtaggcctcggcggcgaggaagaagtcgctgcggcggaagcgctcggcgccgtactcggagatggtgatctcgacgtaggggttgaagtaggagacgagcttgttggcccaggtggcgacgcggtggctgatggtgacgggcacgtgtctctgcaccatggaccagaggaagaggaagctcgcgagcgccgaacccaggcccgcccacctgtctaccactgccatggctgttgtgttgtgtgttgtctcgcaagtcgcaagcaagcttggtttacaggcacttgcttaactactcacttgtactctagacagcacgtactgtttcccggccggcctcgagggtcccaatg

SEQ ID NO: 90128 - DNA, 273 bp, Zea mays
  Clone ID: MRT4577_182199C.1
gtcatttatgtaattgttgtgtacgtgaatttctgatcctggcacgtacatggttcgcattcggtttaccttccaaaaccgggtgtgacagcgatggctcaggcgcagtgctgacatcttcctttgaggtggagatccttcccccgtgtcgacgtccgaggccgggtcagattccaccgaaggtggagacgatgccgggggtgctgctgctccccctattgatgtctgaacctgcaagaacaatctgtctgtagcgtgcctatgttttttgcc

SEQ ID NO: 90129 - DNA, 290 bp, Zea mays
  Clone ID: MRT4577_18219C.1
cttcagcgagggctggctcgactacttcttcaacccgagccttgtccactctcagaggatccgggctatctggtcttgccatgaggtgctcatgggcgccatcaagggttaccgcgtctcctatattcttgtcgactagtacattcatcttactatgcgctcttctcaggacttgaatggtagacttactgtttatttttaaggagaagaatgaattgatgctgttgggctgacaagggaattgttccaatcatttttactagtcatttttttcaaaattgccctttttt

SEQ ID NO: 90130 - DNA, 306 bp, Zea mays
  unsure (1)..(306): unsure at all n locations
  Clone ID: MRT4577_1821C.1
gttgcaaagcttggtgtacaggagcatgaatccgatggccatgggcaggggaacccggggggggaggaaagggatgatctcggcgctggcggtgatgtgtccttccgcgcccaggcggcggcctcggcggcggtgccggcgccgcagccgggggagtccacaaaaaagctccttggcatcgacgtgaagacgctcaagaagatcgtgggcttgacagggacgctttnaagtaaatttttcaacnacaccaacccgcgggacaccaaagagcggggggggggcaccgccaaggggagcagcgccgag

SEQ ID NO: 90131 - DNA, 1912 bp, Zea mays
  unsure (1)..(1912): unsure at all n locations
  Clone ID: MRT4577_182200C.1
cattgggtacctcgnagccggccgggattccataatgacgagctattacattggagttgacgttggcagtggcagcgcacgagctgctctcgtgtcggatcaaggcgatatcgtcgccgagtcgacgcacgagactctgactcgcagggacgaccatgactcaaacattttcgagcaatcaactggtcagatctgggattgcatctcaaaagcctgcaaagccgttctcaagagctctggtattacgaaagagcaagtgaaaggtattggattcgatgcgacgtgctcattggccgttgccaacatggagacgggcaagccagtgtcggtctcacccaaatcttggcagcagggcgcagatggcagcgctcagaccgaaggcggacacgtctgggacgtgattctctgggccgatcatcgtgctttcaaagaagcgaaattaatcaactccactggatcgatggttctcaaatacgtgggcggcaccatgtcactcgagatggaagcgcccaaaatgctctggctcaagaacaacatgccggccgacgtgttctcgtcgagcatgttcttcgacttgccagatttcttgacttacaaggccaccggtgacctcgctcggtccaactgttctttggcgtgcaagtgctcttacgtgcctccgggtgtcgagggtagcaagggatggaatgacgacttcttcactcagattggactcggggagtttgtcaagaccgagtacaagcaagtcggagggacccctggaaaatctggcctgatcttgacagctggtcagccagtcggaaagggaatttctgctgaagcggccgaggagcttggcttgctcgagggtacgccagtcgggtcaggcgtgattgacgcctatgctggctgggtcggtacggtcgctgcccccatggaaggacaagagaccacctcactcgaggactcgaagcaccgacttgctgccatcgctggaacttcgacctgtcacatcgtccagtctcccgaagccgttttcgttccgggcgtttggggtccgtacaagcacgccatcttccccggatattggatgaatgaaggtggtcagtcttcgacgggccagcttctggacttcatgatcgatacacatcctgcgtccaagcgactcaaggaactcgccaaggagaagggcacgaaccatttctcgctcttgaccgagatcttgcagaacatggtccaggagaaaggcgtgcccttcatgtcgtacttgaccaaggacattcagctctaccctgatctgcacggtaaccgctcgcccttggctgacaacgacatgcgaggcatcatgattggcatgcgcctcgacaagaacttgtctgacctggcgctgcgctactatgctaccggggaggctatcgcactgcagacacgccaaatcattgatgagatgaatcgttgcggtcatgacgtcaggtccattttcatgagcggaggtcttgtcaagaacggtttcctcatgagcttgatcgccgacatctgcaacgttcctgttcagttgccctactctcattcggcatcggtcgtactcggtgctgccatgcttggagctgcagctgcagccgaagctcagaatggcgtaatcgacagtcaggagaaggccgagaagggctcacacgacatgaaagagcgtctgtgggacattatggtcaagatgtcgcgtccgggcacgactgtccgtccttcagcgtcagagaaggagttgaagctgctcaaagtcaagtatgagactttcttagagtgcatcgagttgcagcgcaagtggcgcaagaaggtcagcgacgctctcgacgagtagacagcttcccatgagttgccacctcctcccaggcagtagaatgtttataagcgtgcaagtcaacacctttatagaagc

SEQ ID NO: 90132 - DNA, 2287 bp, Zea mays
  Clone ID: MRT4577_182201C.1
agtccagccctgcctcggttcttcctccccgtcccatcgtgctgtagaagttgcccgctgccgtctcctgtcctgactcctccatgtctctcacttccctcacttctcggctttgacctcggctcgcaatgaactctctcctgcgtccgccgctgccgggcccgacgccgagcctgagcgcgagacgcatggtctcgccgccgccagcgccggtgcgggtcagctcggcggcgctggccggcagcgggcgcagatgccggctggggctggcagtggcggcgtcggcggctccgtcgtggatggaggaggccggggtggccgtgctggaggaaggcgggcggaggaacccgtctgtgtcggactcgtaccgccctgctgggctgccgcggcccaacgccacggtgctggaggcgcaggcgcgggtgtgcacgggccccgcacagacgcgcccgctcggggaggagcaggccatgcgcgtcctcgacactatcctccgctccgcaatgggagaactcaaagaggagccagtctctagtgcacagttaggtgcattctttgcaggcatgacaataagatccaactcgtttccagaggccacacagtggagcgagggtgaacggcgtgccatgagcatattttggccacgccttgtacaaattcttcctccggaggtgaagtttatagcagaccctgaagggacgatcatgggtgcaaatggtttaacagggcctcggtatgttggtcaaggaactggagagatgagactagtcggtgctctgagggaagtgcttgctggtggccatttaggctatgaggaggttcaatgtgtgctaaaggatattttaccaattggaccgagttcagatttgacagtgactagtgaagcattgctggcagcatttttgattggacaacggatgaatagagaaactgatcgtgagctcaaagcgtattgcctagcctttgatgatgaactaggtcctcctctggttgctgacgtcaagtccttgacacactatggtgaaccatatgatggcaatacacggttttttagaagtactctatttgttgcagcggttcgagcctgctatagtgaatcatgcctcctccatggtgttcaatggatgccacccaagggtggaataacagaaggacaaatgcttaaattcatgggcgcaaacatacacttatctccaacacaagccaagatactgttggaggatgagactgctggttttgcatatttgaatcttcaggaagcatgtccaccattatattcaattattgggctcagggagcatattaagaaacggccaccattggctacctctgagaaagttcaacaatttgtgagggcacgggggagagaatcaatggttgcaggattttatcacgaaggctatgaagatccattgcttatgctgatgagaaggagaactgttcatgctggactagttgtgaagggtgaggaaggtgcgctttccttgacaaccaaggaaagatcagcccatgcatcaaaaggactccctgttaaccactgttcagggtttcggacacccaacagcataaattcctctaaaactgatggtattcctagagaaagcttcagggtcattgtgaatgcccaggaacttggttttgaatccactgaaactcccagaactgatagatcaattctaaagaacttggagctcggcctggcagcactaggtggcgagaaaggagcagcctacgaccggatagtcctgaacgcagcaatggctgaccacttgctaggctgcagcggagccgaggacatcgacgctgcgctcgaccgtgcgagggaagccattgatagcggcgaagctctgagaaggctcatgagctacataaagatctcgcacagagtctcctagtgttgacccgtgagtctgtgaccatgtactgactgtacaattttggcgtgagtcacgactggatatcttcttcgcgttgtctgagtgccttccccactcaatgttacaaagccaccatgaaaaagtatactcccttgccctcaaggacatgtccaaaaaaaacagttgaaaggaaacaatgccttgttggcaaggaatgtgtttttataagatttttgttttgcaccgagagacacgtacagattctcctcttgagatgtccgaatctggttattgtggctattgtgaatactctgcatagcctcatcgtcaatcgtcatccaggttgagaacttgtaaaccgtatttgattttgtttatgaatgtatgtgctcttctttatgttgtgtaaa

SEQ ID NO: 90133 - DNA, 492 bp, Zea mays
  Clone ID: MRT4577_182202C.1
aaaaaaaaaaggggaaattttttggcttaaggaggcccccaaggacttgggggggggcaaaaaaaattatttaggaaaaaagaaccccccccaaaacttaaaaatttacagggggggcccagttggtgttaaaaaaagggggaaaccaaggggttgggggttaaatgggggggggtttttcccactaaaagggccccaaaaaaagggtggggggggggaaaaataaactgggctccaggtgggttaaggaaaaccttggaaattttttcccttggaaaaaaaaaaaacccggtcccttaaaggttttaaaaaccggaaaggtccaggaaatttttgcccaaaagaaaatttccaaccctttcctaaaaaggaaaattgggtagcccgatttttttaaaattttccccgggggggtttttaaaaacctttccaaagtaaaaaagggggggttaaaaagccccttttaatttgggaaaaaaatccttgcccggg

SEQ ID NO: 90134 - DNA, 811 bp, Zea mays
  unsure (1)..(811): unsure at all n locations
  Clone ID: MRT4577_182203C.1
aattcaccgaggcttgtgtctgatctgcatctgtactcgatctatctcctccacgccggccgtagtgctttctgtcggtcacgggacgcggctagctcgccggccatggctgtccgcgacgagccgctgcatatcctcttcttcccgttcctggcgtccggccacctcatccctatcgccgacatggccgcgctcttcgccggccgcggcgtcaggtgcaccatcctcaccacgcccgtcaacgccgctatcatccgctctgccgtcgaccgggccaacgacgccttcgccggcactggctccccggccatcgacatcgccgtcgtgcccttcccagacgtcgggctcccgccgggcgccgagaacggcacggccctatcgtcccaggacgaccgcgacaagttctaccaagcggtcaggcttctccgggagcccttcgaccggttcctggccaaccaccgcaccgacgccgtcgtttccgacagcttcttcgactggtccgtcgacgccgccgcggagcgcggcgtcccgcggatcgcgttcctcggcagcagcatgttcgcgcgcgcctgcagcgacagcatgctgcggcacaacccgctggagaacgcccccgacgaccccgacgccctcgttttgctgccggagctgccgcaccgcgtcgagctgaggcggagccagatgctggacccggcgaagaggccgtggcactgggagttcttcaaaagcatgaacgccgncgaccagaggagcttncggcgaggtgttcaacagcttccacgacctcgagcgggactatgtcgagcacttc

SEQ ID NO: 90135 - DNA, 106 bp, Zea mays
  Clone ID: MRT4577_182204C.1
aaaccgctgacgtcgctgctgtggtcggcagatgcccggagcactcagacgacctcttcagcgtcgtcacgaagcagcagttagtccacatccacctgctcttcgt

SEQ ID NO: 90136 - DNA, 364 bp, Zea mays
  Clone ID: MRT4577_182205C.1
cccacgcgtccgaccaactccaatcgttagaagaacactagtgctacatcagtggcactccctgattttgccttgttaggctgcgtggtcttttttgaagtgcctgctacggaacaccatttttccacaatgctaacatgctgaccaagtcttccatctgaccacgcacctcacaccagcggggtcaccgcgaggtgcaaacccaaatgttctagcctgtaagacccaccagtacatcacatgtgtacatcttacctttatcatccatgatcatggatgagaatgaggcgtagaacactatgtacctttagctggcttaattcgagcagaacattagtggacaccagtacatcttccctggcta

SEQ ID NO: 90137 - DNA, 308 bp, Zea mays
  Clone ID: MRT4577_182207C.1
caacccttccctttttaaaacggtccttaggaccgagtgagctttttttctaaaatcacttgggaatcaaacttcccgcagggcccaccacacaatggatgtcttttgcctcaattacaagggagtgtttgatcacaagaaagaatgcgaaagaaaagaatgcgatccaagcgcaagagctcaaatgaacactacaaatcactctttttagtcactaagcctttgtgtggagttgggagaggatttgacctctttgggtgggctttgcaatgaatgctagctcttgtataggggttggaagctggaaa

SEQ ID NO: 90138 - DNA, 398 bp, Zea mays
  Clone ID: MRT4577_182208C.1
ttttaaacgctttctccctaccagtctgggcgttttgagtccgttcgagggggtactagaacagagcggtaactgccgctgcccactgtcgtcgggcagctgtactagtagcagagtcgcggtcggtgactatctttgggagcgctgtggcagacatggcccccggctacccgtacctgttgtaggatcttcacgacaagggcgaggtgggcctccgatccagacggatatgcacagggcggagctgaatactgatgcacgcggggctggccttccgccagctggtggtcatcatccagtacatcgacgagggctggccggacatcgggcaggtcgtggacaaggaccacccctatgcccgcgcgcaggagcagttgtaggccagggacagatgccgg

SEQ ID NO: 90139 - DNA, 374 bp, Zea mays
  Clone ID: MRT4577_182209C.1
agaaatgtactttattatttctgggacgaccgaaacattaaggaaaaagcttcacactggcacctctggctgatgggcgacactaaagagggcaccaccgatgaacgagtgaacgaacaacacccctataggagccaaggcagggggtccattacattattactacagcacatagtaagacggagccatagacaccgacagcagctgcgttgaacgggcacgaacctggctgctgcagcatggaaaccggacatagacgacagatgttgctctacctgggccgccatcagtgccgcaagctagccctgcagctgctgctgcatgaaggactgaaggaccaaaccgtatgtcgcctggaaccgctaactcgtggg

SEQ ID NO: 90140 - DNA, 225 bp, Zea mays
  Clone ID: MRT4577_182210C.1
ctctcttcctagctagacagtatccaccactaagagagtcttgagggattgatggacgcatgcatcttcaattcctgtgtattgtattattacagattgtacctgtagtaatacaatacacaggaattgaagatgcatgcgtccatcaatcctagtgtattgtattactacaggtacaatctgtaatgttacacactgatgatgaattgatgatggctgatgagc

SEQ ID NO: 90141 - DNA, 812 bp, Zea mays
  unsure (1)..(812): unsure at all n locations
  Clone ID: MRT4577_182211C.1
aacacaaacaggagtagtactactactccagtctccggcgagtacataccctacaggtccaacaaggttcatagacgacctgtagcgccaatatggctggcgtctccagcaatgccattgcccttgtggcactcctctccgtgctcttcacgggcgtccgttctgcggtcaactacgacaccgccgtcgctagatcctacaactctggctggctccccgccaaggccacctggtacggggcgcccaacggcgccggccccgacgacaacggtggtgcttgcggcttcaagaacgtgaaccagtacccaatctcctccatgggggcatgcggtaacgagcctattttcgccggcggcgagggctgtggcatgtgctacgagattaagtgcgactactccaacaacccttcctgctccggccagccgaggaggatcgtcatcaccgacatgaactactaccccgtggccaggtaccacctcgacctcagtggcaccgcattcggctccatggccaggtacggcctcaacgaccggctccgccacgccggcatcatcgacatgcagttcaggagggtgccctgcaacttcccgggtatgaaggtgaccttccacgtccagcgtggctccaaccctaactatctcgcggtgctcgtggagtacgcgaacgtggacgggaccgtggtgcggatggagctcatgcagaccatcaacggncgcccgacgggctactatcaggatatgcgccgctcgtggggctcccatctggcggatggacacaaccgcccgctgcaggggncattcgccatccgcatc

SEQ ID NO: 90142 - DNA, 119 bp, Zea mays
  Clone ID: MRT4577_182212C.1
ccaccctcctcccgttaactccggtctatattataacccgaacagatacacgtgagcctgtcaacttatgtcgactacctacctaataaatcctcatgatctaacactctacaatgatc

SEQ ID NO: 90143 - DNA, 290 bp, Zea mays
  Clone ID: MRT4577_182213C.1
ttcggtccgaggactcagactcaaggatcgcgggactatggatccagaaagtgaatcgccgttggcgatgcattcgatgagctgaacattcctagtatgggaggtgcatgtgtgtattgagctaaagtccgatgtcggtcttatggcagatggtgcggtactgctggcacttggactactgccatgcttgcgcgatcatttgaacaatgtacgacatcagcacaatgctctggaacgccagggtattcggtctagatgatacacgcttacatactcgtgcgtgcaagctt

SEQ ID NO: 90144 - DNA, 513 bp, Zea mays
  Clone ID: MRT4577_182214C.1
attcatcgtatataaaggagggcttgggaaaaaaaaaaaacggttttcgaattttttacaaaggccccaggcttatgctgctttaggagggagggtttttttgcccctttacttcccatccttaaataaaaaattatgggcctgcatgcccctcacgtgggaaagtccatcccccgggtttccccgctcaaacacaggtggtgccccctttccaaatccgatacccagggggacaaccccaaatttggagtctttgccccggcgcttttttttttttaaaaaagtaccccccccccgggcccctgttgcccccaaagggggtccaagggcaaccccccccccttttacatttactttaaaacggcccccccccaacttgttgccgcaataaacaaactggggggggaaggcctctttcagttcaaacaaatcaatggcgccaatttcaaggcctgcaaacttcacagcagcaggaatggccacagcaggaccaacccccataacaggtggatc

SEQ ID NO: 90145 - DNA, 335 bp, Zea mays
  Clone ID: MRT4577_182215C.1
tccacgcgtctccccctattctccgcccgtctactccatcgctcccctggcgcaaacctcgtaaccctctgccaatgtctacgaccgacatcaacacctacccatcatacttatctcatcatgtcccctaaccagactatcatctcataaccccaccttagcgtaccatgtaatccctatagtttagtatcccactcgtacttccgcacatctactctattccgatcctacgacctactctaacattcttcgttccaagcaacgtctgtgatcccctgacacactattatctcaaacacttactacttaccctagtgcacccatcatcaaacata

SEQ ID NO: 90146 - DNA, 262 bp, Zea mays
  Clone ID: MRT4577_182216C.1
cccacgcgtccgcccacgcgtccgttagcactggcgctgatgtcgatggacgaggcgctgggtgcatctgccgctgacgcggtggtgacattgctgtgggtgctgcgcgtctccacgctgggggcctcgacgacggcggtgacgttctacctgaagctgcagggcgtgcacttctcactcctggtcacagactgcctaatatccatgctgctgttcaagttcaatatactttgagacgcaatcctgggagctagcttaaacc

SEQ ID NO: 90147 - DNA, 263 bp, Zea mays
  unsure (1)..(263): unsure at all n locations
  Clone ID: MRT4577_182217C.1
ctaaaagcaagccgcccgcacgcacgtacccgtccttaattccccgacccacccactcgtgatacctatcttccgcccttttttttggctgggaacaaaacaaaatcgggtggtgccttttacaaccatcatttttcaattatcctataaaatcaaaacatcctgaaatcatatctaatatgtccacatttcacccaccatgtacattnttaactcccaaaaaaaaagcctattccctcataccccgttcaatcctaacaact

SEQ ID NO: 90148 - DNA, 326 bp, Zea mays
  Clone ID: MRT4577_182218C.1
acgtaaagagaaccttctccaccgatcttgctcgtccaaccttctccatcgtatcaccgtaggtttcgctccccgccgccgacgccatgatgccgaagaagcagctagcccgtcatgggccctgcttctacacaggccgcccctggagcgccgtctcactggggcagcatgccgtcgactatggtcgctcaatatcaagacactccaccatcgacctatcacatgatgccttcaacacacacgttcttcagagagactgcttccagcaagcatgtccccagagccatcttcgtcgaccttgagcccactgtcatggatgaggttcg

SEQ ID NO: 90149 - DNA, 279 bp, Zea mays
  Clone ID: MRT4577_182219C.1
ctcgcaacatagaaagcacaatagtgtaccaacaatggtagtcaaaacatctagcctgcgtaagcttcttggtcattctgcaagtgctgctacggcgaccattatcccgcaatgctcgcaagctcctatagcttcccttgttgccccgtacctctaaacagcggtgacctccgtatgtcgaaaacccaaacgttcaaccctacaggatccaacacgaccatcgagacagcatctcaactttatgacccttgatcctgcaccaatgattagagctcttac

SEQ ID NO: 90150 - DNA, 526 bp, Zea mays
  Clone ID: MRT4577_18221C.1
ccaggtaccaaaatttttcctttttttatccgaagggttggaaaaagggttcaaagaaataaccttgaacctttttaaattttttggaagtttggaaaaaattgctacctcaggtgaccttcctaataaaaaggtttaaaaaatttactaaacctaataaaaaccacaccaaagttaaacccggaaaaacaaccgggaataaacccttactctgggatttcctcaccagaattaccccgactaagaaaagacttctaaaggttttcctgatttgggaattcaaggaaaggtttaaccagaaacaacttaaaaacctttggaaaaaaaagctaactaagtggagcccttccttcaatttttttacccccaaataaatttttataaaacttttttaccttcgggttaatttcacccatctattaattccaccaccttttttttccttgaggttaacacccgacctaaggtagcaggcaaggaatcaatgctcacttttccgggatttaaacgggaatccgaaccgttt

SEQ ID NO: 90151 - DNA, 908 bp, Zea mays
  Clone ID: MRT4577_182220C.1
ccggccgggatgttttccctcctatctgtttgtcgcatctggaatcttcttcctcctcggcaatggctaacgatggtggaggtgcgccaccgtcctagggtcgttacaaccggccaggcggccactccatcttccagtcatggacagcacctcccagccatctcccttccccatccgacgccctgctccatgggcacctcctccctccggccacctgctagcgagcgccccttccctttccagtttggtcacggacacacaggtccgaccctcctctgctctctgctcccttggaccctcgatgcccctgctccactccggtcgtcggcgcccagaagccatggacgagcctccggcgtgcatcgagctccccgcggtctggctccccttccttactgcgagccagcgactcctctaggccggtcttcatcctattgcgttggacgcggctcctcttccccggccaccatcgaacgtccgcacgtgccttggttctagcgcagtgagttacccagcgcgatgcactactttaacttgccgtggatgagcagcagcgtcgatccgatctgcgcagccgtgctgatccacagcagcaaccccgcagcaaccccgcatcacacgtcctctgactcgatctgcagccccgaacacgatgtcgaaaaccctgcccttatcgccgtcgcgccttgtgcatcgcttgatcgatggaagcctcactcgtgaacaacatgcgcgactcagtccattcggccagattgtttgatgtatgcaatttatagtttgtctaattatgttttggtccatacggtgtatattggtgtttgaatatgtatgtgtataaaatattttggttatatgcattggtagggtcgtatttgcgatttgaaaaaaaaaaaaaaaaagcggcc

SEQ ID NO: 90152 - DNA, 281 bp, Zea mays
  Clone ID: MRT4577_182221C.1
gggcaacctgctaaacaggatccagtgatgacagcagctctgacagctcctcagacgatgaagcttccaaaaaaccaattgccggttcaaaaaagccgcgtgcgagtagtaccaccagtgatcataccagtgccactgacgacactagctctgatgacgaacgcaccaacgaacgcgcacggtcctttcgaagaatcccactgcccgttcacaacaacctgtcacagcagtcactcatcgttcacaacaggttaaccctgatagcaacacctctgacacta

SEQ ID NO: 90153 - DNA, 518 bp, Zea mays
  unsure (1)..(518): unsure at all n locations
  Clone ID: MRT4577_182222C.1
caggcaaggaacggagnngcncnngaacgacggaaccanggcggcgacaagggcagngacgacganggngacgaggagcaaggagagcnggncgncanagcagggcccggcggnggcanncccnnggaagccacgaggnggcaggagcggcggccncgagnncccncgccgggcgangnncgccagcgncggccncaacgngngcccgggcgncccagcggggcgcgacccgcgggagcccgancccaaggncgnccgggcggccgacaacggcgacancgcgcgccagcnnggcgccgccgnncccgggcagcaggccgccggggaggcggaggaagaggcagcgaagaggaggaagcagaagggcggcggcagcaagaagcagcagcagcggggcgaacngagcccgaggaagggcagggncaagaacgccaacccgcaccggcggcgccgggnnagcggcgccancgccggcgccgngaccaggacgcccgcggcgccggcggagacgaaccgga

SEQ ID NO: 90154 - DNA, 935 bp, Zea mays
  Clone ID: MRT4577_182223C.1
ccggccgggcagaagccaaagcgcgcacaattcggcacgaggcgtctcctgaatctcagaatcttaccccctcctttgctccatccctctcctctcttcctcggcgacctccacgccggtctagagccggcagcgctgcggcggagcaccaaccgagctccgatcccaccccgctcccaaccgcgcggccctgtccatggcgcgcgcggtgcggcggcgagcccccatgcattcccgccgccggagtgcggcctgctaagcgacgaccattcttctccgcgcgccctcctccctctctccttctcctaaatccactcccccacgtgtcttcatgggctctccggcctacaccgcctccccctgcacggggtctgccctcttctccaacaccagagcgccgccgccgccaccgcggcttcttatcagatggggcccggggccgccgtcggccgtggggaggcacggaggccgcgtagctccgtcgcaggagaggcgcggccccgccccgtcgcaggagaggcgccgacccgccccgtctcaggagaggcgccgacccgctccgtctcaggagaggcgccgcccctcggagtcttcgtcccagtctcaccagctccaggaacggaagcggcactggaaggcgggggagttcccggggaccgctgccgatggaggaggtggcggcggaaggcgccccgcactagggaaccggcattcgaaggccggggagtttcccgggacggacggcgtccgcgccgcccccgcgccgccgcaggggaagcggcactggaaggccggcgagtttccgggcgccgccgccgcccccggttcggggacgccgaggactcccctcaagaacgtcaagaagcggctggacgcccgcgcggacgctaaggcgtgggcgtgcaccgtcaccgaggccctcgcggaccgcgtca

SEQ ID NO: 90155 - DNA, 490 bp, Zea mays
  Clone ID: MRT4577_182224C.1
cctcgaggccggccgggaacctcgctaccaacgagagatgtggggcgagcaggcactggctttatcggctggacgccgcagcgagaaccttcctcgacacccggctgagagaaacctacgcctcagaacgggcggatcatgcgccggctgtggacggagtgagcgaacacgagacgcctggtcccaacaacgagcgaacatctccagctgctctgatggggagctgcgcgtcgctctctaccggcggccatactacctggatctgtcggtgccgcggctactatgggcaagacccggaaggggtttggaatgacgatgagcagctagagcgcccagtggactcttgggagccaaacctggacaagaatgacggccgagcgatcatccgaaatggagaagaggaatctgaagaacctcctcctcctctgcagcatcacagtgaccagcgccggcatgagcgtcccctacagtgccatcttctccactgccg

SEQ ID NO: 90156 - DNA, 493 bp, Zea mays
  Clone ID: MRT4577_182225C.1
ccggccgggacggccaccactccccgcttcttctctttcttctcgatgatcactacttccagctgctacgacctcaccggccccggcttagaggaccgtctatctccctgcaccaactcctacatgcctactcttcaggagacttgctgtccggtacactacattgttaccagagagacacatcgcccctccgccgattgggcgtgccgccactggctagatggtgatcgactaccctagagcaccgtctacgcttggatgcttcatcgtctgtcggcgtggtgttgtccgtgtttcagatgatcacgatggcccccagcgaggacccgtatctggactccgaccgcatcgagtcccccggatacagagccgtgtggtatacagtgcctccaggtaatactgatcagcagctagaatgctgaacgcgacatcactggcttgtcttccgctcacttcggtgggccttgaatctggcactgcaaccttacgctca

SEQ ID NO: 90157 - DNA, 214 bp, Zea mays
  Clone ID: MRT4577_182226C.1
tcaaaactatataattcgtacattattttgctttaccaaaaaaatcaattaaccctaccacctctaatttaccccaactacccatcatttaattccaactccaaacctcaagaccaactaactttccctaaactaaccctcattaccccttgccttaatcaccaccataccttttccctttttaaaatttttacccccccacaattccacacac

SEQ ID NO: 90158 - DNA, 304 bp, Zea mays
  Clone ID: MRT4577_182227C.1
atattcagaaacacaacacacgacaagcgatacccactacctaccacctatcgacaccgggatcctatacattattgctctttttgctctttgtgctatcacagcacacgacaacatcattcatcattgctcactggttactagctccaatatccaacatttcataccacctgctactaaaatgttcaatgaacacccaacagtgaaagcctctaggctacaacatacaactaccgctagcgtctaacagcatacaactgcccaatggccacatcaatcatcgatacatgtcacatttcaaacc

SEQ ID NO: 90159 - DNA, 648 bp, Zea mays
  unsure (1)..(648): unsure at all n locations
  Clone ID: MRT4577_182228C.1
gnaagtttaaaaacgcacggggagcttggagacttcacgacaaatcgacgatcgccgcttctcttggccattgtagagggagagagagagcgcgagcgacctaggtcagtcggtttcggttttgggcgtcagcttcagctatccgcgaccgcgacgatgggtctgcgcgtacaggctcatcgacgtgccgatgagcaactgcataaacagcgggatcaacaaggtctacatcctcacgcagttcaactcgcaatccctcaatcgccacctctccagagcctacgatttcagcaatggcgtggccatcggagacggattcgtcgaggttctagcagcaacccagaggcctggaacggaggggaaaaggtggtttcagggtactgctgatgcagttcggcagttcgactggcttttcgatgatgcaaaatctaaagacattgaagatgtgctgattctttctggtgaccatctctaccgtatggactacatggactttgttcagagtcatcggcaaagaggtgcaggcatcagcatctgttgtttgccaattgatggcagccgggcatctgattttggcctaatgaagatagacgacactggaagggtaatttcattcagtgagaaaccaaaagggnaccaattaaaggc

SEQ ID NO: 90160 - DNA, 207 bp, Zea mays
  Clone ID: MRT4577_182229C.1
ccatccggagggggatattttggcatgttcttgaccggaacccccgcagcagctatggcaaagacgggcacccccaggtgctggggatgctggccaaggaagacatcctgatccaggcgcacgagggccaggttgcggacttccgcgagcagcacgaccacctgttggaagaaggggagttccatacagggcgaagcatccagagcc

SEQ ID NO: 90161 - DNA, 157 bp, Zea mays
  Clone ID: MRT4577_18222C.1
ttggggcggccgccctccgttttttctaggtgggtgtctattgtgaatgaaacgggccaacacgtcctgacatccgctgcaacgaactccgacggttagctagcaaagtaaactccacaccgtaggaaaaaagaagacccaacaaggggggtttttt

SEQ ID NO: 90162 - DNA, 1991 bp, Zea mays
  Clone ID: MRT4577_182230C.1
cattgggtacctcgaggccggccgggacgacaaatcgacgatcgccgcttctcttggccattgtagagggagagagagagcgcgagcgacctaggtcagtcggtttcggttttgggcgtcagcttcagctatccgcgaccgcgacgatgggtctgcgcgtggccgccaccgcgccagctccggccggcgtgcgcgtgctcggcaggggcgccgcgcgcgtgacgccgcgaccgtgggcggctgtcggcggcaggagacgcttctccgtgcggatgtccgtcgcgaccaccgaggccaccaccaccatcgccgtgggcgcctcggaggaccaggcgctggaggctaggaactccaagacggtggtggcggtcatcctcggcggtggcgccgggaccaggctcttcccgcttaccagacgcagggccaagcccgcggtgccaattggcggcgcgtacaggctcatcgacgtgccgatgagcaactgcataaacagcgggatcaacaaggtctacatcctcacgcagttcaactcgcaatccctcaatcgccacctctccagagcctacgatttcagcaatggcgtggccatcggagacggattcgtcgaggttctagcagcaacccagaggcctggaacggaggggaaaaggtggtttcagggtactgctgatgcagttcggcagttcgactggcttttcgatgatgcaaaatctaaagacattgaagatgtgctgattctttctggtgaccatctctaccgtatggactacatggactttgttcagagtcatcggcaaagaggtgcaggcatcagcatctgttgtttgccaattgatggcagccgggcatctgattttggcctaatgaagatagacgacactggaagggtaatttcattcagtgagaaaccaaaaggagacgaattaaaggcaatgcaagttgacaccacagtgcttggcttatcaaaggaggaagcagaaaacaaaccttatatagcttcaatggggatctatatttttaagaaagacatactcctaaaccttctaagatggcgttttcccactgcaaatgattttggttctgaaataattcctgcttcagcaaaagaaatcgatgtaaaggcttatcttttcaatgattactgggaagatattggaactattaagtccttctttgaggcaaaccttgctcttgctgaacagcctccaaggttcagtttctacgatgctgacaaaccaatgtatacatcacggagaaacctaccaccatctatggtcaacaatagtaagatcactgattcaatcatttcccacggatgtttcttggataactgcaggatagaacatagtgttgttggagttcgttctcggataggctccaatgtgcacctcaaggatactgtaatgcttggcgctgattattatgaaactgccgtggaaagaggagagctgcttgcagaaggaaaagttcctattgggattggagagaatacaacgattcaaaagtgtatcatagacaagaatgcgaggatagggaagaaagtggtaatctccaactctgaaggtgtagatgaagctgatagaacttccgaaggcttctacattcgatctggcatcactgtcgtactgaagaacgcgataattgctgatggattggtcatatgagctgaaaaggtctcacaggacgggtatttgccgcacaaaatatcaataggagttctttgttagttttacaataagatgctgtatagcagtcaacaggttattcttgtctatacaagatacctttgtctacaaatcttgtctcaccatgttgtattcgactcaaacaatgttgcagtcatggacattgtccgtttcaaattttcttccttgcacatttacacaaaccttttcaatttttatttcttgctaaacaataaaagctgttgttctaatcagtatgcaacctagtttttttattttattttctttaacttactattaaatggg

SEQ ID NO: 90163 - DNA, 665 bp, Zea mays
  Clone ID: MRT4577_182231C.1
ttctactgtcgcgcaccacagatatagactagtgtattcccacgccaattgtgtactatcatgctagctaccattctagctcgatcgtgagcacgcagccatcatgtcgcgaggagaagcaccaccacttcttcaaccaccactagaaggattatgagcaggccgccggcgagtacggttactctgagaccgaagtggtctccgccaccggggatggtcagtacgagaggtacgagatggaggataatgagcacaagcacaatgcagcacctgcggcgagtgccggtgccatcgccgacggtgccttcgcactctacgattaatcacgagcgcgatagatggacccctagtacgcgtacatgctcaagatctcggaggaggtctctgtcgtggcgtgcgttcccaccgatagctacgattttcacttacaccatgagacgaacagtgactgatcgttatcacattggctgagcggaaagatcagacaacattacttctgctgctgatggcactgcctggtcgtggcgcaagcgagatagctagatccgttgcacacaaccacacatctggttaattctgtgactgcatgcgtgtgtaatttgatggctcacattaatgagtccctctgcgcaccttggcacctgcttgattgtggagatcgagag

SEQ ID NO: 90164 - DNA, 435 bp, Zea mays
  Clone ID: MRT4577_182232C.1
gcgaagtcacatagatcgctgctcctgttttctgctgcggtgcggcgggtgacctccctcgtccagcgagatctgtctggttgcacatctatctaacgaaatgcggcagatctgctgcatcgaggctgtctatgtccgtgacgcaaccatggacgcgattgactttaagggctcacacattaatgcggcctgccttgacatcttcaagacctggattgacgcctgaaacagagccaccctggcaatctacgaccctggtctcgaagatgtcgcgacttactgcaccgcgcacgacacctctacttcagcactgatgtggagaaggctctcgctgaagctgacattatcattgcctcgacgaccaccaccgccaggaactgcgggcttgcatctgcataagctgacaactctccgtagtggcatagtggtggccgc

SEQ ID NO: 90165 - DNA, 579 bp, Zea mays
  Clone ID: MRT4577_182233C.1
ctcctgctggacccgggccgcagtcgatttcgaactagtggatccctttttttgcaggaattcggcacgaggaggtcgtgggacgtggaacctcttaatctgagcatccggagctccaggaagggaaaatttcaaggcagatagaattctatatataccatttctttggaaccttcagccctcaagattccaacatcatgacctcagtttcaacacagttgtccttagtcctcatgtcactgcttttggtgctgcctgttgtggaagcagtagaagccggtgatgcaatcgcccttttgttaggtgtggttctcagcattacaggcatttgtgcctgcttgggggtatatgcacgaaaaagaaatggacagatgtgactttgaaaggcctactgagtcaaacctcaccctgaaaacctttgcgctttagaggctaaacctgagatttggtgtgtgaaaggttccaagaatcagtaaataaggtagtttaacattttcattgtttccatgaaatggcaacaaacatacatttataaattgaaaaagaaatgttttttttacacaaataatgcacagaaaa

SEQ ID NO: 90166 - DNA, 189 bp, Zea mays
  Clone ID: MRT4577_182234C.1
cccgttcacccactcgtccgcccacatacgaccttccctacctatctactcacagtggttataactcatctcttattgctcgcgcggtttcgagcaccgtcatcccccatatcggttagcaccgatgagccaccggctttcatacaggcggtcatcgaccattctacctcgttcgtacctggacgcacg

SEQ ID NO: 90167 - DNA, 192 bp, Zea mays
  Clone ID: MRT4577_182235C.1
gcgggctctccttctcaagttagcagtcaaggcggccgggccgaccgcttctccttagccgccttccgtgcccaaggctaggccaacagttttggaggtggtaatgggccgaccaggtctaagccaaccccactgtggcttgataagctaggtggccagttccacctgagctgcagcttctcagaaggtgta

SEQ ID NO: 90168 - DNA, 137 bp, Zea mays
  Clone ID: MRT4577_182236C.1
ccgcccacccttccgaaattttgccttggcggccgccactgccgattcaagttttgcaaacggttccttcttctttgcggttcggattggccccaccaaacaaaacgggccccaattcaaccggcggcaaggccccc

SEQ ID NO: 90169 - DNA, 245 bp, Zea mays
  Clone ID: MRT4577_182237C.1
tcggacactcgtccggaagattcccgtttaaaaactgcaatggcacaaatgcttgagccatctgtgtcttaaagagacttatttatatcatgcaaaagcatgtgactcgaaacttttatagactcgaattgctttctgccttaatgcaactgtataattgaacttatgaacgaagatcatgcagactctgaagctttgttaccttataatggacattaaaccgtattctattccacaagaaataa

SEQ ID NO: 90170 - DNA, 422 bp, Zea mays
  Clone ID: MRT4577_182238C.1
ggaggggatccaatcccgtgtgctaccaaccccaaccccaaacccaaacccaaaccgatgagattagagcatcgctcgcaactttttaggaactcgatgtggtgtgcatcctatttaggaatgtgtactgaaaccatggctctacgcctgtcacgggcaaaacccaccttctagaatctagattagggttacaacttataagtgcttcaagtgtgtgtcggggacctttttggaaggagcgtgtctttgcaaggagtcgaattagctcctggtgttgatcctgaagctctggaagttgctaaggattgtctggagtccatttttagtgttaactcaacagccactggtgacgcaatacaaccaggactgttgtttgagctatttgcttctctcgaagcaaatgaaagagaccaggcaagagc

SEQ ID NO: 90171 - DNA, 660 bp, Zea mays
  Clone ID: MRT4577_182239C.1
cgggatatatgtctaatacagctgagatctggagtgccctggggactccggcgcgagctgctgctcgcattctgctagccccgcgctacttgatcaatggcttttcgcgcctccgtgagtggaacgacaatgcgtgggcgcgaacacggtacgggccgtcgtatcgctaccgtctgtggctgctgtttgatgcgcgagatctggaggtgctggagcatataatcaatgagggtactgataaggaggtacttgagctgcgagaagcaaagttggagcagtttaggcttgtggctttggttggcgcattgctagcaacattagcactccaggcaatgtcgctgcctcagctttctgatacgacgtttattgttcgttcttgctttacacaaggcactatgctctccctactcgctacattcttcacctgcattcagcaacgcgaactaggcttcgttcgcaccgcgtcttcactgcgtatatggctttccaacggcgtccagtatcgcgattcccgtgagcatctcgtatggcagagttcgcttgcttctctaacgctaatggaggcgccttatgagctgatctcgctggctgttactaacttcgtatgcggtatgtcggcatatatgtggagcgcttggaaggataatctgccagtgcaaa

SEQ ID NO: 90172 - DNA, 320 bp, Zea mays
  Clone ID: MRT4577_18223C.1
ttttggtgggtgtatgatccaaagaatgtgtataaatacatgatgcacgttacaatgtgactgggcgcctggggccatatacacgttgcaaaagaagaggaacatgcgtttctaagaagttcacggatacctgcttcgcgccaccgaactcccaagacatagcgagaacctgccatgaagcgcccttgcggtgattgttgggccatgacccaaacgtcagaacactagctgtgaggtcctcacacatttgctccacgcgtggaaaacagcgcgtgaacttcgtgcaccagacacggtagctatttttaaaggacaacttc

SEQ ID NO: 90173 - DNA, 340 bp, Zea mays
  Clone ID: MRT4577_182240C.1
cccccccaattcagtttttgcttacgattttaaatttggaccgcacaggaacactcccaggcacagggactagtgttcacatactagccatgacgctaaacttttttggggcacacctaaccaaccactattatcctgtagacagattcaccgatgcacaccactactcttgtgtgctacaaccctcagactatccttgaacagagtcccacctatacaatcttcggcgacagctttgttaatacgaacaatggcccacctgtcttctgagctgacggcgaggcaaactttgctttcccccccaacaagaggaaaatttttagccccaaaaccttttcca

SEQ ID NO: 90174 - DNA, 391 bp, Zea mays
  Clone ID: MRT4577_182241C.1
cttatccccactcccgggtctccagcattcctattctttacccgtacgcccgtgccgtcggcgcgaattaccttcctctagcgagccaagatgaatgctgaaaagctcaagaagatggcaggtgctgtgctcaccgcagggaaaggtagcgtgcgcaggaagaagacagcagtgcacaggactacagccaccgatgacatacggctcctgagcaccttgaaaagaataggagtgaacagcattcctggtattgaagagggcaacatctctaaggatgatgatgttattcagtttgcaaatactagagtgcatgcgacaattggtgctaatacatgggtggtcagaggaactccacagacaaagaagctgccagatctgcttacgtcgatta

SEQ ID NO: 90175 - DNA, 361 bp, Zea mays
  Clone ID: MRT4577_182242C.1
gacttggttgacggccaccactgctacctcgcgtactggtttattgtaacgcgcacgcttacatacactaacagctagtttgagggtaggccggggtctctgcagcactccattacctgatggtgccatgtaattgtttctttttctaacaaacccttaccttctgtgtcgggcaccgctccacgatccctgcttgctgaactggataagtggttacagggcatgcggggcatagtgggaaatgcggccgggcgatctagagtgcaccggggcctgcagcgtgcagaaccgtctctaaggtgtggggtttcattggtggcggtgaggaagcacatttgtctgttttggacgccattgtgaa

SEQ ID NO: 90176 - DNA, 505 bp, Zea mays
  Clone ID: MRT4577_182243C.1
gcgttctttagcactaaccgccaatcatcgtgccgagcgcgtcacgagagcgtagcataccatcccgaagaggaagacctccgtggacgccgtggggacacatgacgaagagacacctgctactgaaagcatgtggggcacgccctggcctccttgcacggagtgataggccgggcctgtaggaaggacatcaccacaaagattctccacagcggcacagacaactgaagatccaacacggtggttcaaggctcccttgggttcatcttctaaatccctatgaagggcagcgagaactgtactacagcccactgctgttaatggcactcaccttgacatgctggacacttatgccacacttgctggatcaactggacggaaagcgccgttgactggcctcatatgtcagaagcggaataacgcctaccttgaactcacttggaggccagcttaatatactacatcactctctaaaggtgatggtgaaagcggagtagcttgcagc

SEQ ID NO: 90177 - DNA, 394 bp, Zea mays
  unsure (1)..(394): unsure at all n locations
  Clone ID: MRT4577_182244C.1
gaagaaacccaaacaatctacgtttttcccatttcgtaaaacagagtatagtagtttacatatgcatacaagactacactactatactccgttgtattgtattctttgtacttcacattcactacatgtctacatgcagtagcactagtagccgagtacaggagagagtgtatgaagaggcgtgcgacggtgcgagacagatgggcaccggccgcgccgcgtgctaaaaaaaaaaaccctccaacgaatcaagaaatttgcattcctagctaagctaaaaaaacacctaggatccagtgtatacagcgtgtgtcgtgtgtgtgtgtgtgtgtntntaactgnnnnntatattgngcntntgagtgnaaaggggagcatgtacgctacgggcgta

SEQ ID NO: 90178 - DNA, 396 bp, Zea mays
  Clone ID: MRT4577_182245C.1
gcttgggcggggggcttataatttcgaattgctcatagcgagaggcgcggtttattacacaatgggcccggatgatttacaagggggggttacggataaacgcagcctccgaattttgaaagaggaatggaactcacacgtagcatagctgagggaacctttgcaacagccaacgaatccatccggttcctgaccaggtataataaaggaaccagcccacctgggcttctttaaaacctactcttggccgggttctccctggtgctcacccggggcgcgatggaagccaccgcacccccgttgagggggcccacccttatcacccagggcgcaccccacacctggtgcatggggggaactacggcggcccctgggttccgttcggggccgatgccg

SEQ ID NO: 90179 - DNA, 321 bp, Zea mays
  Clone ID: MRT4577_182246C.1
ccggccgtgcatcccacccctcgcccaatgcgtagttgtatctgcatctccaacaccaccagcagaggttccagttagttttttttagattagaaaaatcgagtccaacagactcgccgcactgctattatttttttttaacgagggacctatggatggactgctctttgtccgtgttgtgccgtccaagtttgccttcggatagtaaaaccagcaatctggtcacgagatctcgcaagccttttcatgtttgtgggaatggtgtaaaaaaaaaaaaaaaaaaaaaaaaaacagaaaaaaaaaaaaaaaaaatttgcggcc

SEQ ID NO: 90180 - DNA, 2379 bp, Zea mays
  unsure (1)..(2379): unsure at all n locations
  Clone ID: MRT4577_182247C.1
ttttggctttcggtactaggtgtatttgaatggtctggtaacaacccggtgccaccagaagtatggctactgccatatctcctcccatttcacccagggaggatgtggtgtcattgtcgaatggtgtatttgccaatgtgctacatttatgggaagaggtttgttggccgaatcacaccacttctgttggaattaaggaaggaacttttcaaagacccttacagcaagattgattgggacaaggcccgtaacctatgtgccaaggaagatctgtactacccacacccattcgttcaagatgtgttatgggccactctccataaattcgttgaaccagttatgatgcattggcctggcagcaaattgagggagaaagctctggaaacagtcatgcaacatgttcattatgaagatgagaacactcgttatatttgcattggtcctgtaaacaaggtattgaatatgcttgcttgctggattgaagatccaaactcggaggccttcaaacttcatatcccacgagtctatgattacttgtggcttgctgaagatggcatgaagatgcagggttataatggcagccaactttgggatacagctttcacagttcaagccattgtggctaccaaccttattgaagagtttggtcctacccttaaactagcacacaactatatcaagaattcacaggttcttgatgactgccctggtgatctgaatgactggtaccgccacacatctaaaggtgcatggccattctcaactgctgatcatggttggcctatatctgattgcactgctgaaggactaaaggtgaatgcagtcatcagcattaccaataaggaaatttactttagaaggttaaattgtcttttgagatctaggatcctttgttctttcagcatctctaattcttcccacataaactatgagtaaagtgctctcatagctaacaaagtttagtttgttccttcacatttatgttccagcattctgaggagagggatttgtgggtgctggctggggccaagaatttggatcttctaacagcccctataccagggttgtaggtgttctgttgtcagctctctagctatggactgttttttgtattttcgtttttggccaccgtgaggtgccttgtttttgtacctgtctcgtccattttggaccttttatcttcttaatataatcatgtgcaactctcttgcgcgttcgagaaaaaaaatgttccaacattcttgactgtatagtgtctggcacattgtcataatttcataattatttgttttaataaatagtaattgcttattttcttttactccaggcctcattattgttatcaaggatctctcccaaaattgttggtgaaccgatggaagctaatagattttatgatgctgtcagttgtctgatgtcttatatgaatgataatggcggcttcgcgacatatgaactcacaagatcttatccctggttggagctgatcaatcctgctgagacctttggggatattgtgattgattacccgtatgttgaatgtacatcagcagcaattcaggccctgacatcattcaaaaaactataccctgggcaccgcaggaaagaggtggataactgtatcagcaaagcttccaatttcatcgagagtattcagaaaagcgatggttcatggtatggctcttgggccgtttgtttcacatacggcacttggtttggtgtgaagggactaattgctgctggtagaacatttgagaacagtcctgcaattagaaaggcatgcgactttctgttgtcaaaagaacttccttccggtggttggggagaaagctatttgtcatctcaagaccaggtttacaccaatctcaaaggcaaccggcctcatgcagtgaacactagttgggccatgctggcgctgattgatgcaggccaggccgagagagatccaacgcctctacaccgagcagcaaaggttttgatcaacttgcaatcacatgatggagaatttcctcagcaagagatcataggagtgttcaacaagaactgcatgataagctactcccagtacaggaacatcttcccgatttgggctctgggtgagtaccggtgccgagtcttgggggctggcaagtcttggcggtgaacgggaggtgtgcgtgtgtgtgtgtcatggatcggcttttgtgagtagccatgtggaagttggaataatatagctacgttacgttcagggggttgcgctactagtggtcctagtaataatagtgatggtgatagcaatgtactcctcattattacaatctcaaagtggttcatgccattgccctgcacttctcataaaaaaaaaaaaaaaaaaaaaaaaaaaaacncgaggggggg

SEQ ID NO: 90181 - DNA, 332 bp, Zea mays
  Clone ID: MRT4577_182248C.1
gaaaaattactggctcactgccaatttcctttcaaaaaaaaaaaaaaaaaaaaaaaaaaaaaaaaaaaaaaaaaaaaaaaaaaaataggggcgccctcaactgtgggggccttcgactaccgggaaatatatttccggcccttaacttctagcctttccctcctgccttataagatttccctttaaccgtgtgggttaaaaacgtgcctaatttttgcttgttgcaattttttttctgaaaacattttcccctaacaattgcccacaacatataagcgttaaaccttaggtgtcaaatctggggtgctaattaaattaattagcttacatta

SEQ ID NO: 90182 - DNA, 2786 bp, Zea mays
  Clone ID: MRT4577_182249C.1
ctccactcaaatcccaaatcaaatcaactccccagcctgaactgtcctctcctggactaccctcgccatccatcaacgcccgccacagagggggatcccggcctcccggtgccgggagccaagccaagccacgcaccggccggccgcggcggatcggaacctcccccaccgctcgcccgccgcatttgaggagggcgatgtggcgcctgcggatcgcggaggggggcggggacccctggctacgcacgaagaacgcccacgtcggccgccaggtgtgggagttcgacgccgccgccgaccccgaccccgccgtcgacgccgcgcgccgcgccttcgtcgccaccaggggccacctcaagcacagcgccgacctcctcatgcgcatccagttcgccaaagaaaactcgattgagcttcaccttccaggcatcaagctcggtgagcatgaagatgtgaccgaggaagctgtgttgactacattgaaaagggcaatcagccgtttctctactctccaggcacatgatggacactggcctggggattatggtggtcctatgttccttatgccaggcttgatcataacattgtatgtgactggagcactaaacactgtcttgtcattggaacaccagaaggagatccgccggtatctttataatcaccagaatgaagatggcggctggggcttgcacattgagggtccaagcaccatgttcggctcagcactgacctatgttattttgagattgcttggagagggaccagatagtggagatggagccatggagaaaggtcgaaactggatattagaccatggtggagcaacatatataacatcgtgggggaagttttggctttcggtactaggtgtatttgaatggtctggtaacaacccggtgccaccagaagtatggctactgccatatctcctcccatttcacccagggaggatgtggtgtcattgtcgaatggtgtatttgccaatgtgctacatttatgggaagaggtttgttggccgaatcacaccacttctgttggaattaaggaaggaacttttcaaagacccttacagcaagattgattgggacaaggcccgtaacctatgtgccaaggaagatctgtactacccacacccattcgttcaagatgtgttatgggccactctccataaattcgttgaaccagttatgatgcattggcctggcagcaaattgagggagaaagctctggaaacagtcatgcaacatgttcattatgaagatgagaacactcgttatatttgcattggtcctgtaaacaaggtattgaatatgcttgcttgctggattgaagatccaaactcggaggccttcaaacttcatatcccacgagtctatgattacttgtggcttgctgaagatggcatgaagatgcagggttataatggcagccaactttgggatacagctttcacagttcaagccattgtggctaccaaccttattgaagagtttggtcctacccttaaactagcacacaactatatcaagaattcacaggttcttgatgactgccctggtgatctgaatgactggtaccgccacacatctaaaggtgcatggccattctcaactgctgatcatggttggcctatatctgattgcactgctgaaggactaaaggcctcattattgttatcaaggatctctcccaaaattgttggtgaaccgatggaagctaatagattttatgatgctgtcagttgtctgatgtcttatatgaatgataatggcggcttcgcgacatatgaactcacaagatcttatccctggttggagctgatcaatcctgctgagacctttggggatattgtgattgattacccgtatgttgaatgtacatcagcagcaattcaggccctgacatcattcaaaaaactataccctgggcaccgcaggaaagaggtggataactgtatcagcaaagcttccaatttcatcgagagtattcagaaaagcgatggttcatggtatggctcttgggccgtttgtttcacatacggcacttggtttggtgtgaagggactaattgctgctggtagaacatttgagaacagtcctgcaattagaaaggcatgcgactttctgttgtcaaaagaacttccttccggtggttggggagaaagctatttgtcatctcaagaccaggtttacaccaatctcaaaggcaaccggcctcatgcagtgaacactagttgggccatgctggcgctgattgatgcaggccaggccgagagagatccaacgcctctacaccgagcagcaaaggttttgatcaacttgcaatcacatgatggagaatttcctcagcaagagatcataggagtgttcaacaagaactgcatgataagctactcccagtacaggaacatcttcccgatttgggctctgggtgagtaccggtgccgagtcttgggggctggcaagtcttggcggtgaacgggaggtgtgcgtgtgtgtgtgtcatggatcggcttttgtgagtagccatgtggaagttggaataatatagctacgttacgttcagggggttgcgctactagtggtcctagtaataatagtgatggtgatagcaatgtactcctcattattacaatctcaaagtggttcatgccattgccctgcccatttcatatattccagtcccgccctttaaagagttccaaaaaaaaaaaaaaaaaaaaaaaaaaaaaaaaaaaaaaaaaaaaaaaaaaaaaaaaaaaaaaactcgagaaggggcgccggtac

SEQ ID NO: 90183 - DNA, 394 bp, Zea mays
  Clone ID: MRT4577_18224C.1
ggctgggccagtccgtgacggattcagatactgtttaggtgccctacctccaggcggaggggaaggaagagctactcctgcacccgccaagcccactgctctactgggcgcgcctcgacacctcatacgtgcacataggcaggtaccttgtgcccatgggcaccatcggcatggtgaacatgttggccataacccatgaccccatgctgtggactgagccaatggagattaagcccgagaggtacatgggccctgccgtcaaggacgacccgataatgggttcggatctgcggttcgcgcctttcgctttccacaggcacgagctgaccaaggacgtcactaacggcggctaccgctggattctggggcgtcaccctgctgtacgagttcaaat

SEQ ID NO: 90184 - DNA, 727 bp, Zea mays
  Clone ID: MRT4577_182250C.1
agttcttcggctcatctgcgacggccgtcgtcgcaccgtatcatcaccggacatgccgtctccgccgcggccgctcgcgtcgctatgccgagcccgtctcgtgctcttcctcgtcccggcgctcctgctgctgctcccctccacggcgcgcagcgcgggggacgaatcggcgagggcgcttagcgtcggcgaggagctcgtggccgagaccatgccgctgcgccacggccgccgggtctacaggatccacgggctgcgcccgtccgcgtggtacgaagtcaagatctcctacccggcctccataccgtcgagcttttccattcggcttgtggacgactggggcagcaagaacaggaggctgctcaacacggagaagataattttcaaggctgagagcagcagcccggtttatgttcttgtcaccgtggaacctgagggcgtggtggcgaagccaaatgtgccagagagggagcttgcgctttttaacattgtttgcgatgagcttatgctcgggattccacactttgcctggtgggctgggattgcagcgctgctctgcatcgtgctggcggcactggcaccactcgttctcccgctgcacaagcttctgagctgcgaaggcacgcagctgagcgaaagtgatgccgctaagatgtcatgactcgcgagagatgatgcaatgcaggccactgtagcgatcttctccattcctgacggttcaagcttg

SEQ ID NO: 90185 - DNA, 358 bp, Zea mays
  Clone ID: MRT4577_182251C.1
atatttttcttcttttttttttattcggggggttttttttaatcttattttgggctatcccactaattttacccccaaaaagcaaaaaacatggccaaataacccctcaccagaaaaaggccccattcttaaaaaaacaccacttcaccttaaaaaaagaggaaatgccaaccaaaaaccccaataaaaaaccctccccaacattggcaccaacccaccgcaaaaaaaaatttatccctgatgtcaaaaccccaaagtaaacccaaaaccccaaattttaacaaaacccaaggggggcccaaactaaagcgccccaagcacaaaaagctttttaacaaaacctaaaaaccccctgttg

SEQ ID NO: 90186 - DNA, 228 bp, Zea mays
  Clone ID: MRT4577_182252C.1
caaacgcgccacagctcgagactcttagagatttgatgctgcagcattaactcaaggtgtaacaggttacgtcagctgatgctgcacacaatatcttgatcaccattaaacaagacagggatagactactgtcacagttatctataactgatgtaactccattcacagatctaaagatcccactggccaacatatataacacatcttcggacgatacatttatcaaga

SEQ ID NO: 90187 - DNA, 339 bp, Zea mays
  Clone ID: MRT4577_182253C.1
cgtcctataatgtgaacaacatccatgaagatatacttttttgcacgctcatgctgctcatgacgcatgcttattttacaactagatggcgggcctatcccaatgatttcaatacgctcaacagtacgcatactaccaaaatgtgattcaacgcactttgtctgctcttcaattatgctagtgcacctcttgactgtatggttctataattttgctgtccctaagctacaaagtatttaatcttatactcccctggctatgcaagctgtggaatgtattcttttttactgcaactgaaaaatgctacccatactatagctggtctccttattactaaaa

SEQ ID NO: 90188 - DNA, 359 bp, Zea mays
  Clone ID: MRT4577_182254C.1
acttgcgtggctgcattcttattctaggacacaatgcaactacatgcctcacatgagacaattctgctatgacggataaattccccatgatttccaacatcgaccggaaggaggtgtccatgaacaggttactgttcaagcattccagcactatattcacgtacaactcaaaaactttgatgctaaaccacgccgtagacttgtacagcataagcacgacgacgccataatatggtgaccgctgccgaatttccaggcctgaacaccctcggcctgtccatagggcgcaccgacatcggcccctacggagtggtgctgcaccactcccatccgcgggcgtctgagatgatgttcgtaca

SEQ ID NO: 90189 - DNA, 484 bp, Zea mays
  Clone ID: MRT4577_182255C.1
tcggtgcccgtcggggggcaggccgcgcgggagctgcggcacaacctcgcggccggcgaggtgggcgtcaacgtccgcatgcgcgcgcgcgtccggttcgagaccggcggcgtcaggagcaggcgatactccctgcaggcgttctgctcgcccgtggtcatcgccctccctcccccgtcgtcgtttgcgcggccgttccaaagcgtgccgtgcgacgtcgccatctcgtgaggcagcacgatcgacatgcatgcatgcatgcatggggcccacgcgtccggatcgaatcactagctagctgagtgtggtgttggcgtgctgcaaaaatctaccgcttagcttcggctctgggtcaatatgatgcatggtttgttaggcttagatgtttgacttggtatacgcctacctattatacgtgacgtgtgtcttgtaaatcaagctagctccgtaatccgtatgctaccttagcttctttcgtttcatc

SEQ ID NO: 90190 - DNA, 1156 bp, Zea mays
  Clone ID: MRT4577_182256C.1
gtgctagttctaccagcgcagtcaccaaactcaccttcggaaacctgtacatccgccgggccgggccgggcagcagggagataaccgaggagggcaggtgcgacctggacaggagatacgtgagtgacttccccgtctacgacggccgcggccccgacgccagccttgtggcccgcgtgcaggggatcaccagcgaaatcgggaacgcgcaccaactgttcgtcgttgtgttcgacaccgacagctgttcgtctcgccctgcatatgcgtctctctgcctgccaggctcaagggctccacgctcgtcaccaatggcgtgataacggccgggtctgacgagtgggcgatctacggcggtaccggggtgtttgccatggcgaggggcgtcataaggagaaggtatctcgccgacagggccggcgggaacactgatgagctcaacatggatgtcttctgccggccgtttggctcacagtcacagctgcaagataagatgcaggtgcaggggcaggggcagggctctagcgtcaccaagattggactatggggtggaccgggagggtcggcacaggacatcacggcagagcggccaccgcagcgtcttcacagcgtcaccgttcgtgctggcgttgccgtcgactccatcgagttcacctatactgacagcgctgggcagaggcgcgccgctgggcgttggggtggacttggcggcaatgttcgaacgatcgaccttggcaacgccgaggatgtcagggaagtctcgggaacatacggcgcatttgaaggtgccactacgctgacctcgctcaggctcgtcaccagcagcagaacctggggcccctggggggtcgagaacgggacgcgtttctccgtcacggcgcccatcggcagcagcatcgtgggattctatgcgcgggcgggaacaaggctcgtcgacgctatcggtgtttacttgcgtcagatttaatttgaataatagcaggggagctactgctagctacgtacctgctccatcctccattatcctttatttcaattcgctcatcatcgtcgtgtgtaaattaaataaataaagctcttgtgcccatattatatatagttgtcctggccgtgccgtgtctatgtgcgtaaaaaaaaaaataaaaaaaaaaaaaaa

SEQ ID NO: 90191 - DNA, 210 bp, Zea mays
  Clone ID: MRT4577_182257C.1
ataggtgctgcatcctttcataactcctagcattcgtattaagagacggccgcacattaaaatggagctgcgaccattcagaaccactgggtcccacctcgtccaatgctactgctatgctatagggacatttgtaatgtaatggccatgtttgtccagttcaccagggcgctagggtccgatgtcctatcgcacatggatagttttgga

SEQ ID NO: 90192 - DNA, 611 bp, Zea mays
  Clone ID: MRT4577_182258C.1
ccgggccggggtgctagttctaccagcgcagttcaccaaactcaccttccgaaacctgtacatccgccgggccgggccgggcagcagggagataaccgaggagggcaggtgcgacctggacaagagatacgtgagtgacttccccgtctacgacggccgcggccccgacgccagccttgtggcccgcgtgcaggggatcaccagcgaaatcgggaacgcgcaccaactgttcgtcgttgttttcgacaccgacagctgttcgtctcgccctgcatatgcgtctctctgctgccaggctcaagggctccacgctcgtcaccaatggcgtgataacggccgggtctgacgagtgggcgatctacggcggaaccggggtgtttgccatggcgaggggcgtcataaggagaaggtatctcgccgacagggccggcgggaacactgatgagctcaacatggatgtcttctgccggccgtttggctcacagtcagagctgcaagataagatgcaggtgcaggggcagggctctagcgtcaccaagattggactatggggtggaccgggagggtcggcacaggacatcacggcggagcggccgccgaaaagaaagctc

SEQ ID NO: 90193 - DNA, 686 bp, Zea mays
  Clone ID: MRT4577_182259C.1
aaacaagctctgctctcctcccctcccctcccctcccctcccctgggtattttcatgtcatgcatgtcttccttcacttccaacctccatagatccagttcagagcgtgagcatggcagacacagaagcctccggtactgtcgtccatccttcccgttcccgccgtcgacgctcctccaaggaagtatggtattgcatcgctagccattgagatagtagcctaccttgccgtcgcctgcctgtacatctgcaactcggttcggcaggagaagctcatctccgctggctttcttctacttctcctgctcgtcttcctcctctcatctattggagttcgcacctccaggtttcgcgtcgacttcgttttcggggccaatattgtggctgtatcctcctactgcgtctggaagtttagctatacttcttgggtgaacaaaagacggtgcaatacggctactcattcagttggtagcctacgccgccatcggctgcctatacatctgcaactcctccagtaggaagatgaaagtcatctctgctgcttttcttgtgcttgttctggctgtctcccttctctcctcgattaacgacgacaatgatcgtttcggatacatcttcgtggcaaatatcgtgactatatccttgtattgcatctggaagcattaccttgcgatactggtgacact

SEQ ID NO: 90194 - DNA, 591 bp, Zea mays
  Clone ID: MRT4577_18225C.1
gtcgacccagcgtccgagacgtggctcaaaggttccaataacccatctaaatcatcgcaaactaataggctttctggtgctgaatcagcagatggaggtcctatagttgggaaagtatgaaacactttttcttaaagagcattacatagaacagattcagaagttgtttgagaaggtatgtgttatgtactcttagttgctaattcaatttatggaccctccacgttaaagcaagagcgcaaccttacatttttgttctgttgatagatttatactttaatctacattcaagtcatcctatgcagtagttcacagcagtaatgttggaggaaatcccataattgtgaggtagtggcattggattcatcatagaagctacttgatgtctactttatttgttgaactgcatattgcagacctgaaagtttctgtcgatagtattgaaaaagaaatagacttctacttctcgaagttgcatgatattgagatagtgtgtcagcggcctgagttagagcatctataggtataagataaattctatataaatattcatacgtatgcacatgtttattggtttgatgttacggacct

SEQ ID NO: 90195 - DNA, 1324 bp, Zea mays
  Clone ID: MRT4577_182260C.1
gcacgacagaacacagggcgcagcacgcacgcatacatatagagagaggttagctatagcttgcacatctatttaactaactaactaactggctagctagctcgatccgcagagcaaagcgaaagcagcaagaagcaaagcaatggagaaccctgcgagtgtgctagttctaccaacggagttcaccaaactcaccttcggaaacctgtacatccgccgggccgggccgggcagcagggagataaccgaggagggcaggtgcgacctggacaggagatacgtgagtgacttccccgtctacgacggccgcggccccgacgccagccttgtggcccgcgtgcaggggatcaccagcgaaatcgggaacgcgcaccaactgttcgtcgttgtgttcgacaccgacaggtatactgctcgaacggattgcttgcttgcttgcatgtgtttctggcgacgcgttctagctaattgcttttccagctgttcgtctcgccctgcatatgcgtctctctgcctgccaggctcaagggctccacgctcgtcaccaatggcgtgataacggccgggtctgacgagtgggcgatctacggcggtaccggggtctttgccatggcgaggggcgtcataaggagaaggtatctcgccgacagggccggcgggaacactgatgagctcaacatggatgtcttctgccggccgtggggctcacagtcacagctgcaagataaggtgcaggggcaggggcagggctctagcgtcaccaagattggactatggggtggaccgggagggtcggcacaggacatcacggcagagcggccaccgcagcgtcttcacagcgtcaccgttcgtgctggcgttgccgtcgactccatcgagttcacctatactgacagcgctgggcagaggcgcgccgctgggcgttggggtggacttggcggcaatgttcgaacgatcgaccttggcaacgccgaggatgtcagggaagtctcgggaacatacggcgcatttgaaggtgccactacgctgacctcgctcaggctcgtcaccagcagcagaacctggggcccctggggggtcgagaacgggacgcgtttctccgtcacggcgcccatcggcagcagcatcgtgggattctatgcgcgggcgggaacaaggctcgtcgacgctatcggtgtttacttgcgtcagatttaatttgaataataatagcaggggagctactgctagctacgtacctgctccatcctccattatcctttatttcaattcgctcatcatcgtcgtgtgtaaattaaataaataaagctcctgtgcccatatt

SEQ ID NO: 90196 - DNA, 2340 bp, Zea mays
  Clone ID: MRT4577_182261C.1
caggccggccgggccgggatgtcatgtcttccttctcttcgccgctccatagatccagttcagagcgtgagcatggcagacacagaagcctccggtactgtcgtccatccttcccgttcccgccgtcgacgctcctccatcttacacggtgcaaccgtagctatcctcttctttgtcatcatatttgcctacctttatctttatctgtatctttatcttgtgcttcatcgctccgttaggtatggtatcgcatcgctagccattgagatagtagcctaccttgccgtcgcctgcctgtacatctgcaactcggttcggcaggagaagctcatctccgctggctttcttctacttctcctgctcgtcttcctcctctcatctattggagttcgcacctccaggtttcgcgtcgacttcgttttcggggccaatattgtggctgtatcctcctactgcgtctggaagtttagctatacttcttgggtgagcaaagtgagaagaaccatctcacatgttgcaatcgtaactatcctattatctgtggtcttatttgactatgtttgtcgtttctaccctataagctattatccagattcgtattctcttcctgattactacagagacggtgcaatacggctactcattcagttggtagcctacgccgccatcggctgcctatacatctgcaactcctccactaggaagatgaaagtcatctctgctgcttttcttgtgcttgttctggctgtctcccttctctcctcgattaacgacgacaatgatcgtttcggatacatcttcgtggcaaatatcgtgactatatccttgtattgcatctggaagcattaccttgcgatactggtgacactggcttggctccaacgatggctttctgaagaagaagaagcagctgccgccatggccccaagcaaacgactggcagcacggggagaggatgaagaagcagggcttctcaaacccttggaccttgacctagtggaatccggcccgcggcagttctcttacagtgagctcgccgccgccaccaagaacttctctgacgaccggagactcggcagcggaggctttggatccgtgtaccgcgggatcttgacaaccgacggcaggaaccgctgcgtggccgtcaagcgggtgtccaagaccgcgcggcaaggctggaaggagttcgtctccgaggtggtgatcatcagccggctgcggcaccgcaacctggtgcagctaatcggctggtgccagggcagcggcaacaagctcctcctcgtctacgagctgatgcccaacggcagcctcgacgaccacctccacaggccggacagcgtgctgatgtggccggtcaggtacggcatcgcgctcggcgtcggcgccgcgctgctgtacctgcacgacgacgccgagcagcgcgtggtgcaccgagacgtgaagcccagcaacgtgatgctggacgcgtcgttcaacgccaagctcggcgacttcggcctagcgcgcctcatcgacgacggccgccgctcgcacaccacgggcgtcgccggcacgttcgggtacatggacccggagtccatgctcgccgggaaggccagcgtcgagtcggacgtgtacagcttcggcgtcttcctcctagagatcacgtgtgggcgtcggccggcggtgctcgtgagagaggaggactacgtccacctggtgcagtgggtctgggactcgtacggtggcggaagcatcctcgacgcggccgacccgtggctcggcaacaacttcaacagccaggagatggcgtgcgcgatgctcgtcggcctctggtgcgcgcacccagaccgcagcctgcgtcccacgatccggcaggccgtcaatgtgctgcggttcgaggcgccgccgccgagactgcccgccaagatgccggttgcgacgtttgggccaccggcggctcatgcttccggctcaacaacgtcgtctgcagaagcactgatgacctggggcagtagcctgccaaccatggcaatggcagcgtcatcactcgacatcgagcattccagcacgaaaacatcttgatgtaatggcaagcaacacattgtggatttttatgtccgaattatttttatttttatgggccgggggatggttcatccagccatgtagcacagtatgagtgtgagccaagtcaagtcgacggggacagaacaggtcaatcagtgccatgatgtgcggcagcgacgactttgctcaacaagacaaggaccgggggggcggagctaacgtcgagttcggcaaggaaatacgtagacaatttctgtgaaatggagtggagttgccatgatgtttggttcg

SEQ ID NO: 90197 - DNA, 913 bp, Zea mays
  Clone ID: MRT4577_182262C.1
tccgccgtgatgtcctgtgccgaccctcccggtccaccccatagtccaatcttggtgacgctagagccctgcccctgcacctgcatctatatgcgcaaagattcataaggagtatgttatatatccaacaaaacatattcagctccaaacggcagaacggccgccgctggttattagtatgatgaacaaccttatcttgcagctctgactgtgagccaaacggccggcagaagacatccatgttgagctcatcagtgttcccgccggccctgtcggcgagataccttctccttatgacgcccctcgccatggcaaacaccccggttccgccgtagatcgcccactcgtcagacccggccgttatcacgccattggtgacgagcgtggagcccttgagcctggcagcagagagacgcatatgcagggcgagacgaacagctggaaaagcaattagctagaacgcgcgcgtcgccacaaacacatgcaagcaagcaatccgttcgagcagtatacctgtcggtgtcgaaaacaacgacgaacagttggtgcgcgttcccgatttcgctggtgatcccctgcacgcgggccacaaggctggcgtcggggccgcggccgtcgtagacggggaagtcactcacgtatctcttgtccaggtcgcacctgccctcctcggttatctccctgctgcccggcccggcccggcggatgtacaggtttcggaaggtgagtttggtgaactgcgctggtagaactagcacactcgcagggttctccattgctttgcttcttgctgctttcgctttgctctgccgatcgagctagctagccagttagttagttagttaaatagatgtgcaagctatagctaacctctctctatatgtatctgcgtgccgtgcgtgtgccctgtgtt

SEQ ID NO: 90198 - DNA, 219 bp, Zea mays
  Clone ID: MRT4577_182263C.1
cttgaacaagggaacacgctttattgtcggtaaaaacctccagttcactgtagctagctaaccaatttactcaccatgtgggggacctgacccttgtttctggcacaggtagtggctggtacgcccgcgctttcaccttattggtgcacacgatacctgcagggagctgaaaacttcctcgaaaaatgccgcggggtgttcttcctgggaaaaaagagc

SEQ ID NO: 90199 - DNA, 341 bp, Zea mays
  Clone ID: MRT4577_182264C.1
tgaatgttccgcccctggtggtcttgctgttactggaccacttactcctgggcagtggcggcgcggacacccacacgactaagtcatacaggcagaagctgggtgcgaccgaggagatacctctggacaccgacttagttcgcgagccaccagggtacaaagctccgcaccaagagcacatcaggcgttgggaccacaagggcctcgcccagatcgagttctgagtgaccagcagccaagcgtgcgacaataacgcggtctgcggcgtggaccctcgcacagtggagaaccctgcaaacagtaaccacacgcgcttaaaccactgcaacagcacatgggtt

SEQ ID NO: 90200 - DNA, 810 bp, Zea mays
  Clone ID: MRT4577_182265C.1
aagaacacagggcacacgcactacacgcacggcacgcagatacatatagagagaggttagctatagcttgcacatctatttaactaactaactaactggctagctagctcgatccgcagagcaaagcgaaagcagcaagaagcaaagcaatggagaaccctgcgagtgtgctagttctaccagcgcagttcaccaaactcaccttcggaaacctgtacatccgccgggccgggccgggcagcagggagataaccgaggagggcaggtgcgacctggacaagagatacgtgagtgacttccccgtctacgacggccgcggccccgacgccagccttgtggcccgcgtgcaggggatcaccagcgaaatcgggaacgcgcaccaactgttcgtcgttgttttcgacaccgacaggctcaagggctccacgctcgtcaccaatggcgtgataacggccgggtctgacgagtgggcgatctacggcggaaccggggtgtttgccatggcgaggggcgtcataaggagaaggtatctcgccgacagggccggcgggaacactgatgagctcaacatggatgtcttctgccggccgtttggctcacagtcagagctgcaagataaggttgttcatcatactaataaccagcggcggccgttctgccgtttggagctgaatatgttttgttggatatataacatactcctatatgaatctttgcgcatatagatgcaggtgcaggggcagggctctagcgtcaccaagattggactatggggtggaccgggagggtcggcacaggacatcacggcgg

SEQ ID NO: 90201 - DNA, 1628 bp, Zea mays
  Clone ID: MRT4577_182266C.1
tggactattcctaacacaacggaggccataggatgggatggtcatctataaatacgtagcccggcgcagccttctttggagcagggagaagaacacagggcacacgcacggcacgcagatacatatagagagaggttagctatagcttgcacatctatttaactaactaactaactggctagctagctcgatcggcagagcaaagcgaaagcagcaagaagcaaagcaatggagaaccctgcgagtgtgctagttctaccagcgcagttcaccaaactcaccttccgaaacctgtacatccgccgggccgggccgggcagcagggagataaccgaggagggcaggtgcgacctggacaagagatacgtgagtgacttccccgtctacgacggccgcggccccgacgccagccttgtggcccgcgtgcaggggatcaccagcgaaatcgggaacgcgcaccaactgttcgtcgttgttttcgacaccgacaggctcaagggctccacgctcgtcaccaatggcgtgataacggccgggtctgacgagtgggcgatctacggcggaaccggggtgtttgccatggcgaggggcgtcataaggagaaggtatctcgccgacagggccggcgggaacactgatgagctcaacatggatgtcttctgccggccgtttggctcacagtcagagctgcaagataagatgcaggtgcaggggcagggctctagcgtcaccaagattggactatggggtggaccgggagggtcggcacaggacatcacggcggagcggccgccgcagcgtctgcacagcgtcaccgttcgtgctggcgtcgccgtcgactccatcgagttcacctatactgacagcgctgggcagaggcgcgccgctgggcgatggggtggactcgggggcaatgttcgaacgatcgaccttggcgacgccgaggatgtcagggaagtctcgggaacatacggcgcatttgaaggtgccactacgctgacctcgctcaggctcgtcaccagcagcagaacctggggcccctggggtgtcgagaacgggacgcgtttctccgtcacggcgcccatcggcagcagcatcgtgggattctatgcgcgggcgggaaccaggctcgtcgatgctatcggtgtttacttgcgtcagatttaattcgaataatagcaggggagctactgctagctacgtacctgctccatcctccattatcctttatttcaattcgctcatcatcgtcgtgtgtaaattaaataaataaagctcttgtgcccatattatatatagttgtcatgggcgggccgtgtcaaaaaaaaaaaaaaaaaaaaaaagaaatcatgaaaaaaaataataaaaaaaaattaagaagtgcttttgcgtggttaccctggttaaagggagaatgtaggaaatcgttggaccctgtgggggatatagggcatagtacatgacatttatattaatatataaatatactttatatgagtgaaagagtaaccatgctttagactgcttattttgatgctttgatgtttatattgtgaagaagcttggtcattatgataggggaaaatgttgtatcggagtgtttgaattgaaatgtgcacttttaacaa

SEQ ID NO: 90202 - DNA, 355 bp, Zea mays
  Clone ID: MRT4577_182267C.1
gggaaacgtagagttttttggtgttcgaagccggcgccactggaggacggtagaggtagcgcaatagatcgaccgctggcgggggagaaaaaggcaaactgatatgctgccacattggctctcttcaaacaaggacaaagaaggcggggccccatctgggtgcacaaacagcagagacactagcaatggtgcgccaaagccgctcgaacacagaaacgcgcgccagattagagatgacaaggggggcgaggcaaccatcaataaagggaaagggactgaaaatgggcacatcaatgtgacacactactgggggggggaaggagaaaccgcaacagactgggagctacaccgggga

SEQ ID NO: 90203 - DNA, 228 bp, Zea mays
  Clone ID: MRT4577_182268C.1
tatagatgtagagatatagtaaccatctactatgtgctacctgcagtgagtcctcaccactgagcgaagtaggtattattatctccttattacaggtgtagagactgaagtttcataatgagagaactagcccaaggtcacagcaactactaagtgatagatttggcatgcaagcccagatttgtctgaccgtcaaaccgagctctcgatttaggatgaggagagtga

SEQ ID NO: 90204 - DNA, 405 bp, Zea mays
  Clone ID: MRT4577_182269C.1
ccggccgggagacgcaccccttcctcgtttagccggctgcgacgacaccgactgactgcctcagctgtcgctgccatgggcagaaggcctgctagatgctatcgacagatcaagaacaagccataccctaagtccagggactgacgtggggtccctgacccgaagatcaggataatacgatgtcggcatgaaaaggaagggggcagatgagttcccctactgggcgcaccttgtctcttgagagaaggagaatggctccagcgaggcgctagaggctgcccgaattggctgcaacaagagcatgaccaagctctgcaggaaaggatgccttccaccttagggcccagggcaagccgttccatgtcctccgtgtaaacgagatgcttgccaggactggagccgata

SEQ ID NO: 90205 - DNA, 1591 bp, Zea mays
  Clone ID: MRT4577_18226C.1
cattgggaccctcgagtcgggccggcgggaagcctgagaccggggtggccccgcgagcgcgcgggagacaaagcacgagcggtggtagctggccagccaccatggctccaccacctctgttcccgctcccgcctctcctcatcctcctcgtcatcgtgcctctgttccccaccgccgcgccgacggccacgacgctgccgctgtaccgccacctaccgcacgtagccgaggccgtggcatcgcaccaccacccgctgtcccgcctggccgccgcgtcgctggcccgcgcgttgcacctcaagcgccgggaccccaaccaccacagccagaaaggatcaggcggccacccgtcagtaccagccaccgccgcgctgtacccgcactcctacggcggctacgccttcacggcgtcgctcggcacgccgccgcagccgctccccgtgctgctcgacaccggcagccacctcacgtgggtgccatgcacctcgagctacgagtgccgcaactgctcctccccatccgcctccgccgtcccggtcttccaccccaagaactcctcctcctcccgcctcgtgggctgccgcaacccctcctgccagtgggtccactctgccgcgaacctcgccaccaagtgccgccgcgccccctgctcccccggcgccgccaactgccccgccgccgccagcaacgtctgcccgccctacgccgtggtctacggctccggctccacagccggtctgctcatcgccgacaccctgcgcgcgccgggccgcgccgtccccggcttcgtcctcggatgcagcctcgtgtccgtgcaacgcggcgtccggcggcaccatcgtggactccggcaccacgttcacgtacctggacccgaccgtgttccagcccgtggcggacgcggtggtggctgcggtgggcgggcggtacaagcggtccaaggacgcggaggacgggctggggctgcacccctgcttcgcgctgccgcagggcgccaggtccatggcgctgccggagctgtcgttccacttcgagggcggggcggtgatgcagctcccggtcgagaactacttcgtggtcgcggggcgcggcgccgtggaggccatctgcctcgccgtcgtcaccgacttcggcggaggctccggggctgggaacgagggcagcggcccggccatcatcctcggcagcttccagcagcagaactacctggtggagtacgacctggagaaggagaggctggggttccgccggcagtcatgcacgtcgtcgccgtcgtgaggtctcacgacgtcggcatggcggggatcggagtggaggccagtaattactccagagtccagtccacgtaacactccaaattccaattccaaaagctggctgcttgatcttttgttagtgctcgtgtactgctaataaaaaactaaatttactgtcatctactactactattaagttattgaaagacgtggcttgctttgggtttcaaaaaaaaaaaaaaaaatgacccctttaatttggtagtggactaccattaaaaaaaaaaaaaaagcggccatgtcctttcggctgctaccactgtttaaggccgaat

SEQ ID NO: 90206 - DNA, 376 bp, Zea mays
  Clone ID: MRT4577_182270C.1
atattaacttttattttccgtgtcttttttatttttttgtttttaaaaaccctattttttataaaaaaccccacttcctttctaaaaacatttcaaataaatacaaccaacccatccccatatatacccaacaccccatccaaaaaaatactaattatttatacctactactggcccctataaaaccacacccaattctttttattagactgttatcaatccataccccccattcacacattatttaaaaccctctccccccatcaaattgaaaaaacactttttcccccaaatgtcttatttgaccaccacacacccacttcaaaaccccttctttccctccaaaaagaatcttaaaaaatactttacctttatt

SEQ ID NO: 90207 - DNA, 361 bp, Zea mays
  Clone ID: MRT4577_182271C.1
aaaaaatagccccatttaaaaggacaatgcaaaccccaaacaaaaaggggcaaagcccaacaaaaggggcccgaaaaagaaggtcctcaccgattttctgtaaatttaaatatatggcatcctagagtttgttgacaaatataatggcacctatatttgtctgaagtcccaaagctctcaatctattatgcctacaaggctagctgcatatgcatcattagccacttacacttaaattattcgtgactaagaattcaggaatctttttcttgattaaaaaaacttctgtcccttggttgaaaagcccaaacattaaaaagaaaaaaaaaaacaacaaaaaaaaaaaacgactgcaaattag

SEQ ID NO: 90208 - DNA, 668 bp, Zea mays
  Clone ID: MRT4577_182272C.1
ttaaaaacggccccccctttttttttttttttttttttttttttttttttttttttttttttttttttttccctcccccctcttttttttttttttttttttttttttttttttttttaacgaaagcacttattcgctaatcaatataatgagcccgacttgctaaactttaagaaggaaatgaagagataaatacatctatacacatggctaagctcctaacaatttcttcagctccttcttgttaacctttcccatggcattccgaggaagagaatcccacaagtatagtcttgttggaatcttgtatggagcaagcttatctttcgaccaacttgttaatgcttccaaggttagcgctggctttgagtcctgtccagcctttttctttgcatcctccttaggcacaattattgcacatataacctccccataggcttcatcaggcaagccaaggacagcacattccagtacagcatcatgctctggtcttttccaatactccttgaaaagagatggacttctaatgcagagctcgccaactccagttgtagtttcagccccgtcctccataatgatcttggcctcaatgcgtggaagaggtttaccaactgtaccttcttttcggataccatgcaatggattagacagtgccatgacaaactcag

SEQ ID NO: 90209 - DNA, 2169 bp, Zea mays
  Clone ID: MRT4577_182273C.1
gggtacctcgaggccggccgggaaccccgggctgccgtaaatgcggacacaggcgtgggggcgcggggcggtggcgcgcttgatgacgccattcaatcgccgcgcggcccacgcctcttctccccacctgctccgcgcctgctcatccgcctcttataccatcgctctcgctcgcctccgacgccacttcacctcttctgcttccttctccccagcatacagtgccagacaggatacccacacattcatggaggtggttcaagaagtccttaggcatggctcagcagatagtgtccgtgctgtcataagagctaacaaaaagagctacagccttgtccagctcattgcagcctcttttgatgtctacaacattttgtgcagcaaaaatatgacaccaaatgggatgcaagattcttcttccaaaggaagaaatggaacaggattccttcatggagctcgtgttggcattgtggctaaaccctctcctgaatttgttgctggggtatttggaacctggctttctggtggagttgcagtaccccttgcccttagctatccagaagctgagcttcttcatgtcatgaatgactcagatatttcaatggttttaagcaccaaggagcatcacgaaatcatggagaacctttctatcaagtgttctgcttattgttctattcttccatctgtcactagtataccttcagaaatcaatcctcaagaaccttcaagcaatgaggcgatttcatcagtctctactttaataactgagaccaacagttcaaagaaaatcaaaggcgatgaccctgctcttatcctttacacaagtggcacaactggtaaacctaaaggagtagttcacacccatgagggcattctttctcaggttcagattctatctgaagcgtggggatatcgaagtgaagaccaatttctgcactgtctcccgctgcaccatgtgcatgggcttttcaatgctctatttgcgcccctttattcaggatcagtggttgagtttataccaaaattcagtgtaagcgggatatggcagagatggcgagaatcatatcccaacgatgcgagtaaaagtacagaggccattacagtatttactggagttccaaccatgtatacacgtctgctgcaagggtatgatagtatggatcctgatcaaaagtgcgggctcttcttacgctgcaaagcatctgaggttaatgatgtgtggatcatcagctcttccttccccacttatgaagaggtgggaggaagtgacaggccatcgtcttttggaacgctatggtatgactgagtttgtcatggcactgtctaatccattgcatgggatccgaaaagaaggtacaggtggtaaacctcttccacgcattgaggccaagatcattatggaggacggggctgaaactacaactggagttggcgagctctgcattagaagtccatctcttttcaaggagtattggaaaagaccagaggtcaccgcagaatctttcattgatggaggattcttcaagacaggtgatacagtaactgtagatgaggaaggatacttcataattttgggacgcacaaatgccgacattatgaaatttggcggttacaagctgtcagcattagaaattgaggcagtactgttagagcatgatgctgtactggaatgtgctgtccttggcttgcctgatgaagcctatggggaggttatatgtgcaataattgtgcctaaggaggatgcaaagaaaaaggctggacaggactcaaagccagcgctaaccttggaagcattaacaagttggtcgaaagataagcttgctccatacaagattccaacaagactatacttgtgggattctcttcctcggaatgccatgggaaaggttaacaagaaggagctgaagaaattgttaggagcttagccatgtgtatagatgtatttatctcttcatttccttcttaaagtttagcaagtcgggctcattatattgattagcgaataagtgctttcgttaccatggaccaataatcttcgaaacggcctgagttagactgcacacacatttatttatcagaaaagtttctagtcaaaaaaaaaaaaaaaaaagcggccgagggggtaatccggtacccaaagggccgggctctcgaaacccttagtgcgtg

SEQ ID NO: 90210 - DNA, 800 bp, Zea mays
  unsure (1)..(800): unsure at all n locations
  Clone ID: MRT4577_182274C.1
gagcctcaaccgggacccccaaccaacccccccaccgttgccgttgcagagcccgccacgccacgccgcccatggactacgagcgcatccacgacccgccccaccgccagtcgggcggattctcgccggccaagctgcgagcgatgcttctcgggctcgagaagcaccagcactccggcgaggacacctcgcccgaggccaacgactccggcgagctcgacgaccggaggagcttggaatgctccacctccaccgagatgtccagcaacagcggccacagatcaaggaaccgggctccggaggacgacagcttcgactccgagagcagctcttcggggccgacaacggttaagagggccgcggcggtgtctgctctgctgccgccgttctctagaccgacgccgtcgaaatgggacgacgccgagaagtggatttcgagcccgacggcgaaccgtactggccgtgtgatgaccgccgcagggtttgcgccgaagaagacggcatttgctttacctgagcacggtgcctgcctgccagccgctgctaaggtggtcgccgaggtgccgagaaacaccggaacattgactgataattcagttggttccacgcagcccgattcaatcaaacctgcagaaactgccccaatagtcgacgaaccagaacacgtaattcggtctgtctcgatgagagatatgggaacagaaatgactccgattgccagccaggagccctctcggactgggactccgataatagcatccagccctacctccactaggacgncaactcctaacgggagc

SEQ ID NO: 90211 - DNA, 428 bp, Zea mays
  unsure (1)..(428): unsure at all n locations
  Clone ID: MRT4577_182275C.1
ctttgggctgatttatgtgcttgtctaatcctgatgttgagaggatgatgttccctaaggagtggttggttccgctgatcttggctaaggattgtgtcggcggtgtgatgttcgttagggagtgtggggtcgtggtgatgttcggcagggagtggattgttgtggtgctgttggtgtcgagtctcgtgctgccgaggaagagtagtagtgcgtcgtttaggtcgattaggagtaagagtcccgctgtggatagggactagtagtactttaggacttttaagagtttaccttttatcgagaagagtctggcgagtcgtatagttctgagggtgatgaggagggcggttaaggaggaagagtttcttctgttcntcctcgacgacgagtctggaagtctggntatacttattaagaagtgactggtgata

SEQ ID NO: 90212 - DNA, 356 bp, Zea mays
  Clone ID: MRT4577_182276C.1
ctcacgcgtacggtcgacccggacggctccattgatcgcacctggtcgtggggatgaggatggccaggacggagctcaagatggagcacgagctcgacaaatggcagaccgaatctgacaggatcagggacaagtatcctgacagagttgctgagactggcgagacagctggccaaactgatgttcacaagattgaccagaagaatgaccatgtcactgctgatctgactgtctgtcaggtggggtatatagtgaggctgagaatcaagctgggcccatagaaggccatgtatgacaccgtgaagaacactgtggcaccaacgtgcctctatgatgtctgcgatctacgacgagga

SEQ ID NO: 90213 - DNA, 1265 bp, Zea mays
  Clone ID: MRT4577_182277C.1
gttggagcacaatcacgtgggcctgctcctcatctccagcaactcaggatgccagcaccgtttgcaatggttcacagagatggacagcatccacccagtatcatgaatcccggggttataccgtcgagacagtctgtccatggtaattttgaaagctctgcttctggcaatgcactggcaggtatctcatttgcatccatggcaccaagttcaggtcaccaggcgatgtcgtccacatcagactcacatccagttttcccagcatcctcgcttctaccaggttcaggtccagggtcgatggcaaactttgtgcggtcaagtaccagaatccctgttgtcatggcgagcgaacaagcaccacgcctgaatccatatgttcaccacatcggaggtggtccactgaacgctgcaccagcaggaattcagaaagctagagctcatataggacacactcctcaggctgcctcagatcagagtcaggacgtgctgcatcgcctactactacagttgcccgaagtcatggcgccaagcttagctcagccaaccgcatcaagctcacacccggctcccatggcagcccggcagcaagcagggctactgaatccagctcctgacaacgtggcatgtccactgaacgcagtggctggagttgggcgccccggagcccgcataggcagccagtcgtaccaggtatcggcttcgttgctcgagtgggaggcgacgctcagggttggcctgattcgtggacaccaaggcacgtaccccttgggacagggatgttctgacctggctggaggaccccccggcacatccgctgcccagggatgcggctccggcgccagcagagaggtggtgtgcctatctgatgacgaggagtagcatagcgtagagagtagtagtttttttttttgggctgggctggtctgtgcaacgtagatgtgcatgggttggataggcaacagtagagcggcacgatatcgtcgcccccttttagcagcagcggcatccttggaagcaggagatgtctggctctgatgagggtagtatgtcgtatttttggggggtgggggactggtggcgtggcgtggcggcagcagcatattagtgaatagtgatagcatatgaaccctaattctgatatatagtcttgtcgtttcatagcctggtggtgattgtttggtgtggggctggaatgatcatatattattattatcggtctggttgtggatgtggtacttggtgttgcttaggcctttgaccttggg

SEQ ID NO: 90214 - DNA, 426 bp, Zea mays
  Clone ID: MRT4577_182278C.1
atggcgagcgcggaggagctgtgcgagcgcgaggtgctgtggcctgagacggcccacgacgagggagacggcgacgacgcgacgcccagctgcagctcgtcgccgcccgtggcgccgcggtccagaacgccggctccggctccgcgaccgcgaggcggcgtccctgggagcgagaggccgacgacgacgacgcgtgcgggctcgcggccggtggacatccagaggcccgcgagctcggccaggcgccgtggccacgaggacggggaccgcgaccgcgactggagcgccgcgacgatggtgccgcctcacgtgctggtgtcgcggcggcggcaggaggcgccgtgcgcgctgctgcggccgggcgcgcgcgagctcagccacctgcgcgactccgtgctgcgcgtcaccggcttcatcgaaggctga

SEQ ID NO: 90215 - DNA, 135 bp, Zea mays
  Clone ID: MRT4577_182279C.1
aaggcatgattgggggggtttatatgaggggatgagacaccaagctcaaagcgagctatatttagacatcgttttagatagggatacctcacggttatcacgtctttggtgtgccggcccgctgtatacctggat

SEQ ID NO: 90216 - DNA, 142 bp, Zea mays
  Clone ID: MRT4577_18227C.1
atcttcattcactcactctcttccatcacgctactgtagataccatggccaagtcgaccgctatgttagtagccgatctggacctgttggtggtgatggtgactactagcacaggcggtggctgggcagcagcggcgtgcga

SEQ ID NO: 90217 - DNA, 870 bp, Zea mays
  Clone ID: MRT4577_182280C.1
cacttactctcggcaacggatatctcggctctcgcatcgatgaagaacgtagcgaaatgcgatacctggtgtgaattgcagaatcccgcgaaccatcgagtctttgaacgcaagttgcgcccgaggccactcggccgagggcacgccaccctattcctgactctccactcctcccctctcccctcctcttctcttctctccactgcccaacttttgctatagacaagaaagaacctaagctaggtagctttcctccagagcagagcaatggccatgcatcctcttgcccaggggcacccgcaagcctggccatggggggtagccatgtacacgaacatacactaccaccaccagtacgagagagagcacctgttcgagaaatccttgacgcccagtgacgtgggcaagctcaacaggctggtgatccccaagcagcacgcggagaggtacttccccctcaacggcggagactcccccggtgacaaggacctgctcctgtctttcgaggacgaggccggcaagccgtggcggttccggtactcgtactggacgagcagccagagctacgttctcaccaagggctggagcaggtacgtcaaggagaagcagcttgacgccggagacatcgtgcacttcgagagggtgcgcggccttggcacaggcgaccggctcttcatccactgcaggcgccgtggcgagagcgcgccgccaccacctgtccgcgtacctccgcccgctctgaacgccggggagcagcagccttggagcccgatgtgctatagcacatcaggatcataccctaccagccctgccaactcccatgcctatcgccgctccgtggagcaagatcacagcgagatgctgcatgca

SEQ ID NO: 90218 - DNA, 405 bp, Zea mays
  unsure (1)..(405): unsure at all n locations
  Clone ID: MRT4577_182281C.1
ggccggggttttttcaatgaactgctgatcgactgtgactatgcctccttccgactgacctctatatgggcgtccccgaggagagacaacgatgactacagctctccggcgcaaggtcgcggagatgggttccgcgacaacagagggcttcagcatactccgcgttagaccggccacgtgggctccgcggcagcggggacggcgtaggcagcgtgctcccccctccccccccgcgccgcccaccgcccgcagccccccgcncgccgcccggccccgacccacaccccccccccccccccccccccccnccccgccccccccgncgccacncccacccccncccaccccccgccccccccccccgcccccccccccaccccccccccccgcnccccccaccccccc

SEQ ID NO: 90219 - DNA, 707 bp, Zea mays
  unsure (1)..(707): unsure at all n locations
  Clone ID: MRT4577_182282C.1
ccaacttgataccaagttgatagagattctctatcaacttggtagataggctcttatttcttgtagctttaacaggcggagcaacacgcatacataaaaaacaatcaccatctcgagcggccgggaactcatcatgcatagagttcagaagcgagcctaggccggacgacgacctcgagcgggaacttgcgcgtcgtggatagcccgaacaattcgtccatcctcaggtcctccttcgccataccctccggcagcgtccaagtaaacccgtggagaaggttggccaagctgagctgtatctcctgcagcccaaggctgtacccggggcacatccgccggccggacccgaacggcagcagctcgaaatcccgtcctttcacgtcggtcttgctcccgacgaacctctccggcctgaactcctccggcgcgtcccacagagccgggtccctgccgatagcccacacgttgataaggacgtgcgtgcccttggggatgtcgtagccgccgatggacgcgtcctcgcgggtaacgtgcgggggcaggagaggcgcgatggggtgcacgcgcgtggtttccttgacgatggcctggaggcaaggngagatgtgccacgtccttctccgtgacccagcgcccgcggccgacttcccggtccagctcctcggcgncatggngaggacggacggcttcctcaggagctctgacat

SEQ ID NO: 90220 - DNA, 370 bp, Zea mays
  Clone ID: MRT4577_182283C.1
agggaaaaaaaaagggtaacttcattttataacctttcaaccagggaaggggagggattgcaaatcctgggttccccattcccagcccaaaaaaaaaacaagggtttccccccgggggcttccttactcaatttccagggaaacctttagtaaaaacccttgggggggcccatggaacccttgggggggggggggccaacgttttgccagccctttttggggggggggcccgggtattttatggacaacatgacgttcccgacaagctccttattggtcatttcaacggggcccacggggacccccatgcagagaaccttcttgagctggaccttgatggtggacttgaccccggggaccttggcggaaa

SEQ ID NO: 90221 - DNA, 831 bp, Zea mays
  Clone ID: MRT4577_182284C.1
attcggctccacttgttgtgcatggttacattaattaagaccaaacaaataaataaattttaacaaaagcacagattgagtacatatatatttgcggtccatgcatgcatgttttactgcctgctactgtacgtactactgcagccggaaagaggagagcagtaatttaatttagttactgttactagtctagtagcaaaatcaggcacacgaaaactggcgaaagctagagcacagcatgcatgcacggcgaagaacacctcgcgttggcagcagcagcatagcacgcacgtctctcccgctcctgatcatcagcgcgcgaggatcggagacggctagctggctagctgcggggcgccgccgcgacgccgtcggcgacgtcgacgctggtggtgcaagcgaggaggcggcggaagatggcgcgcacggcgccgcaggacgcctcgtgcagcctccgcaccacggcgcaccctttcttcttgttcttcttcctccgccgccgcctctgctgctgcttgctgccgcgacggagccccagcacgccgtcgtcctccgtgcggtggctggcgctgccgacggaggcggcgtccaaggcagcggcggcggcggccgacccaccgccgtgccgctgcgggtggaacagcgggaagaccgcggcgccgcggtcccggacgcggccgaggcacgccatggtgcgctcgggcaccgtctccttccgcttggagaaggtgtagctgcggaggtacatctggcggcacgagtagctgtccaccacccgggggctgcagtaccccgccgccagctcgccgctgttattactccgcatgctgc

SEQ ID NO: 90222 - DNA, 291 bp, Zea mays
  Clone ID: MRT4577_182285C.1
gaaaaaagaaaaattttttaaaactacgtatgcctttgtagtacttttttccccagttttgttctttaaaggatagaaatctaaaactataggagcagaaactggactacaacagcgtgtgggtaatttgaagctaaaacgggacaaaaacctacaaatgcaattgctgagcctgagcataaggctcactgaaaaatatatgcgaatcgggggaagctctttccagatgcaatatttgtttttttagaaaatgaggcagggaatatgacagggtcttggggagggcttgag

SEQ ID NO: 90223 - DNA, 3969 bp, Zea mays
  Clone ID: MRT4577_182286C.1
gccggccgggctggggtcgggtcctctccccctttcgacagcgtcagaaacaggggagggggaggaaggggaggaggaaggaaggtggtagccggcgacgtggtggcattcgccacctttagcctgggctcaatcgcctccctcttcctctcttcctccgtcctgcttgccccaaccttcgttctacagtacaggggccttatacctcagggcaagcaggggcacctccatggccgcggtgctcgactccttcgtcaaacggtgcacagcatcactggaagattttgcagaccaggaggcctgcgccgccctcggcatcgtggacgatgtcaggggcctcctggccacgctgttgcgcatcgacgccatcatctcccacgaggagcggaggagggtccttagcgccaaaactgatgcgtgggtggtgcaggtgaaagatgccatgtacgagatcgacgacgtcctcgatgtctgcatgattgagggcgcaaagatcctcgctgctggcggcccacccacgcccaaggtccgatgcttcttctgcttcaagctttcagggccccggaagttccgacatgagatcggcttcaccattagggacattgatctcaggctcagggaagtagaggaggaaatgcctaggcttcctgctggatcagctcactctgatgatgcaaaaagggattggttcagtcgtgacgtctgtaagaactgctcagacgcgatgaagccccaggcagttgggtcgcaggtccaaaaggctgtgggtggccttgtgccaaggatgcttagagagggcaagaagaaggtggatgtcttcgccatcgttggtgcggtggggattggcaagactacacttgctagggagatctacaatgatgacaggatgactgaaaatttccccatttgtgtgtgggttgacatgtccaagaatttatcggagctagatttccttaaaacgatcatcaggggtgctggtgccaatgttggggttacagaaaacaaggaggaactcctcatcctcctcgcttctgccctttccaaaaggttcctccttgtcctggatgacttggagagcccgagcatatgggacaatctgctcaaagattcattgggagatggtgttgtcagaggaagaatactgatcacaactcggaacgaggaagtggcaacaagcatgaaggcaactatccaccatgttgacaaaatggaccctgagagtgcctgggcattattgtgcaatcaagttgatgcagaatgcaattcggaagagcttgcaacattaaaggatgttgggattaagattgcagagaaatgtgatggccatcctctagcaatcaaggtcattgcaggtatcctaaggtcaagaggcaacagcaaggctgaatgggagatggttctgaacaatgattcttggtccatgtgcccaatccttccagaagtaccacaagccgtgtatgttagttatgtcgatctttcttctcaactgaaggagtgtttccttcattgctctctgtatccagaagaattccctattcagcgctttgctcttgtgcggcgttggattgctgaaggaattgtaaatgccagagacaaaaaactgcttgaagaatcagctcaagagtattatgtagaattgataagcagaaacttactacagcctgatcctgaaagtgttgagcgatgctggataacacaccatcttctccgctctctagcccgcgctttgatagcagatgagagtatcttaatttatggccagcagaaactgaacacctcattgtcaaagccccggcatctcacattgtgtagcatggaaaacagcttggatggtccaatttcgctgaagcagcagatgggtttaaggtcgctgatgctcttcaaaagcccaaatgtcagagcaatagatcttctcatggagtcagcttcatgcttgcgtgtattagatttgagcaagacagcagtggaggccatcccgaaatccattggtaacttggtacatttaaggtacctcaatcttgatggggctcaggtcagagacataccttcttccattggatttctcataaacttgcagaccttgagccttcaaggttgccaaagcttgcagagacttcctcggtccatcagggcattgctagagcttagatgcctttgtctctatggaacttccctaagctatgtaccaaagggtgttggtaaattgaagcatctcaatcatctagatggtctaatcattggtcatgacaacaatgcgcctgagggttgtgacttagatgaccttaaagcattgtcagaactaaggcaccttcatatagagagtttggatagggctacttccggtgcgtctgcactcgcaaacaagccattcctagaggatctgtacctctctgagcaagcaccagcaatagaaaatcaggaggatctggaggacaaagatgaaacagaaaaagaagagaaggaaggacaggaaagaagcaatggccaatgcagaggagatgagtcaaccaaagctagtgaaaagatatggaatgagctcaccccaccccagagcatcaagaagctggtaatcaagaactacaaaggcgtaaagtttccaaaatggataaaaggtcccaagctaggagactccttccccagccttgtgtttttggatcttgaaaactgcatgtcatgtactaaactgccttcacttggcctcctgagtcaactccagtccctgcaaatctcaaatgcagactcagtcatcaccatcggttcagaattccttgggaccactgtactttcatcagccactccattccccaagcttgaggttttaaagctcagaaacatgaagaaacttgaagagtggtctttaactgtggaggagagccaggtagtattaccttgtttgaagtcactgcagatacagtggtgtcctaaactgaaagctctaccagaaggcctgaagcatgtagcgctgtgtgaacttcatgtggagggtgcacatagcctaactgaaatcaaggacctgccaaaaactatctgacgagctccatctcaaagataataaggtgctacagaggatctcccaacctgcccatgcttcgttccctcattatcgatgcctgctcaaagttgaagcatgtggcaggtcttgatgcgctgcagcacctcagacttgtctttcctccgtccaccgagacattttatttcgaagagctagtaattttctggagcgttgccttcccacggtggctggagctactgattcagaagtgcaaaggcctgcgacggtttgagttgcagtgtggtctgtcattgctcaggagctgcctcgacggtggcaagaactggcatctcgtgcagcagatccccgaggtgcgcatcataagctgcgatggcaagagatactttcggtataacaagagccgccgcatctacgaaactaatgcacagtcagaagaatgaagccatttctgaaaaccttggcacgacactggtttgttttgggtcagccacacgtttcagttgtcgctgtccctactttgttccgggagtattgagagcttgtgttctgttcacgattgattcaggtgttttcctttgttttgcgtgttttttttctttcttctttttatcgctgagccgatatatatgcactggttctcctctgaatatgggtgtccttcaccaggactcaatatgtgtaattcttttctgtttcctggtcatgattgtctgtaaattgtaaacattgggtttgatggatatcgacactggagtgtaaagtgttggcggttaaatacacggccctctttcctggctcagcaatgaaaaaaaaaaaatacaaatatcgctcatcgcggcccttctcggggagtttgcttagatctttgctcttattatctagtaaaaaaaaaatgggggggcggtttttaagggtcccaagttttcgcccctgtgttggcgacgtatttttttttt

SEQ ID NO: 90224 - DNA, 653 bp, Zea mays
  unsure (1)..(653): unsure at all n locations
  Clone ID: MRT4577_182287C.1
cccacgcgtccgcccacgcgtccgcccacgcgtccggtcaagggtgccaaggcttctggggcaaaggcagttgcagtaccatcacttcaaaatcagaggaaccactattacattgctgatgtcatcctatattcgcttttggactttcaacctgagatgtggggtcttcctccattggaagatcgcattcaaggtgttctgccaattgatcccttactttcaaatgcccggataggtggtaaaattttgaacaacattcattgggtaatttcagcatgtacattttcttgattgctctggcacggttgaaacagagcctgtgaagctgctcataattggttacatccggaagctccaaagtgcagatgatatattgcaagcattaagcgtaactgacgaagacaggagtattgcaagggatgcattggatctcccaactttctctgaatatgctaatgaccttcatcttgcctgagtccggctttgtcattgcaagctctcacctcactacctcacgtntgtatttgttattgttaacaagcaaacatgatgatgccagctgcgttttcttctatgaagacttcatatggaatgcacttcttgctcgggagagattagagaagagaacggcggtaggcatgaagcttgtcttt

SEQ ID NO: 90225 - DNA, 1940 bp, Zea mays
  unsure (1)..(1940): unsure at all n locations
  Clone ID: MRT4577_182288C.1
cctcgaggccggctgggaggtaccgggccgagccatcgtcatcgaccgactccgactccaccggtctccttccgagatccctcttctcctcccgcccccgcctgaccgcctccctcctcactccggccccttccgcatgtcaatccatgggctgatactcgaagtcagagtcaccgggtgccggaagctgcgggacacggagttcttcacccgccaggacccctacgtcgtcgtcgagtacgccacgaccaagctccgcacacgcacctgcaccgatgggggaagaaacccaacttttgatgagaagttccatatacccctcattgaagggctccgcgagttgaatgttattgtgtggaatagtaatacgttaacccatgatgacttcattggaagtggaagagtatatctgcacaaggtgctgacaaatggctatgatgactcctcatggccgctccaaacacgccacatgagatctgctggggaagtgaagctcattatgcatgttgatgtctcagcaatgaagaacaagatgggtagaagtgtcgccgcatcaagtgcacatcctgttcctgcactttcaatgccagccccatctccagcttcggccccaacccctgctccagcaccagcactagcatcagcgattccatacacgggagtctcgccttcatatccaccggtttcagcatatcctggtgcaaccgcataccctgcttacccaacttctagccatgcaccatataccactgctgaatatccaccacctccgcagcaaccataccaacccccacctgctggataccctccatcctatccaccacaaccatatgagcaatcttacccaccgcaaccatatgagcgatcttacccaccacaaccatatgagcgatcttacccaccgcaaccatatgggcaacaaccatacccgcccccgccagcagcagagtcgccgtacccaccagcgccttaccctggtacttatccaccaagaccctattgatatagcagcgtcagtaatgatctcaggtagaggcatcaaaagcaacaaacaacagccttgatgctatgtgatacgcgcctcagcgtggattctttatttctaattatttggttatgttcctaacaaaaaatagtaccaaccgtcactgagttgttgcacatctatcacaaatcagtttaaggtcagattccaatcgattggtgacaaattggagctgatggggtttcgttaagtgcaacggatggaaatgtattccttgatcagatcgtgtcaacagctcagtgaccagtcatatgtacaataggtagcttgcagattgtgtcagtgaaatccatcctatattgctttgcagtggtggtttagagaccagaactagcttccttcttctcctatcttggaatcacatctgactgatctgtgaccacacaattgtacatgtagtagggtaacctgtgaagtctgctgcttttccaaaacaacaataaatctgaatgtatttgtaacagtcaataaatttgcttcggtggtgaaagctgttggtgtgtgtgagaagtatttgtaactataaattcttttttccatatatggagacaaaacatatgggcacacaacctacaacaacttgtgctataaaaccttgttgtctactctcagaaacagaagtttttttcatttaaccaactatctgcattgaactctgttttttatttgcaacaacaccacctaccatttagccagatacctgttgtctacccccagaaatttttttcatttaaccaactgtcacaattgaactctcttgtttatttacagnagcaccacctattataatttagccacatatctgtggtgagccctgttacctttttgatacactcacagatgtggcggttttataagaacgctgtgcctatagctgtgaccctcttacacctgt

SEQ ID NO: 90226 - DNA, 417 bp, Zea mays
  Clone ID: MRT4577_182289C.1
ataataactttaattttatatataagtgctaacattctttactacaaacttagcttgagctagatttgtggatgaagagagtatataaaaattaaacgtgaaaattttacagcatacgataacatcgatggacctctaaatgaaagacaagcttcatgccttccgcccttctcttctctaatcttctccgagcaagaagtgcattccatatgaagtcttcatagaagaaaacgcagctggcatcatcatgtttttgcactttggagcttccggatgtaaccaattatgagcagcttcacaggctctgtttcaaccgtgccagagcaatcaagaaaatgtacatgcgtcactttctcgacggtcttgtgtgagaagtcccacccagtagctacgatcaccttggagaattcatgcact

SEQ ID NO: 90227 - DNA, 824 bp, Zea mays
  Clone ID: MRT4577_18228C.1
ggctccaccacctctgttcccgctcccgcctctcctcatcctcctcgtcatcgtgcctctgttccccaccgccgcgccgacggccacgacgctgccgctgtaccgccacctaccgcacgtagccgaggccgtggcatcgcaccaccaccacccgctgtcccgcctggccgccgcgtcgctggcccgcgcgttgcacctcaagcgccgagaccccaaccaccacgttcacgtacctggacccgaccgtgttccagcccgtggcggacgcggtggtggctgcggtgggcgggcggtacaagcggtccatggacgcggaggacgggctggggctgcacccctgcttcgcgctgccgcagggcgccaggtccatggcgctgccggagctgtcgttccacttcgagggcggggcggtgatgcagctcccggtcgagaactacttcgtggtcgcggggcgcggcgccgtggaggccatctgcctcgccgtcgtcaccgacttcggcggaggctccggggctgggaacgagggcagcggcccggccatcatcctcggcagcttccagcagcagaactacctggtggagtacgacctggagaaggagaggctggggttccgccggcagtcatgcacgtcgtcgccgtcgtgaggtctcacgacgtcggcatggcggggatcggagtggaggccagtaattactccagagtccagtccacgtaacactccaaattccaattccaaaagctggctgcttgatcttttgttagtgctcgtgtactgctaataaaaaactaaatttactgataaaaaaaaaaaaaaaaaagcggcc

SEQ ID NO: 90228 - DNA, 1364 bp, Zea mays
  Clone ID: MRT4577_182290C.1
cattgggacctcgagccggcgggagggccgagcctcgtatcgagacatcgaccgactccgactccgactccatccacggtctccttccgagatccctcttctcctcccgcccccgcctgaccgcctccctcctcactccggccccttccgcatgtcaatccatgggctgatactcgaagtcagagtcaccgggtgccggaagctgcgggacacggagttcttcacccgccaggacccctacgtcgtcgtcgagtacgccaccaccaagctccgcactcgcacctgcaccgatggaggaagaaacccaactttcgatgagaagttccatatacccctcattgaagggctccgcgagttgaatgttattgtgtggaatagtaatacgttaactcatgatgacttcattggaagcggaagagtatatctgcacaaggtgctgacaaatggctatgatgactcctcatggccgcttcaaacacgccacatgagatctgctggggaagtgaagctcattatgcatgttgatgtctcagcaatgaagaacaagatgggtagaagtgtcgccgcatcaagtgcacatcctgttctgctttttccaatgccagcccccattctcaaaccccagccccagccccatctccagcttcggccgcaacccctgctccagcaccagcactagcatcagcgattccatacacgggagtctcaccttcatatccaccggtttcagcatatcctggtgcaaccgcataccctgcttaccaacttctagccatgcaccatataccactgctgaatatccaccacctccgcagcaaccataccaacccccacctgctggataccctccatcctatccaccacaaccatatgagcaatcttacccaccgcaaccatatgagcgatcttacccaccgcaaccatatgggcaacaaccatacccgcccccgccagcagcacagtcgccgtacccaccagcgccttaccctggtacttatccaccaagaccctattgatatagcagcgtcagtaatgatctcaggtagaggcatcaaaagcaacaaacaacagccttgatgctatgtgatatgcacctcagcgtggattctttatttctaattatttggttatgttcctaacaaaaaatagtaccaaccgtcactgagttgttgcacatctatcacaaatcagtttaaggtcagattccaatcgtttggtgacaaattggagctgatggggtttcgttaagtgcaacggatggaaatgcattccttgatcagatcgtgtcaacagcccagtgaccagtcatatgtacaatacgtagcttgcagattgcgtcaccgaaatccatcttatattgcttt

SEQ ID NO: 90229 - DNA, 1624 bp, Zea mays
  Clone ID: MRT4577_182291C.1
aaaatcccttcggcttaaaatctcccctataggccccttcgcctccctccgattcccatcccttcggcgacagtggcttcttcctcatcgcgcactttaaaatccccgcgccgcctccccacttcctccccaccccgcgcatcgactcctccttcacccgcatagcgtagtaccatggccgccgcggcgcaccaggtctcctccgtgatctttgatctcgacggcactctccttgacacagagagggcgacaagggacgtcctcaccgaattcctggcggcatacgggaaggtccccgatgcgggggaggagaagaagaggctggggcagatgtatttggaatccactaccgggatcatcagagactacggcctgccgctcacggtcgacgagtactccaaggcgatgtcggcaaaaggcaaaaccgcttccgggagtgaagaggcttgttaagcatcttcacaagaacggagtgccactcgcacttgcttctaactccattaggagaaatgttgatcacaaacttccgaacggacgcgtgggggaaagtgtttttctgttattcttggtggagatcaagtcccaaatggaaaaccttcccctgacatatttttggaggctgcaaagaggcttggtgcaaatccatcgtcttgcttggttatagaagattctgtcgttggagtcaagggtgccaaggcttctggggcaaaggcagttgcagtaccatcacttcaaaatcagaggaaccactattacattgctgatgtcatcctatattcgcttttggactttcaacctgagatgtggggtcttcctccatttgaagatcgcattcaaggtgttctgccaattgatcccttactttcaaatgcccggataggtggtaaaattttgaacaacattcattgggtaatttcagatgactgtgcctacgagtatattcctgaccaaatatcaggaatttttttgggttgggccaagtccaaagtgcatggattctccaaggtgatcgtagctactgggtgggacttctcacagcagaccgtcgagagagtgatgcatgtacattttcttgattgctctggcacggttgaaacagagcctgtgaagctgctcataattggttacatccggaagctccaaagtgcagatgatatattgcaagcattaagcgtaactgacgaagacaggagaattgcaagggatgcattggatctcccaactttctctgaatatgctaatgaccttcatcttgcctgagtccggctttgtcattgcaagctctcacctcactacctcacgtttgtatttgttattgttaacaagcaaacatgatgatgccagctgcgttttcttctatgaagacttcatatggaatgcacttcttgctcggagaagattagagaagagaagggcggaaggcatgaagcttgtctttcatttagaggtccatcgatgttatcgtatgctgtaaaattttcacgtttaatttttatatactctcttcatccacaaatctagctcaagctaagtttgtagtaaagaatgttagcacttacatataaaattaaagttattataacaatatattttataactaatataatggtacttattatgtatt

SEQ ID NO: 90230 - DNA, 398 bp, Zea mays
  Clone ID: MRT4577_182292C.1
ccggccgggatacccggccctgagaaaccaacactttcatcaaacaactatatccaacatgccttcttacatcattacttgcaaggacgacgcgtccgacgagcaggtccagtctgtcaagcagcacgccaaggaccagggcggcaagatcacacacgagtacagcctcatcaagggctttgccgtcgagttccccgaggatagcatccaaactctcgagagccacgagcatattaagactgtcgaggccgacggcgagatgaggactcagtagatttcaggaatgcgttagaagagatgggcgacatccaatagattatctcgagctctgttgcactggcgttctggaatataattattattaaactgtcaaaaaaaaaaaaaaaaaacccgcggcc

SEQ ID NO: 90231 - DNA, 868 bp, Zea mays
  unsure (1)..(868): unsure at all n locations
  Clone ID: MRT4577_182293C.1
cattgggaccctcgaggccggccgggctcattactcaacccagtttttgtgtgcttttacgagattcgaatctgaagcgattgaacaattcctttttttttaaacttcttttttagagttcgaactttgatataacagacaaaacgccaagatgccgacattcacagtattcaagggctccaaggagggcaagattgtcaagggccaaaccaccaagcccgatctccaagacgaccaagtcctcatcaaagtgaccgcctccggcctctgcggcacagacgagcactacaagcacgccgacatggccctcggccacgaaggcgtcggcgtagttgaagacatcggccccaacgtcaaagtcctcaagaaaggcgaccgcgtcggctggggctacgagcacaactcgtgcgggcactgcgaaaagtgtctcaccggccgcgaaacctactgcccagagcgccaaatgtacggcttcgcgaacctcgaccaaggcagcttcgcctcgcacgccgtctggtgcgaagccttcctcttcaaggtgcccgacgaactcacagacgccgaagccgctcccctcatgtgcggcggcaccaccgtcttcaacgccctgcacgcctacaacgtgcgcccaacccaacgcgtcggcgtcatgggcatcggcggcctcggccacctcgccatccagtacgcgtcaaaatgggctgcgacgtcgtcgtcttctcgggctccgactccaaaaaggacgaagccatgcgtctcggtgccaaagaattcgtggncatgaagggcgccactgagctttctgtctcccgcaaagtcgacgtcttgctcgtcaccgcatccgttaccccggattggaagctcttga

SEQ ID NO: 90232 - DNA, 273 bp, Zea mays
  Clone ID: MRT4577_182294C.1
gcaccgaaacgtgattaatctattattctatatccatccataaaaacaggaaatcactgactccacctaccacgtcctgtgtaaggggataacttttttatccaattcatgagtcacacgcaaacataaacgaacgcacaacatagttcccatggttaaatatcactttcaaatcttctaaaaacaaacattcttcttgattacatttgcctacaaactaataagtcttaacttgtattagttacatttaatgcctttcgttcgtgaccttat

SEQ ID NO: 90233 - DNA, 202 bp, Zea mays
  Clone ID: MRT4577_182295C.1
tttttgggtccccaaccaaaaacctcccttcaatataagggcccggccagatttttgttccgaaagaactcttgcctgaaatgattacccctggagatggggaccccataccggatcaaaaaagaaagcaccgtttccttcctttccccaaaggggaaaaaaactttggttttaaaaggtggaaacccaatggggcccccgg

SEQ ID NO: 90234 - DNA, 289 bp, Zea mays
  unsure (1)..(289): unsure at all n locations
  Clone ID: MRT4577_182296C.1
gccccgactgcntntgctgnagacagaggggaaattgaggctccactcccgactactgaaccggnagntgacagagccagcgnaaccncaaacgaagaggaaaacaacaaaggagaaaccaaatgctactcccccgagcggnccggcgtntgaaatcatctccgagtccctgttcaacgagatgntgctgnaccgcaacgacgtggcgaggccggccaccggcttctacacctacgacgcgttcatcgcggttgcgaacgcgttcccgggattcggaaccacgggcggc

SEQ ID NO: 90235 - DNA, 406 bp, Zea mays
  Clone ID: MRT4577_182297C.1
cccacgcgtacgtccacgcgtccgtccacgcgtccggatttatactaaagcaggtccagttttggtggctgtcaatcctttcaagaaagtttcactgtatggtaacgagtacatcgatgcatatagaaataaatcaatggatagtccacatgtttatgcaatagcagatgcagcactttgtgaaatgaaaagagatgaagtcaaccaatctataattataagtggtgagagtggagcaggaaaaacagaaaccgcaaaaattgctatgcagtacctggcttcccttggaggtggaagtggtattgaatacgaaattcttcagacaaatccaatactcgaggcttttggcaatgcaaagacattgagaaatgataactcaagtcgttttggaaagcttataaaaatt

SEQ ID NO: 90236 - DNA, 338 bp, Zea mays
  Clone ID: MRT4577_182298C.1
gcctgggggtaccaattttgaatttccgttccgacccccacgtcttctaattctttaaccaaaaacaaaaggaacgggaggaggttaaatttgaatatggacgagggcacaaaccctattaatatggttgcagcatcaatcctctcgaactgcacagacacagactgaaaattcacagctcttgaacgaaccgaatcaccgcccttattggggaccctgacaaggctgacgctaacaaaaatgctattgaggccattacctttaatgaagaacattggattcaggtcaacctaacatcagagaaagctagcatggcccttcacttggccacatatggt

SEQ ID NO: 90237 - DNA, 3089 bp, Zea mays
  Clone ID: MRT4577_182299C.1
caaccgatggtcgtggcttttgaaacttaacaagtccgcacttcctagcaaagctaatctaggtagaccgagccataacaatgctgcaactgccaacacatgctccaatagagtagcttttataataaggtttaatttggtgggacagcttcatcttttattatttccaacggcccatgctttggctttgcgacctatacttcaacttggggtagcgccttcttgaaacaatcctgctccagcagtgccacttgttgctctggggactcagaatggaactattgaaggtgtacatggggtggcaaatgcagtttcagccagtttttccgttcatagcagcacagtgagaggattgagatggcttggcaactcacgtcttgtttcattcacatataatcaggttaatgataaaactggtggatacaataataaacttgttattacatgcttaagaagtgggctaaatcgctcattccgtgtgctccaaaagcctgaacgtgcaccgattagagcattgagggcttcttcatctggacggtaccttctaattctgtttcgcgatgctcctgttgaagtgtgggctatgacaaagaaccccatgatgtgaacgtccttggcgcttccttttacagtattagaatggacactgccagctgcacctcggccaggtcaaaatgcatcatctaaacagtcttcaacctccaaggagcgatcagcagaggcttctggtgcagaaagttctgatgaaacatgtgaaagttttgcttttgcattagtcaatggcgctcttggtgtgtttgaagtgcatgggcggcgaatacgagattttaggccaaagtggccctcgtcatcatttgcatcttcagatggtttggttactgctatggcttaccgccttccccatgttgtaatgggggatcgatcaggcaacattagatggtgggatgttacaagtggcctttcttcttcttttagcactcacagggaaggcatcaggaggataaagttttctcctgttgttcatggtgatcgaagcagagggcgcattgctgtgcttttctatgataatacattttcgatatttgacttggatagtccagaccccttggcaaatgcccttcttcagccgcagtctcctggtacccttgtcttggagcttgattggttgtcaacccgaacaaggaaggatgaaccacttatgttatgcattgccggagctgatagtagcttccgactgattgaggttaacattgatgctaagggcagttctatttcgaagccagtagctacgaaagagaggtttaggccaatgccattttgtttgccagtattatttccaacggcccatgctttggtaaggctttgcgaatgattcttcaacttggggtgaagccttcttggtttgaatgcaataatagtgataaattaactggggacagctttaaggtagcaccaacatttggagatcttcgtagttacatgattgagacaacactccctcctattggtgacgccgttgtggctgaattgctccttaaagtgttggaaccatacagaaaggagggttgcattcttgatgatggaagagccagcctatattcagctatagtgaacaagggagcttgtgcaagatttgcatttgctgctgcgatttttggtgatttccaagaagcacttttctggctacagctgcctcaagctcttcgccacttcctgggtaaatcaacaagtagatcaagagagaagatctcacaatcaagtttacatcctgattctgaacaaagctccagatttaatcggatagcttcaagagagagatctgcttctgaaaagttcacgaaaaatgctgcgaattatggccaattaagctcaatggcatttaatcaagagcaactatggttcaatgcaagtgaaaggataccttggcatgacaagctcgatggtgaagatgctttgcaaaagcatgttcatgagcttgtctctctcgggaacttagaggctgcggtttcattgttactttcaacgccccctgaaggatcaaatttttacccaaatgcattaagagcagttgtgctgtcatctgcagtctcacaatccttgcatgaacttgcagtgaaggttgttgcagccaatatggttagaacggacaaatcgctatctggcacacatcttctctgtgctgttggaagatatcaggaagcatgttcacagcttcaagatgctgggtgttggaatgatgcagctactttggccgcaagccatttgcatggatctgactacgcaagggtgctgcagaggtgggccgattatgttcttcgtggtgagcacaatatgtggagagctcttatcctatacgttgctgctggagcactgccagaggctttggatacactccgcaagagccagcgcccagataccgcagccatgttcttgctagcctgccacgagacctactcacaagccttatcagaatcagagcccgaggacgacacttccgtgttagcactgacgccgacgccgacgccggagcagacggagaacctccggttcccttccaagaatgtggccgacgaggacctgatcgcagtcagtgaggtcttcgggcagtaccagcagaagctggttcatctctgcatggacgccgaaccgacgtctgactgaatcgcacgccttgtcgcatggcagactgatgcgaagctttttgttctgtctgttggtaggtaccagacgtccagacatggcatcgggactgctgatgtggcagaatctgatggcaggaggcaggaacagacatgcagtgctgtatcgtaggtgccaatggttggcactgtttatacatacgtaagcatttgtatttggtacaagctatgtttttttttctttggtgcgcaaagagcgagtgcgcagcgaacttctcttgtggccgagatgagatgagaacagatgccatcgaggcagcagcagacgatatacttacacctgtacacccatgacagtttttgtctgaagattggttattatatgcttatctgcaaaaacatcgcttctggcccaaaaaaaaaaaaaaaaaaaaaaaaaaaaaaaaaaaa

SEQ ID NO: 90238 - DNA, 1873 bp, Zea mays
  Clone ID: MRT4577_18229C.1
attgggtacctcgaggccggccgggaaatgacccaagccgaccaagttcacgacagtggccctaccggagacggagaggagcaccgtccaccgccatgtcctccactccagcccaagcaaggcacatatacccccgtcccatcgtatacgaatcacagacaaagcacgagcggtggtagctggccagccaccatggctccaccacctctgttcccgctcccgcctctcctcatcctcctcgtcatcgtgcctctgttccccaccgccgcgcggacggccacgacgctgccgctgtaccgccacctaccgcacgtagccgaggccgtggcatcgcaccaccacccgctgtcccgcctggccgccgcgtcgctggcccgcgcgttgcacctcaagcgccgggaccccaaccaccacagccagaaaggatcaggcggccacccgtcagtaccagccaccgccgcgctgtacccgcactcctacggcggctacgccttcacggcgtcgctcggcacgccgccgcagccgctccccgtgctgctcgacaccggcagccacctcacgtgggtgccatgcacctcgagctacgagtgccgcaactgctcctccccatccgcctccgccgtcccggtcttccaccccaagaactcctcctcctcccgcctcgtgggctgccgcaacccctcctgccagtgggtccactctgccgcgaacctcgccaccaagtgccgccgcgccccctgctcccccggcgccgccaactgccccgccgccgccagcaacgtctgcccgccctacgccgtggtctacggctccggctccacagccggtctgctcatcgccgacaccctgcgcgcgccgggccgcgccgtccccggcttcgtcctcggatgcagcctcgtgtccgtgcaccagccgccgtcgggcctcgcgggcttcggccgcggcgcgccgtccgtgcccgcgcagctcggcctcccgaagttctcctactgcctcctgtcccgccgcttcgacgacaacgccgccgtgagcggctcgctagtcctcggtggcaccggaggcggcgagggcatgcagtacgtgcccttggtgaagagcgcggcgggcgacaagctgccgtacggcgtgtactactacctggcgctgaggggcgtgacggtgggcgggaaggcggtgcggctcccggcgcgggcgttcgcgggcaacgcggcggggtccggcggcaccatcgtggactccggcaccacgttcacgtacctggacccgaccgtgttccagcccgtggcggacgcggtggtggctgcggtgggcgggcggtacaagcggtccaaggacgcggaggacgagctggggctgcacccctgcttcgcgctgccgcagggcgccaggtccatggcgctgccggagctgtcgttccacttcgagggcggggcggtgatgcagctcccggtcgagaactacttcgtggtcgcggggcgcggcgccgtggaggccatctgcctcgccgtcgtcaccgacttcagcggaggctccggggctgggaacgagggcagcggcccggccatcatcctcggcagcttccagcagcagaactacctggtggagtacgacctggagaaggagaggctggggttccgccggcagtcatgcacgtcgtcgccgtcgtgaggtctcacgacgtcggcatggcggggatcggagtggaggccagtaattactccagagtccagtccacgtaacgctccaaattccaattccaaaagctggctgcttgatcttttgttagtgctcgtgtactgctaataaaaactaaatttactgtcatctactactactattaagttattgaaagacgtggcttgctttgggtttc

SEQ ID NO: 90239 - DNA, 129 bp, Zea mays
  unsure (1)..(129): unsure at all n locations
  Clone ID: MRT4577_1822C.1
cccctggctcaggcctgaagagaagacccaggagacagncgagtaccgcaatgaggggggagacatggaccccatccgcgtccacacagtcatcatccccacccagcgacgacagagacagagaaccaa

SEQ ID NO: 90240 - DNA, 1760 bp, Zea mays
  unsure (1)..(1760): unsure at all n locations
  Clone ID: MRT4577_182300C.1
atggaaaagccagcctatattcagctatagtgaacaagggagcttgtgcaagatttgcatttgctgctgcgatttttggtgatttccaagaagcacttttctggctacagctgcctcaagctcttcgccacttcctgggtaaatccacaagtagatcaagagagaagatctcacaatcaagtttacatcctgattctgaacaaagctccagatttaatcggatagcttcaagagagagatctgcttctngaaaagttcacgaaaaatgctgcggtaatcgttgaatctgatgcaatgtactttaacactgtatgagtgcatcattttggtctttgggccttgtaataggaactgacaactcttgtctctcctatctatttatttctccttgatgaaatgacacacaactctcctgcgtttgttaaaaaaagtgcatggttttaactctgtgatacttgtgtctattctcttgaattagaagttcaatctttgtgcagaattatgggcaattaagctcaatggcatttaatcaagagcaactatggttcaatgcaagtgaaaggataccttggcatgacaagctcgatggtgaagatgctttgcaaaagcatgttcatgagcttgtctctctcgggaacttagaggctgcggtttcattgttactttcaacgccacctgaaggatcaaatttttacccaaatgcattaagagcagttgtgctgtcatctgcagtctcacaatccttgcatgaacttgcagtgaaggttgttgcagccaatatggttagaacggacaaatcgctatctggcacacatcttctatgtgctgttggaagatatcaggaagcatgttcacagcttcaagatgctgggtgttggaatgatgcagctactttggccgcaagccatttgcatggatctgactacgcaagggtgctgcagaggtgggccgattatgttcttcgtggtgagcacaatatgtggagagctcttatcctatacgttgctgctggagcactgccagaggctttggatacacttcgcaagagccagcgcccagataccgcagccatgttcttgctagcttgccacgagacctactcacaagccttatcagaatcagagcccgaggacgacacttccgtgttagcactgacgccgacgccggagcagacggagaagctccggttcccttccaagaatgtggccgacgaggacctgatcgcagtcagtgaggtcttcgggcagtaccagcagaagctggttcatctctgcatggacgccgaaccgacgtctgactgaatcgcacgccttgtcgcatggcagactgatgcgggcgtggattctccgtttttgaagcttattattatcaacaggttgcaaattccttccaagtttctgcgaagctttttgttctgtctgttggtaggtaccagacgtccagacatgacatcgggactgctgatgtggcagaatctgatggcaggaggcaggaacagacatgcagtgctgtatcgtaggtgccaatggttggcactgtttatacatacgtaagcatttgtatttggtacaagctatgtttttttttctttggtgcgcaaagagcgagtgcgcagcgaacttctcttgtggccgagatgagatgagaacagatgccatcgaggcagcagcagacgatatacttacacctgtacacccatgacagtttttggctgaagattgggtattaaatgcctaactggaaaaaaaaaaaaaaaaaaa

SEQ ID NO: 90241 - DNA, 491 bp, Zea mays
  Clone ID: MRT4577_182301C.1
ataataagacaaccgaatttggcgtatatatggcataaaatgaaatattactggtccaattaatatctggtaccaggggcagctattagcacaactcaagatgcccgtgggcacacacccatttatggacgctagtactgaggccaaccatgcgtacgagagatagcacatctgaacaactatagaggctctcatatcatgcacacacaagagaatatctatgaaacgcaaataatataaagcgctattattttctttaaacctcctaccataaggcggatgaataatcatcatatggataccggactatcaatgttcatagtataagcacgagtagcatttagctttgacaccgcatgtacacccaaatgccaactgctttgatttcgacgcagacttgcgaactaatcgcaaacttcttgtaatgctgcaatacctggatgatcgtgatctgcttacccaagctagcactcatacctggtaggatattt

SEQ ID NO: 90242 - DNA, 237 bp, Zea mays
  Clone ID: MRT4577_182302C.1
tttaacacaccacaattttttttttgaaatgatctgtggagggtgtttttaaaaaacacgcttctacatattttttacaaaaaaaaaaaacaccatggggggactattttatggagccactacccatcttttatttatgctggggccatgacacaatcaattggggggtgggggaagccaaactacccacaggtactcttttattactccgcagccatgatgcattcaattggttgt

SEQ ID NO: 90243 - DNA, 2081 bp, Zea mays
  Clone ID: MRT4577_182303C.1
gatacaaaaaccaaacgacgtttatatcagcatagccagcgttccatcatctgttgcacataattacaggttccaagctcatatttttacaacccatggcccaccaaaaagcttgagtggtctaccatacatctatctggcagaccctcacaacctacacagaaaaattgttgacgtgtggccacagcaacccgcctgcgctactcttttttttttccactcagatacatgtaattacaccagaagccctcaacatggggtgcaaaaaaggatgtacacaagaagcatatttacgtcaggatagaatacacaccgtgaccagtacatgtatatatatactctatgcacacataggagcctcgcggggtcagtgcagaagctgattgcagctaaaaataatctgctggctgatgtttataacctcatcatctggttgccggagcctgtccccctctcgcctgaatcaccggcggcatggctcggagcctgtcggtgacctcggtgaatgaggggcgggcgtcagggttcgccgaccaacattgctccatcagcttttgccagtccgggtcacacttctcaggtattggaggccggagtgtgttattgacaataccccctatgatagcaccacaatgcatatttgcatacggttcctcaccagtcaagatctcccataaaactatcccaaaagagaacacatccacctgcatgtgtcaaaccaaatactcgttacgtattagcctgtcatagttccatatgcaaagagctatcaggagcatggtcagaaaaaaaacttgctttctcagagactttgctgctgctgccattcagtagctctggtgccatccatggaagagtgccgcggacacccccagaaaccagagtgttgcgcttgatccttgataacccaaagtctccaaccttgcaaattggcctctgaggatctctcaagttaacaagtaagttgtcgcatttcagatcaaaatgcactatgcttttggagtgcaggtattccatcccaaacgccgcttccatagcaattgtaagttttctccggcgatcaagcattctgtctttccttaaaagaacattccttagtgagccattcaccatgaattcagtcacagtggctagtgttcctccagttccatcagggaccacaccatagaaagcgacaacatttggatgatgtaacttcgaaagaatctttgcttccctccaaaagtcattggtaagtttctcttgttcagatgatcttccagcaaaacagcttttcttgatgcgcttgatagcaacatcagttcctcgccactttccatagtatacagttccaaatgttccggatcccagttcacgtagttcctcgaggtcaccatttttaatgatctgtaatccatacatgctggcttcaagttcagcaactacagcatcgctaatggatccatcggcaactccatcatgatcctcattagctaactctggcctgttggtcctactatcgtcatccttctgtgatgaaagaatcacctcttggtgttcttcagctgccattacaacctgaggaacaactggtctcgatgatggaatgcctgaaggcacattatcagtcacgtcctcaactatgacaggtacattcatttgaacattatcgtgcagcctgtgtgctagctttatgtgttcattatcggtggtggtatggtcacatccaattattccttcactgcaggcgatattgccccaatcacgaaggggatcctctctcctagaaacacagtccacaactggattttgagacgaagacacagagaggccaccattgccgtgcaagttcacacttggatcagtatcaatcagcccagtatgtagcactgatgacttgtgcaaattatcattctgatatacaccagattctccattgcccattgatctttgcgtgataaaagcttcagaagactttatatgcaacagatcctgaggatttggagcaaccttatcagttccatgcacatagccagtagttccataatctttagtaacaggccctgaattcagtttctctacatgtgatccggacgcgtggg

SEQ ID NO: 90244 - DNA, 200 bp, Zea mays
  Clone ID: MRT4577_182304C.1
agtcgtggtggcttgctggtcaggttactgaaaaaaaggataaggaagttcaggttttgttttgaatggcaccccttactcaattattaattactttttcatttttccgtttccactacttgtgaccttcacagccttcccgcctacgaccttttctgcatttacttcgtcctcagtggttgagatcttcttgttcgtac

SEQ ID NO: 90245 - DNA, 335 bp, Zea mays
  unsure (1)..(335): unsure at all n locations
  Clone ID: MRT4577_182305C.1
ccctcgcgtatcatgtcgnagctgccgncgtttgtcatgaactcaagactcccgacacggagcatcgtcccgggttggaaaggttgctggagactctacccatttggagcttgacgggaagctgttcgtcaacacgcagcagacccctacctggcgcgccaactgtcggcgtttcgaccccgggggtccctggaccgacgagtaaattgtcgctgcgtgtcccagcccagatgggtcggcgtgagacgggacacaaaggggggagaacagtaaggggaaaccacggccttcgtgttgtcctgcgcccaaggcggatggatgcgcttgcaaagggg

SEQ ID NO: 90246 - DNA, 1330 bp, Zea mays
  unsure (1)..(1330): unsure at all n locations
  Clone ID: MRT4577_182306C.1
ttnttttttttttcttgaacaaaagaaagtcatgatatacttagttatcttctgtggtacaagaagtcaccaaaagaatctatggtagtctacgcaacagagtgtcatcccccaaaacccatgacatgaaaaatctttgaaacagtgtctttgtaagaaccaactaatggaactagaaactaaatgctcagctacgaggtagcaaagagaagcatcagacttttgaattatgatgattacctagtgggtatttcttaacttctgttccactttcacaatttgctgagcaaaatgagcccgatgaatcaaggaatggatttagaattctgatacacaccgtcaggagaggccataaaggcactgaatacacagtcatcttgcgctacttgagctgccattccgaccacgtgaacccttgccattgctactggtacgcagcttgtgcttctcagccagctcaggatggtagtattcaaggtaccaccgcacaaacttcttgagccctgtttgcagatctgtggatggccggtaaccaagctcccgttgcgcaaggcttacattggcatgcgtgtatggcacatctccattccttggcatcttaacaaccttcctcacagccttcactttgagcaatttctccagcaaatccactagctgtgtaacaggcacgggtgaagtgttgcctaaattgtatgtcctgaacggtgctgtacctcgcttcttgcctccactgcctgtgctccgacctgctgtatccagtgccgctacacaccccttcacaatgtcatcaacgtaggtgaaatcccgggaaatggtagtctggtgtgaacctccaccggcactctcgtagaccgtaattggccgaccagcaaggatgtccttggtgaagaagaagtacgccatgtccggacgcccccatggcccatagacagcggacgcgtgggcggacgagtgcatagatgtggttgtccacatgagcaatctcctcgccggccttcttggtggctgcatagagagaggctggtcgatccgtcctgtcatgctcggagaaaggcacatgggagttgagcccgtacactgaagacgacgacgcccagacgatggcgggctgagggttggctgagcgcgccgcctcgagcagcgccacgagaccggcaacattggcgcgcacataagacatggggtccacgagtgcgtgccgcacgccggcttgcgcggcgaggtggaggacatgtgtgaagggcacgacgtcgaacagcttggcgaggagctcggcgtcggcgatgtcgccgtcaacgacgtagacccccgagcgggccaggagtgcggc

SEQ ID NO: 90247 - DNA, 390 bp, Zea mays
  Clone ID: MRT4577_182307C.1
gaactggcagcatcagaaatggcagttgcatatagctcctcgaattgggtattattagttgagggatgacatccatctactgctgattccaagaacggaagcatttatctgatgtcctgttaagtgtgtgcaaggtcattggatgactgcattccatttggcttatcgattggttttattttgcacaaaatcggatgtcattccatttggcttattgagagccctgaagcaagattctggtatttcaacttctggaccaatcagctcagtctcttgttcgtgagcaaaataaccttcagttggcacatcttccagcactacaagattattcagaatatgcatactcatggaatatagcttcaatcccttgccttttctaacaagttgggt

SEQ ID NO: 90248 - DNA, 317 bp, Zea mays
  Clone ID: MRT4577_182308C.1
aaagaaaaaaaaaaaaaaaaaaaaaaaaatataaaaaaaaaaaaaaaaaaaaaaaaaaaaaaaaaaaattttacaaaaacaaccatccaacctaactcaccactactatactgccacctaactcccatctactcacccttaatttacaacctcttacctatcatttccaccgtcgctccccatcaaaacccccttgttacccatcttactttacccgactcgcttaatcatttccacccctactcttatatctcttctaacccttccaccatcctttctcaccactactacactctctatctccaatcattatcccc

SEQ ID NO: 90249 - DNA, 865 bp, Zea mays
  Clone ID: MRT4577_182309C.1
ccctccgttcccctcctgtccgtcattttctcgtcatctacatatctccggctcgccgtcggcgtcgccgcctcctcctccttcgcccgctggaggcgcccatagcgacctcaccggtgggtttgctgaagtgacatcggccgaggtggaactggttggggggagtccatttcgggttcgagcagcctgagccggcgcgccggcagcgacggaggggcctcgcctccgtccccctctccgatggctggcagcagcagcggccccgccccgggccaggcagccaaggacaagaagatggcgtccgcggaacagctggtcctggaactctgcgaccctgaactgcgcgagaacgctttacttgagctctccaagaaaagggagatttttcaagatcttgctccgctgctttggcactcatttggcacaattgctgcgttactccaggagattatatccatttacccgtcactatcaccccccacactgtcacctggagcatcaaaccgagtttgcaatgctcttgcacttctgcagtgtgttgcatcgcaccctgagaccaggatccttttcctaaatgctcatattccattgtacctgtaccctttcctcaacactaccagcaaaacgagaccttttgagtacctaaggcttactagcttgggggtcattggtgctcttgtcaaggttgatgatactgaagtcatcagttttttgctgcaaactgaaataattcctctgtgcttgcgaaccatggagatgggtagtgagctatccaaaactgtggcaactttcatcgtccaaaagattcttctagatgatgttgggctgcgctacatttgcgccactgctgagcgtttctttgccg

SEQ ID NO: 90250 - DNA, 1009 bp, Zea mays
  Clone ID: MRT4577_18230C.1
gaggcccgtccgtacatggctggaccggaccagactggtcgaccccctcgcggcgagatcgatcgtagccgtcgacgggcgagatggagctgggagtccgtccgtcgccatcatcgcggactggcccggggccgtcgccatcgcgcccacgcacgccccttcctccttcccctccgcccaactatgttccccaaaccgcacgcgcgcgctcgactccccgccgctgtcgtcgtcgtgttcgcggaggagatccaccggggtcgtcgtcaatctccctcctcccttgctcccgcagcctacccctccacgcgtgccctcgctaaaccctagcttgggcactcccccctgccccggcggcgccaccaccgcgccgcaccgaccgcgtgcgctgacacgttggaatgcattgtttgaagtgtgatcattgaggttctggttaaataagcttctagaatcgagtgactcccctcccataaatggataagatacaatctgattgcccttatccgggatgtttcttttgtgttatgaaagaggcgaaccctagtaaacgaagagcaagtgtgctaaagttttttagggaacttccttcccaagatgacgatggtcaagttctccctgtcagcggtctctggaacacagcgatggctcacccaaatgatcccgagttcatcaacttgggcatatttgaatgcatggcagctcttatatggaaagggttgaaaaataggcgttggcttgcacatgatcagaatatttacgtcccatattatgcagctcacataattggatcgtacacaatgaatatggaggaatttgcagagtgtgctgttcgtgctggtgtaatacctccattagtcgaactgttaagaggtaggttgacatgggtcgagcaaagagttgctgttagagctttggggcatttggctacgtatcctagtacattccctgcagttgccgataaatggggaagtacttggacttgccactcaacttgctcaagctccct

SEQ ID NO: 90251 - DNA, 690 bp, Zea mays
  unsure (1)..(690): unsure at all n locations
  Clone ID: MRT4577_182310C.1
gcgtccgcccacgcgtccggctcgaaatgcatggggagtccgaccctaccatggnatggggacacggaattcttatagatgttcggtgatccggattggggatttgggatcctgagcactctggtgaagctcgaagagagtgaccacatacgccatggtagccacacatgctccatctgccggtaccctatcattgggtcacggtttaaggaaacaaaacactcattcagcctgtgcaaccggtgctacagtgaagggaaggttccttcggccttcaagttggaggagtacaggttcaaagaatacggtaacgagtcagaggccctcattgataagtgcatgtgcttcaatttacattctaagaagctggaaaccgatgcctgatcattcaaacttggatttcaagtgctcaaagcatgaatctgtgtatttcctaggtgcaaagatgtctagtcagctctcccactctcttgtaaacaaaggtgccatcattcggagtttctctaaatgtgtcccagttactaataaccctgatgtgctagctggtgttttaagtgtacggaaacgagtaaatgggaattccatacactctgttaccccagtccaatacaaccttgctgacccttgcatatttttgtttgagcaagaacaattttggggttctcttcaatgctttttgcctttcgtctc

SEQ ID NO: 90252 - DNA, 620 bp, Zea mays
  unsure (1)..(620): unsure at all n locations
  Clone ID: MRT4577_182311C.1
gggaaaaaaaaatctcgctggaggacctcaacgacaacgttggggtgcggcctgggcagagcatggcgttcgtccatgtgctgcttagtaccagactatagaaggataccaccctttatgagagagcgtctctcgtccatacaaggaaacaattcgtgcctttttggtctactttcatacctgtaaatgcttgtgtttgtttgggtttcttcacgtgcaaggttttcctttgttattccaagttgtgtatcgatgtcgctataggccacagccgcctccagcgcacaaagaganccacgtctcctcccctcccttagccttacccccacccaatccctcaacctctcctacaacaccttctncggcccgctccccgacgacattgcgcgcctcgctttcacagnggcgagacaacagcaagtgtggagtaatctataggttattttctggtatactggttccattgaagaaagatccccgtgctccattttaccatatncagatgccatctttcaaacatggtccaataaactccctggatcagaatacaatgttgtatggtccttgatgaacaaacaataccctggggtcatagattgtgtgnatgcatgcttgatgag

SEQ ID NO: 90253 - DNA, 193 bp, Zea mays
  Clone ID: MRT4577_182312C.1
ccctcgcgttctccccgagcccctctccccgctcccctcggttcgccgaatcgagccatggcgacggtccccggcgagccggagcccctctccgacgagctcttcggcctccagggttcgcctacctcagccacggcgaatctctccggcgagccggagcccctctccgacgggctcttcgggagcgacctca

SEQ ID NO: 90254 - DNA, 334 bp, Zea mays
  Clone ID: MRT4577_182313C.1
ggaagatgcaacatatcatattttttttttatttatattcaacccggggggtaatttgcaccccccccccccctgggtttgggcactatattcatgatcctaatctaaaattgcatcaagaaccagcatgttcctcatcccctgttcccaaaacaacacagggaaagcaatttgatcagaacccaaattgagggaaccctttgccattgacccttgagagggcggcactcgatgattcaatcctcgcgaactggtctgttttgcaggcacctaacttattggagagcctttcgcacaactttttatacaacgtaaagtctccgggggatttcct

SEQ ID NO: 90255 - DNA, 3955 bp, Zea mays
  Clone ID: MRT4577_182314C.1
cctcgaggccggccgggaagcataagtcaaagaccacatagatctcgtctccctccgtacccctcctgtccgtcattttctcgtcacctacatatctccggctcgccgtcggcgtcgccgcctcctcctccttcgcccgctggaggcgcccgtagcgacctcaccggtgggtttgctgaagtgacatcggccgaggtggaactggttggggggagtccatttcgggttcgagcagcctgagcctgcgcgccggcagcgacggagtcgtgcagttgagttgagatggcaaacattccccactccttcgcaggggcctcgcctccgtccccctctccgatggctggcagcagcagcggccccgccccgggccaggcagccaaggacaagaagatggcgtccgcggaacagctggtcttggaactctgcgaccctgaactgcgcgagaacgctttacttgagctctccaagaaaagggagatttttcaagatcttgctccgctgctttggcattcatttggcacaattgctgcgttactccaggagattatatccatttacccgtcactatcaccccccacactgtcacctggagcatcaaaccgagtttgcaatgctcttgcacttctgcagtgtgttgcatcgcaccctgagaccaggatccttttcctaaatgctcatattccattgtacctgtaccctttcctcaacactaccagcaaaacgagaccttttgagtacctaaggcttactagcttgggggtcattggtgctcttgtcaaggttgatgatactgaagtcatcagttttttgctgcaaactgaaataattcatctgtgcttgcgaaccatggagatgggtagtgagctatccaaaactgcatagaagcaggagctcgcacggcagttggatctcatcgccaggcaggtggaagtgtggttccagaacacacatgttcagataacacacatgttcatgcttatgctgaccccacacaggttcatatcgtcttctgcgtgtatgtagttgtttcttcttcaattctctttgtggggaaaacgttaatgtaagttatatttttactttttgcacctctcactattgtttctacatctttctttcttgaaaactcgtgaatctgaattgtaatgggatttccttccaccaatctacccatcatgcagtgggattttcccagcaatcagcttgataggcgacatcgtcattgtgggggtgagtgagtctaccgctattattcagtctgagtccactaaaccagaattccacaggatatgattgtacctatatttcctgaaaagacaaatgaaacaaacatcaaaagcaagtcactgcctattatttttgacctcctaatcttctacttcattggatttgcattgttctggctggaggcttttctgagcatgtgggtcattcaggtgaagttactgcctaccgcttcactattcatccgtcttgatactttcagttggttgtgaactataagctttgcgtcccgcggcgtggaaggaaatccacattacaatggtagtggcattttatagatttatagattggcataccactattcaatggtagtggtgaattatctagaagcaacaaagcaacagatttaaaatgccagttatagagttaggcttagttttagttaaaatattagtggtgaattatctaggcatacatccagtccacaccctcaacataccgagttaggctcagttttagttaaacaacgtcttggtttcttgtgcctactgatggcttttcttaatattatatcaatgacatcttaggttttggaaggtggtgcagttgtcaggactcttagagatcatagtattccttctaatggggatatcaatgaaagtaaagtttcttatttgttattattatattcttgttggtgcaacctgaaaatgaaaagccaattactgaaagcggagatgaaatctcttatgaaggagcaaaggcaaaaagtccaatatatttattatcgggactacgaaggagatcaattgactgcatctaaactgtgagatgtgtgcaagattgggtttgttgtatttggagttcctcatagaaaaatcatacatatgctctagagttcctcatagatttggtgctcgcgatctgccatggatttgatttaagatttgggagatcggtcgtgttcgcgctgcgagattcgattttttatgcatgttttattcacgagattgcaagaacgggactgctaggcaagatgagtatacctgaaatttaggtctagaaattcactgctatcagtctcagaataggctaggttgaacttatacatgagatatccacaggtccaggtgcattgtttgaatttgattagaagtgtgtaatgttagttcttataaaaaagcaactcaaaaagggccaaagtttggatgtaccttctgggttattgacgcagatatctttatcactatatgtgcttggtttgctcagtggcacatttaatctagagaatttcagtctccctccataaaatggtggagcagaatgacttctaaatctactacacttggaagttttgggtctttgatttagtccagagttgtgttgattcaacaaatcttgagtaaacaggttgccatttgccatattcaaagaaggaacattcaaatgacaaccattatcacctgctgtctcaggagaaatattgactgacaacctcatgtcaaattttgatttccaagttatcaggtcttcttcagaaccaagctggtcggttgaaccacacttatcattgaagtaattaagcggttgtatttcattgttgatgtaatcaaaatttttagttccttcaaatataatagatgaatcattgctaaatctaacattgttgtcaatgttttcatagttccaagaacgaaaacatttatctgatgtcctgttaagtgtgtgcaaggtccttggatgactgcaaggtgtatcaaccaacaaggatgggtgagaaaaatgatttaaagtatccttgagggaggacctactctatcaagtcactgttccactagagcatgaatataagggaaattcatctggtcaatagcaccaacctctagcccttcaacacatccagttgcagtccccaacttcttactggtgctggactttctcaaaactctacaggtgcccctggaagttctaccaccatcatgttaaaatccattatcgagtaagcaatccccatttaacttttcaaacttgtcatataatacatcctagcctgaggtctgtgccttcaagttggctttattttgcacaaaatcggacgtcatttcatttggcttattgagagccctgaagcaagattctggtatttcaacttctggaccaatcaactcagtctcttgtttgtgagcaaaataaccttcagttggcacatcttccatcattacaagattatcagaatatgcatactcatggaatataccttcagtcctttgccttttccaacaagttgggttaacacttgagatatcatcatttaattgggaagggccatcgtctaaccacttataactgtcattttcaggataatgcatttgcttataccctaacttgtaatcaatactggcaacattgtcatccaggcggcatgaattagtgatccttccagagaaacatactatgcaaaacaaatgtcatattaataatctagaaacaactttgagatgggttttatctattgatgaggaacctgttaagaaatgtttgattcgcctgtagctgcaaggaatgctaacttttttttggttggtctctgcggaggatgccattgtcagttgtaaatattggcagcatattaggaaacaaattatccctattttgagttgcacacacatttcatgttattagtgtgaatttgtgagatattgaggttgatgatatatatgttgttcatttt

SEQ ID NO: 90256 - DNA, 372 bp, Zea mays
  Clone ID: MRT4577_182315C.1
cccacgcgtccgcccacgcgtccggccttcatggcctacgaggagaacgtggcgggcgtgttggcgcgcaccatggcggccgtgtcgccgtacgcgacgatgcacgacgacgtgacgtccgccgcggaggagcagcactcggcgctcatcctgctgccgttccacaagcaccggtcggtggacggagggctggaggtgttccacccggagatccaggcactgaaccagagcatccagcgcttctctccctgcaccgtgggcatcctcgtcgaccgcggcctgggcggcgtgccgggcgccgggtgccgcgtggcggcgctattcttcggcgggcgcgacgaccgcgaggtggcagcgctggcgatccgtatg

SEQ ID NO: 90257 - DNA, 554 bp, Zea mays
  Clone ID: MRT4577_182316C.1
gcgatgagctgaacgaggatgcaatgcttgggagacttgagggtatgaaggacgtgatcgaacaagtgaacaggcaatttaaagatccattgagttaagttcattattcaagtagaagttgtcgagtcaaaattgctaaaagcacggataaaaatgcaacagaaatacattgaccagttccatatgttatatgatgacttcaacatcaccaaacttcccttgctttcagaagaggtttgtggtgttcaagctctacaaaacttttcccaccgcttccttacaccatacaagtctgctcgtaaaaggggcaccatcgaggagctggaggagagaataactatactaaaatctgcattgcaagaagctgaggcagaattagataggattaggaaaggaaagcagtcagcgtgatccttttcccccataggttaaggtatgtaaagcctggcagaagctactaagaaaacagagttagagagacgctcaaatgtcattacactcttgttgatttcactaccatgtttcctcatcgaaatgtttagatttgtcatagc

SEQ ID NO: 90258 - DNA, 1481 bp, Zea mays
  Clone ID: MRT4577_182317C.1
ccggccgggaattatttcattttccacctagacaattccagtaccgcttctgcccccagcaggtgccagcgccatcgccgttcgcctcctctccacactccgccagatcccatccctctcgcccaccgcgcgggtatcggagtcggagcatggcgtctgcagtggtggtggacgccggcgacgcgccggagcccacggttcgtaacctcctggaccaggagtccctcaagtgggtcttcgtcggcgggaagggcggcgtcggcaagactacctgcagctccatcctctccgtcctcctcgccggggtccgcccgtccgtgctcgtcatctccaccgaccccgcgcacaacctcagcgacgccttccagcagcgcttcaccaagttccccactctcgtccgcggattcaccaacctctacgccatggaaattgacccaaaggtagaaaatgatgatttatccaatgaaggaatggaaggattcctgtcagaactgacaaatgcgattccaggagtagatgaagctatgagttttgctgaaatgctaaaattagtccaaacaatggattactctgttgttgtttttgatactgctcctacagggcatacattacggttgcttcagttcccagcaaccctagagaagggtcttgagaaaatgatggagttgaaaaatagatttggcggtctgttgaatcaggccagtcgcttgtttggtcttggtgatgagctgaacgaggatgcaatgcttgggaaacttgagggtatgaaggatgtgatcgaacaagtgaacaggcaatttaaagatccagacttgacaacttttgtatgtgtttgtatcccggaatttctttcattgtatgaaacagaaagattggtgcaagagttagcgaagtttgagattgattcacacaatattattattaatcaagttatatttgatgaggaagctgtcgagtcaaaactgctaaaagcacggatgaaaatgcaacaaaaatacattgatcagttccatatgttatacgatgacttcaacatcaccaagcttcccttgctttcagaagaggtttgtggtgttcaagctctccaaaacttttcccagcacttccttacaccatacaagtctactcttaaaaggggcaccgtcgaggagctcgaacagagaataactatattaaaatctgcactgcaagaagctgagacagagttagatagggttaggaaagggaagcagtcagtgtgattttttttccacaggtcaagtgtgtaaaaccagagagacgatcaattttttcgtgtcattacactcttgttgatttcactatcatgtttcctcatcgaggagtttagacttgtaatagctatcggcagagaagtgtttgattcacacaagatatatagatccattctttttgccggttaaaaaaaaaaaaaaaaaagaagacgtgaagatcagttttagaatcccgcctacccgtgaatt

SEQ ID NO: 90259 - DNA, 1366 bp, Zea mays
  Clone ID: MRT4577_182318C.1
gctgctagggccgggacgtagactcgaggccggccgcatctgccgccagtgaggcaccaccgccgttcgcttcctttccagcctccactccgccagatctcattgcctcctaagtcctatcgcccaccccgatcaccgcgcgggtatcggagcatggcgtctgcggcggcggtggacgccggcgacgcgccggagcccacggtgcggaacctcctagaccaggagtccctcaagtgggtcttcgtcggcggcaagggcggcgtaggcaagaccacctgcagctccatcctttccgtcctcctcgcgggggtccgccagtccgtgctagtcatctccaccgaccccgcgcacaacctcagcgatgccttccagcagcggttcaccaagtttcccactctcgtccgcggattcaccaacctctacgccatggaaattgacccgaaggtagaaaatgatgatttagccaatgaaggaatggagggattcctttcagaactgacaaatgcgattccaggagtagatgaagctatgagttttgctgaaatgctaaaattagtccaaacaatggattactctgttgtagtttttgatactgctcctacagggcatacattgcggttgcttcagttcccagcaactttagagaagggtcttgagaaaatgatggagttgaaaaatagatttggcggtctgttgaatcaggccagtcgattgtttggtcttggcgatgagctgaacgaggatgcaatgcttgggaaacttgagggtatgaaggacgtgatcgagcaagtgaacaggcaatttaaagatccagacttgacaacttttgtgtgtgtttgtatcccggaatttctttcattgtatgaaacagagagattggtgcaagagttagcaaagtttgagattgattcacacaatattattattaatcaagttatatttgatgaggaagctgtcgagtcaaaactgctaaaagcacggataaaaatgcaacagaaatacattgatcagttccatatgttatacgatgacttcaacatttccaagcttcctttgctttcagaagaggtttgtggtgttcaagctctacaaaacttttcccagcacttccttacaccatacaagtctaatcttaaaaggggcaccatcgaggagctcgaacagagaataactttattaaaatctgcactgcaagaagctgaggcagaattagatagggttaggaaaggcaagcagtcagcgtgatcctttttttcacaggtcaaggtgtgtaaaacctgacagaagctatgaagaatacagagtcagagttagagagagacgctcagtttttttgtgtcattacactcttattgatttcacaatc

SEQ ID NO: 90260 - DNA, 174 bp, Zea mays
  Clone ID: MRT4577_182319C.1
ttcacgcgtgggtccatcggaggcagcgagcaatttcttggacgatgaggtgttataaatactgaaatttgatgctatacagtatgctaatgtactcaaggtactgatcggtagacctagtggacgcaacggcactagagggtgctcaagctacaaaaaggccggcaggagaga

SEQ ID NO: 90261 - DNA, 841 bp, Zea mays
  Clone ID: MRT4577_18231C.1
gcttccggtccgcaagtcagacagagaggccgaacgaatcgaggaggaggaggaccaaatccctcattctctctcggccagccagccaagccgccctttcttctcccgcacgacagccctcccgacgccgccgccgccgccgccggcgaaatggcgtcccgcatcgcctcccgcctcctccgacgctccagccccacattaggcctcctgaggagctacacacatgtcagaaactacagcagtcaactttcaggtcttattccagttggtccccaaagctcaaagctgacaagaaggaacaattacttcccaaatgcctctccttaccaactctggagtaggtcattcgcatcagacaatggagacaagtttgaagctgttgtacctttcatgggtgaatctgtaactgatggaactcttgctaacttcttaaagaaacccggcgatagagttgaggctgacgaggccatagcccagattgaaacagataaggtcaccatagatgtttctagtcctgaagctggtgttattgaaaagtttattgctagtgaaggtgatactgttactccaggcaccatagttgctatcgtatcaaagtctgcagcacctgctgaaacacatgttgccccatctgaggaggcgccccaaaaagaatcacctccagtaaaagctgaagagaaatcaccaaaagcagaagagaaacccacaaaagtagaacctcccaagaagcaggcaccaaagccaactccttcaaaaacctcccctacagaaccacagctccctccaaaagagcgagagcgacgggtgccaatggccaggcttaggaaacgcattgccaacc

SEQ ID NO: 90262 - DNA, 377 bp, Zea mays
  Clone ID: MRT4577_182320C.1
caaggaaacggaaactttttatttacaaagtatctttttccttttttaaataagaaaccatgggactttctcttgccaatgggaacatcgcaccggccgcaattactaaagcagccatcggtcctacaatagcaacagcacggggaacgacacaagggtcgtgtctgccacccggggccaaagtgacttttttttcttcaaaatcgacagtgggtgggtctgttccaatagtaggggctggttcaaaagcaactcgaaatggggggtttccgccattactaattcctccttgaatgccgcccctatagattgagactgagccaaactttccattaggtgtaacataaaatgggtcgttatgttgactgccgcttaat

SEQ ID NO: 90263 - DNA, 386 bp, Zea mays
  Clone ID: MRT4577_182321C.1
ccggccggggccggcacggcggttctaccccgccgaggagtaccaccagcagtacctcgagaagggcgggcagtccgccaataagggttgcagcgatcccatccgctgctacggctgaaggctgacgacctccgatccagccagagcaccggacgtcgtgaatgaactgcgctgcatcgttacgttgtactacctccgctctcgaacactcgctagttcatttttaaagtaaacgacgataaataaaaaagaacggagaaagtatattgtaactaaagtgccaatatgacttttttgtgttgtgtatcctgctactgcttgttcagagatctacgttgatacaatgatgcttgtggtggaacaaaaaaaaaaaaaaaaaagcggcc

SEQ ID NO: 90264 - DNA, 326 bp, Zea mays
  Clone ID: MRT4577_182322C.1
ctttccttccgtctgacggcaagtatcacccccttcccctcttctcctgtcacacctccgacagcgctagggatttatatttgcattgctgttgctggtggtgagtaccttcttctctctctgcaggcgtctccctcgcagctgcagtggccgtaccagatcttatctcaaaacctaccgacgatcaggtgcttgctcgggacggcaaccggagatggattgcgatggagctgcactacgcggatgagcagcgagatgcgcgtccggagcctcgccgactgagatgcttcactcgtcgacctctgacctaagaagctatggctcca

SEQ ID NO: 90265 - DNA, 115 bp, Zea mays
  Clone ID: MRT4577_182323C.1
tacgtcggagctcttttatagggacacctaaattcaatttactggccttctttttacaacctctttactggtaaaacctctctctttacccaacttaactgttcttcaccacata

SEQ ID NO: 90266 - DNA, 274 bp, Zea mays
  Clone ID: MRT4577_182324C.1
ttttagcctgggagatccggtggcgactacggggagtctaagaggagggaggcagagcttgcgtcaagcaggctccttgacccggagttcaagccctcgaaactatcccaggaccggttcgacaagtctaaggaatcacacatgaaacgggtactgataactgaaaagcccaagatataaaagaaaaccgataggaaccactgagagaagtatcaaagtatccagcaattatatatttcactgataaggatgcatctgatgatagttctgctag

SEQ ID NO: 90267 - DNA, 360 bp, Zea mays
  Clone ID: MRT4577_182325C.1
atggttgggcttggccgcttgggcggccgcccggcccctcatctccagtgcttgctttgcgttgcttcacccgcgcacgtcctagctggccgcgtacgcgtacgtgtgcgcgagaaaagggacagcttgtacgtgcgcgcgagaggccgcaaggcggcaagggggacacggagacgtcgcgtcgtggattttggacgcgaccgcgaccgcgaccgcgacggcgacggcgactgcttcgttcgttcgtcgttcgatcccaccaaggtcaacgtgaccatcaccattcactcaccaccagctccggagatagggctagtactgtactacaccggtggcgctactgctagtcatcaccactag

SEQ ID NO: 90268 - DNA, 805 bp, Zea mays
  Clone ID: MRT4577_182326C.1
atcaagatacatagctcagcctcccagcccgacctgctcagtgcgctggtacactacccccacaagctcgaagaagcggtggtgctttgacatggctcctctttcgtccaaggccgttgcactcgttgcactgtcctccctcctcgtcacctacgcctctgccggcgccgggaacttcaacgactccgccttcaccgccgaccccaactgggaggacgccagggccacctggtacggcgcgcccaccggcgccggccccgacgacgacggcggtgcgtgcgggttcaagaacaccaaccagtaccccttctcctccatgacatcctgcggcaacgagcccatcttcaaggacggcaaggggtgcggctcctgctaccagatacggtgcaccaacgaccagtcctgctccggcaacccggagacggtggtcatcaccgacatgaactactacccggttgccaagtaccacttcgacctgagcggcaccgcgttcggcgccatggccaagcccggcctcagcgagaagctccgccactcgggcatcatcgacatccagttcaagagagtgccgtgcgagttccccggtctcaaggtgaccttccacgtggagcaggggtcgaacccggtgtacttcgcggtgctggtggagtacgaggacggcgacggcgacgtggtgcaggtggacctcatggaggccaactccgggacgtggacgccgatgcgcgagtcgtggggatccatctggcggctggactccggccaccgccttcaggcgcccttctccatgcgcatcaccaacgagtcc

SEQ ID NO: 90269 - DNA, 1247 bp, Zea mays
  Clone ID: MRT4577_182327C.1
gttactagtcagatttatgtacatagcaagttaatgatagttgatgaccgcatcacattgattggctcagctaatattaatgatagaagcttgcttggatcaagagactccgagattgctgtggtcatcgaagataaagaggttgttaattcaaaaatggatggaagaccttgggaagctgggaagtcctctttaagcctacgcctctcgctgtgggtggaacaccttggccttcatccaggagaggttagccatatcatggatcctatagatgattcaacattcaaaaatatctggatggccactgccaagacaaataccatgatataccaagatgtcttcgggtgtgtacccaacgatctcattcactcaagggttcaatttcggcaaagctttgctcacttgagggacaaaattggccacactacaattgatttgggtgttgcccaagagaagctagaagcttaccaagagggtgatctcaaaagtatcaaccctatggacagactacagttagtcaggggccaccttgtttcgtttccgttggatttcatgtgccaagaggacttgagaccatatttcagtgaaagtgagtactacacatcaccacaggttttccattagcctctctgtctgcctcgtaaagttactcaaccggctgtacatgttgcaaagatcaccttgtagatgctctacacatgttgtcaaataggaaacaaaaaaaaattaatatattatcataccattagagtattagaattgtttcctagaaagaaaatagtatatcagtatagttcattcgttccaacaacttttagtttcgggaaagaaacaatcaaattcattgtttataagtgcaaataataggagtttccttagttcaacacattttctttggaatgaatatacacctcccatagcagttcattttcttcctatcctattgtgtacctgctacactatccagaaatataagggctagtttggaaacgtaaatcctttataggattcttggggattaatttcccagtcaatcccctagaaccccggacgggatttaagttttcaaattggccggcgatgtctatgtggtcacataacatgtatatccttgtattagtttgtcggtcaaactcgattttcgacagtcgaaacacgccttatatttctggatgatagggagtagtgttgattaaggatatttgacaattgacactatttttgcgagcacttgaaacttgtgtgtg

SEQ ID NO: 90270 - DNA, 459 bp, Zea mays
  Clone ID: MRT4577_182328C.1
gaacaccaaaaaagaggagtgggggttggctaacaagttcaagaaaaaggaggtacctcattaaaatatggccacccaaaactatttggaagggcttttttcctaaatatccccaaaaaccaaatcccaacccggaacccgggggaaccccttattttaaaacggccccccccggggggggaccccttttttttttccctttaagggggggtaaatgcccccctgggggaaacaagggcaaaactggttcccgggggaaaatggtatcccctcacaattccccacaaaaaaccaaccggaaacaaaaaggggaaagcccggggggcccaaagggggaaccaacccacattaattggggtgggcccactggcccctttccaagcgggaaacccggccggccaactgcattaaagaatccgcccaccccccgggagaggggggttgggtattgggcccttt

SEQ ID NO: 90271 - DNA, 273 bp, Zea mays
  Clone ID: MRT4577_182329C.1
gatcaatcaaaaaccaacaggataaatttgcattagacataaccacatttcgtggggccatctaaaccaaataaacatttttgagccgatccttttccaaaaaaacttttcgtaaacatctttaacaatccacgtaccgtagtttttgtaaaataaaagacactaacctttataacaccaaaattgatcagggccctccaaaattacaaagtacttgactaaaaagctgcaactttgttgcaatacttaacttctttgctttcttcggtgccc

SEQ ID NO: 90272 - DNA, 3004 bp, Zea mays
  Clone ID: MRT4577_18232C.1
ggccggtattctttggtcttcccacgcgacgtgggcccccgacctgggagtccgtccgacgccaccatcggccatcgcctcgtccgccccattatgctcctcaaaccgcacgcgcgcgcgcgactcaccgccgttgtcgtcgtcgtgttcgcggagatccgcggggctcgcccatccccctcctccctgctctcctccccagcacccacggcccgctgctgcccctccgcgcgccccctcgccaaaccctagcttggccatctccccccactgccccggcgccaccacctgccctgccctgcgcgtggccggcggcgccgaccgccgccattgtcttacggaggcgtccgagtcccgacgcgttggaatgcgctgactgaagtgtgatcattgaggttctggttaaagaaacttctagtatcgattggcttccctcccatggacaagatacaatctgattgcccttatcctggatgtttcttttgtgtcatgaaggaggcgaaccctagtaaacgaagagcaagtgtgttaaagtactttagggaacttccttcccaagacgatgatggtcaagttctccctattagtggtctctggaacacagcaatggctcacccaaatgatcccgagttcatcaacttgggcatatttgaatgcatggcatctcttatatggaaagggttgaaaaacagacgttggcttgcacatgatcagaatatttacatcccatattatgcagctcacataattggatcatacacaatgaatatggaggagtttgcagagcgtgctgttcgtgctggtgtaatacctccattagttgaattattaagaggtaggttgacatgggtcgagcaaagagttgctgttagagctttgggtcatttggctacatatcctagtacatttcctgcagttgccgatcatggggaagtacttgaacttgccattcaacttgcttcgagctcgctagaaattgtgtactctcacttttaccagtttgtggatcgaagacttggctaccattgcgaccttcttactcgtggcatgggtggtgtggaaatggagtcccgcaaagctgaggaatgggcaagtcaactgcagtgctggtctttgcaactcattaactgctttgcatttaagcctgaattcctccatgatatttgcaagcctgattttctagtcaagttacctggaatgtggggtggacttgtaaatgagaactcacctgctggtgttggtttgctaagaacaatctgccagagcaaggttggccgaggtcatgttgctaacattcctgctactattgatgctttatgcaacattgctcgttcttcagatgactggcaatacatggcagttgattgtctgatctggttaatgcaggatgcaagtacttgtcataaggttaaagatatagttgcgccaacactgatagatttatcagatatttcggcactgggtgattataaaaagcttggtgacacaattgtcacagtcctccaagaatgtatgcaacagagtgggaactcacgtggtgcaattggtgttcagaccaaagcagaaattgatgagcttttgagatccaagcaaagtctgaaattggaaaagagtatgccaaaagaggatcttcatataaaacaagctgcggcattggttgtcaagttggaaggcaattcactgttctcctcagggaacatcgcaggagctgcagagaaatactctgaagcgcttgcgttatgtccgatgaaatccaagaaagagcgggtggttctttacagcaatcgagctcagtgttaccttctcttgcagcagccattggctgccataagcgatgctactcgagcattgtgccttcacagccccgtgaaccgtcatgccaagagtttgtggcgaagagctcaagcgtatgatatgcttggtcttgcaaaagagagcttgctggacgcaatccttttcataaacgagtgctctcagtcgaacgatcccgacttatccctgaagcaaaacaaagtccctgactatgccgagcggttggtgaagaagcagatgcgctccgcttggctattcagggaagcagctctgaagcacgggggcgtacactgtgaaggagatgctagcgacgcgtttggccaggatgctgacgactctgagtgggaaacggctagcgaaagcgacgccgagaatgatgacacgggagaagcggatgatggaactgaatggaagaacgatggacaccgggaagatatctgtgagaaaagctgaggagcagggcaagctgaacctattcagagggagtcaaactgagcagtgacagaagcagctgctgggccttatgaagtctgctgcgctatcagcctatcaagcatcagatctttctaatgcagcgatctggtaacatttctactgtcctcgtcaaagcaaagccccagttaaactaattccccacgtcttgttgtttggtcagttgagttattgcgcctgcgaccattcaatgtttccccttagatgttggttctggtttggtgtttgtagcatgctctttctttcaccagtttctcaactctttgaatgaacaaaactgtgcattatttgttcttttttttactattatttctgtagtctggcgaagaggccataatactggcacccttccctttccactggatttatctggaacgagaagagcacgtttccgtccaggggtacctgctttttttggctataccatgtcaactagcaagtaggggttgttaggttgggtcatgctcttacaatgaaactggcgtgctgggcacttgctctgctagtctgcttgcctgaagcttcttgagagcgttgctgggggcaaaaatgccgacagacgtgttagtgtgtgccagtgcgtgcgtgttacttcttgtgcttgcacagatgctttcagtaagcacatcaatgtttgtgtgtacaaatgtagcatgaatgagtaattggagcgttgtaccgcgtaaaaaaaaaaaaaaaa

SEQ ID NO: 90273 - DNA, 316 bp, Zea mays
  Clone ID: MRT4577_182330C.1
acgccaacaaacatcgccacaactcataaagcgttcgtacgctggcacgacagcgggcatggtagaatacgtgcttgcagcgacccgacaaaaaaaaacaaaacatgtagaagatactccatcatctgcgtttgatgaacccgcccagctaagccatctttactaataatagagccggcataaactatggtactgatgatgtgcatctgtagccggtgatgcttgggtaggggtgaaactgacgttgagcagaaacactagtgaccccccatgatgtatgagatcggagattcactggtcgacagcagaaacaata

SEQ ID NO: 90274 - DNA, 816 bp, Zea mays
  Clone ID: MRT4577_182331C.1
ttcggccgggaattagcagcttgccttttatctttcttctctccactccagaagttcagtgtgtagctttacgaattccaggatggcttgccgcctgagatcggctagcatgccttcgagccctcattccagggagaccaatgttgaggaacagattctatgcctgaaagcagccatctctctgccttcagtgactgtcgaaaccgtattcgatgatctgagcaagctcgggagcatctacaaccacatcgacgcactcacatgcttgcccaggagccagaggaaggcagtggaggaggaggttgagcactccctcgtcctgctcgacctctgcagcattgtgcaagagagctttgttgaactcaaggcctgtgtccaggagatacagttggctctgaaacgaggtgatcacacagctgcccataccaagattcagtgctatgtgcgctcggccaagaaggcacagaagctgttcaagaaggtcaacaagaagactgtctctgacatcgaaggatgctgggtgatcaatctggttgctggagcgagggagattgctgcgttgatccttgaatcgacattgcatctcctgtcaaagcaaattgtggtcacaagttctagcaagtggtcacttgtttccaagtcattccgaaagaagtgtgtcatatgtgaggcagaacaattgcaagggttggagctggacattgttgaacttgagagcagagtagggacattgttcaggaagttgatccaagcagagtgtctcttcttatgctcttagcttgtagacagaccatacaacaagtctgaccccctgtc

SEQ ID NO: 90275 - DNA, 813 bp, Zea mays
  Clone ID: MRT4577_182332C.1
tccccaactccgattcgaaatactcctcctccacctagggttttgctgcccccctccacacccgtgccgccgccgccgtcgccgcccgcgtccccccatggcgctgccgaaccagaacaccgtcgattaccccagcttcaagctcgtcatcgtcggcgatggcgggactggcaaaaccacttttgtgaagaggcatctcactggagagtttgagaagaaatacgagcccaccattggtgttgaagttcacccattggatttcaccactaactgcggaaagatccgtttctactgctgggacactgctgggcaagagaagtttggtggccttagagatggatactatatccatggtcagtgtgcgattatcatgtttgatgtcacttcaaggctgacctacaagaatgttcctacgtggcacagggacctgtgcagggtttgtgagaacatccccattgtcctgtgcggcaacaaggttgatgtgaagaacaggcaggttaaggccaagcaggtgacattccacaggaagaagaacctgcagtactatgagatctctgccaagagcaactacaactttgagaagcccttcctttaccttgcaaggaagctggctggtgatcccaacatccacttcgttgaagcagtggcccttaagcccccggaagtgaccttcgacctggccatgcagcaacagcacgaggctgagcttgcggctgcagcggcacagccactgcccgacgacgatgacgatctgatcgagtagagagaggatgatgagtctgtctgtcttatcaacaatactttgagagccag

SEQ ID NO: 90276 - DNA, 353 bp, Zea mays
  unsure (1)..(353): unsure at all n locations
  Clone ID: MRT4577_182333C.1
gtgcggcgtcaggcggcgttcggnaaaaccttaacacaaataacctctactctctactagatccttctaccatctaacatgcaactcacaaatcgccaaaataaatttgatccaacagggattccggtcgccatccccctgcacgaactggggatgaccgatggtgccctctgcgacaacggcgacaacgccagacttgcttcgccgtaaagctggaagatgcgacaaccacactggcgctctccgaaagccaactccaccgtggtctgatgctcctgcaacaccatctccttgtagggcaccagcgcgagcgtgaccaagctgatctgcttcgcctgtgacatctcggagcc

SEQ ID NO: 90277 - DNA, 281 bp, Zea mays
  unsure (1)..(281): unsure at all n locations
  Clone ID: MRT4577_182334C.1
gcggcccctggcggcgagccgcgctgtgcgagtgtcggagatggcggggcttcagcacctcggccgtcctgggccgccggacacccccgctggggccgatgcccaacagtgacatcgacttgagcaacctggagcggctggagaagtaccggcgcttcgaccgctaccggcgccgagcagagcaggaggctcnaggcccgcactggtggcggacctaccgagagtatttcggggagaagacagatcccaaagagaagatgatattgggctgcctccaccca

SEQ ID NO: 90278 - DNA, 1895 bp, Zea mays
  Clone ID: MRT4577_182335C.1
tcggcaccatcgaggccgccggatgctctcaggcagcctctcgctgtgtcagttccgctttgtaactgtagaaggagagtgagctcatcatcaagtcgagacgatgggccgcaccgaggcggcggacggcgccgagtccggcgggctgggggtgggggagacggtgcgcgagctgcgggaggcgtacgagggcggcaggacgcggagcctagcgtggcggcaggcgcagctgcggggcctcctccggctcctcgaggagaaggaggtggaggcgttccaggcgctccacaaggacctcggcaagcaccacgccgaggcgtacagggacgaggtcggggtgctcatcaagtccgccaacggcgcgctgcagcagctcggcaaatggatggccccggagaaggtgcgggtcccgctgatcgcttggccggcgaccgcgcaggtggtgccggagccgctcggggtcgtcctcgtcttctcctgctggaacgtccccttgggcctgtcgctggagccgctgatcggggcgatagcggccgggaacgcggtggctctgaagccgtccgagctctcgccgtgcaccgccaggttcctgggcgacaacatcgggaggtacatggactcctcggcggtgaaggtcgtccagggcggccccgacgtcggagtgcagctcatggagcaccgctgggacaaggtcctcttcaccgggagcccccgcatcgcgcgcgccgtgatggccgcggcgtccaggcacctgacgcccgtcgcgctggagctgggcggcaagtgcccctgcatcttcgacgccatgggcagcgcccgggacctgcagatctcggttaaccgcatgatcgcgggcaagtggtcgtcctgcgccggacaggcctgcatcgccatcgactacgtgctcgtcgaggagcgcttcgcgcccatcctgatcaaggtgctcaagtcgacgctgaagaggttcttcccggaagcggaccacatggcacggatcgtgaacgagcgccacttcgagaggctgagtaaccttctcaaagacaggtccgtggcgccgtccgtcctgcacggcggctccatggacagcaagaacttgtacattgagcccacgatactgctgaacccgccgctggactccgcgatcatgaccgaggagatattcgggcccctgctcccgatcatcacggtcaagaacatcgaggacagcatcgccttcgtgaaggccatgccgaagccgctcgccatctacgcgttcacccgggacgccgccctgcggcggcgaatcgtggacgagacgtcgtccgggagcgtcaccttcaacgacgcggtagtgcagtacgcgatagacgggctcccgttcggcggcgtcggccagagcgggttcgggcagtaccatgggaagtactcgttcgagatgttcagccacaagaaggcggtcatgaagcggggctaccttgtggagctgacactcaggtacccgccgtgggacgagagcaaggtcaccctcatgcgctacctctaccgcttcaactacttcgccttcgtcctctctttcctcgggctcaggcgatgaacttcactccagcatcaacgcaagggtcgcacagggattgggcccaataaaccggcattgacagtggatggaggaacatgccaatatagacaatatgcagtagttgtgttgtttgtgaggaacaagtgtcatgccgcacttcaaaaacagtaatgtgctaacctgcatcctaattcctatgatcctatctatgattgcctctagtgagacaaacagtgaaatgcctttcaatctttagtagtacattggtcagagaccatcatctatcctctgcataaaagtatcaagtgcaaaggagcaaaaaaaaaaaaaaaaagcggcc

SEQ ID NO: 90279 - DNA, 643 bp, Zea mays
  unsure (1)..(643): unsure at all n locations
  Clone ID: MRT4577_182336C.1
cacgaggcctcgtgccgaattcggcacgaggctcgttcgagatgttcagccacaagaaggcggtcatgaagcggggctacctcgtggagctgacactcaggtacccgccgtgggacgagagcaaagtcaccctcatgcgctacctctaccgcttcaactacttcgccttcgtcctctctttcctcgggctcaggcgatgaacttcactccagcatcaacgcaaggatcgcacagggattgggcccaatataggcgatgaactggcattgacagtggatgggggaacaagccaatatagacaatatgcagtagatgtcttgtttgtgaggaacatgtgtcatgccgcacttcaaaaccagtaatatgctaacctgcatcctatctatgattgcctctagtgagacaaacagtgaaatgcctttcaatctttagtagtacattggtcgagaccatcatctatcctctgcataaaagtatcaagtgcaaaggaccnnnnntagatgccttgcaatctttagtagtacatttgtttgttacttggtaattatacgacctgtttggttgtatgcataaggtgacttagattgtcacatattttctggcacaattatttaaggttagatgttcttttaccccatacgaa

SEQ ID NO: 90280 - DNA, 332 bp, Zea mays
  Clone ID: MRT4577_182337C.1
gaggagtggtcttcggcgagagagcacgagaagaacgccttccacgctgacaacgaagctatgatgtccaagctcggctagcacaatagactaaggatgcctgaccgtcatcgttatcatggctggaacaccctgcctcactatggtgatcctgcggacctacagaggcgacccctatcttagggacgctctcgactccctgttcggcttcttctccttctagtacgacagcgaacaccaattcgtcgtcaactgcgacgactacgacgataacctgatgctcgccgtctacgacgcattgcagtaagccctagaagagcacacaatcctca

SEQ ID NO: 90281 - DNA, 284 bp, Zea mays
  unsure (1)..(284): unsure at all n locations
  Clone ID: MRT4577_182338C.1
gtcagcgtgacgccggcggtggcggcggcggaggtgcaggcgcgggagacggtggcggcggttatggtggaggcagcggcgttggacgttctggcaacgcagtggggagcggcggagggtatggaggtgcgagtggtagtgccggaggtggagcaggcagtggagttgggtcagccggcggagctgttggcggcggctctggangtgggggtggccaggttgaacaatttattatattttatatatctatttatgactcacaatatactattcatatcatagta

SEQ ID NO: 90282 - DNA, 847 bp, Zea mays
  unsure (1)..(847): unsure at all n locations
  Clone ID: MRT4577_182339C.1
aggctctcttccaaatctctagtcttctccagttcccaccccgcgccccaaatccagatccactgcccaccacccgcctattagtctccaacgcggacgcccccgcccccggctgcactcgtcgcgccatcctctggtgcctggtctccgggattctgcaggttcagttgagtagaccagtgtttgagcaagggttgaacataggaatgcgctgtttgttcctagagtagcagttcaaaatccaaacccgcccgcgatgaaaagcggcgtcatggttctcggtgtcggcagccctgaagaggcccctgaccgcaacgatgcggagccacggcgcgatatgggccaatcgcagatgcaggtcggtggccccgttgttctcaaccgatcagctgagctcgggtcaggtgattttatggctatcgatgacgctccagttcaagcaccatcgggccagccggcggcggcaaaacatcggtctcctgctgctctgacggacaccatcatggaggtgcagaagcaactgaagcgaaagagggcttctaataacccagtgattgctgccgcggacaaggacgctctcgctgccgggtgccggcaagagcttgagggtctcttccagttttacaaggaggtttctgaccgtaaggtgcagcttgacggtggtaacccctgtccgtcaacggaatgggttggctgcttgcttgaggagagcagccttgggctgaccaagttggtggacgggatatatganaagttgaagggatggatgggnnnggtctggtggcttcaggtccgtggctctgtgctgctcgttgggcagaggatgatgtacgggaaatcatccttg

SEQ ID NO: 90283 - DNA, 430 bp, Zea mays
  Clone ID: MRT4577_182341C.1
gggtggggtttttttttttaaacaaatgaacaaacctgacttgtattatgtaaggcatatacaacttgctgtgacacaacaccgcgaataggaatatctcttctgaagtttgcgcactcaatatacacaactaaaaatcactgtccaccaagcaagaccaggggcgcgccaaatcctgtgctcaatttatgctagacccttgaagagatcggtggagcatatgcctgcgaggccatcttgctcataagctcttcaaaagcttacatgcttcatgcatcaaaggcccctataaactgatgaacccggaaagcgacaccttacaccctgcagaagcaaaaactctgtattgggctctttgtgagggccttgtaaggcatcaagatatgaggcaaccctaggcatatactagttcgcagggtgaacagatgcc

SEQ ID NO: 90284 - DNA, 422 bp, Zea mays
  Clone ID: MRT4577_182342C.1
tgacaaatttaaacaacaattcttgcagtactgtacgcgggggtacagaatgggcactataaaacaaccaacctcccgacacccccacaactatatataaaacgcaggaggtaacgaccccatatgtattgcggctccacgctgctgctacgacatatataatcacatcaatccccaaatactagaacgaacacaacggccctgccccttccttccgacaacgctaggcaaccatccaccgtccagacataaaacactacggccccccaacctttcaagaaactgagccttgggccccgcttgccagccaaagctactttcatctccgctgactaccagccatcaaacgactgggcgcgtctgaacagagctgctttcacgaccccgtcaagaccaaactacaagacgcgctgcaaagagca

SEQ ID NO: 90285 - DNA, 1540 bp, Zea mays
  Clone ID: MRT4577_182343C.1
cctcgaggccggccgggttgaagcattgtgcagatttgaagaaaggccaaaggggcattttttctggacacagagacctgatttccgggttccatcagaagaagaactgaggagattattgacgccagaaagtgtttgctgttatgaaagtatgcaagctggtttgtatcgtctcaagcgcttaggaattctgaagcttactcagcctgttggattggcttctgccatgaatcagcttcctgatgaggctattgagctcgctgctgcatcacatatcgagagggaactgcaaatcactagctggaatcttacaagtaatttcgtcgcttgtactaatcaggacagagaaaatatagaaagattagaaatcactggtgttggagatccatctggtcgtgggttaggattcagctatgtgcgagtagcaccaaaagcacctgcctccaattcagtgctcaagaagaagtcagctgctgcaaagggtaccactgtaactggcactgatgctgatctccgcagattgagcatggatgcagcccgtgagttgctgctaaaatttggcgtacctgaagagcaaattgataaattaacaaggtggcatcggatcgctatggtgaggaagctttcaagtgagcaagctgcatcgggaattactatcgatgaaattcctgttagtaagtttgcacgtggacaaaggatgtcttttctgcaacttcagcagcaaactagggagaaatgtcaggaaatttgggacagacaagttcagtcactttcagctttagatggtgatgacaatgccagtgacacagaagctcacagtgatctagactcatttgctggggatcttgagaacttgctagacgcagaagaatttgatgatgaggatactagtacagcagacttgagaattgacaaagcagatggaatgagaggacttaaaatgagaaggtgctctacgcaagcccaaattaacaaggaaattgaagatgatgaaacagaggcttctctggcaaagaaactacttgaagacgatggcaatgatgtgaagaggaaaaaacagcctgtggaattgacaaattgtggcacctctttagttgccaataaaatgaagcagagtaagactgggcaaacgatcaaatcatctggttatgctggtgcattaaccccaaaggagaacacaccaagagaaggaaaagaggttgaaaattcttttgttgagggtggtttgtcctcaaaactaaaaccaaagatggcactcgatgtaaatgagactgttctagttaaaaagaaaagtgttccaggaaaggatggacctaaggaaaagaaacagggtgcaagaggggatagtcttgtttgtggagcctgtagtcaggttgggcatatgcggactaacaaactgtgccctaagtatcgggaggatccagaaatgtcagaaatggatgctaatgcaggtaagcccaactctatggatataaaccatttgcaagctaggacacctaaaaggttgatacaaaggtttcctctgaagttactgaaactg

SEQ ID NO: 90286 - DNA, 649 bp, Zea mays
  unsure (1)..(649): unsure at all n locations
  Clone ID: MRT4577_182344C.1
gtaagtttgcacgtggacaaaggtgtcttttctgcaacttcagcagcaaactagggagaaatgtcaggaaatttgggacagacaagttcagtcactttcagctttagatggtgatgacaatgccagtgacacagaagctcacagtgatctagactcatttgctggggatcttgagaacttgctagacgcagaagaatttgatgatgaggatactagtacagcagacttgagaattgacaaagcagatggaatgagaggacttaaaatgagaaggtgctctacgcaagcccaaattaacaaggaaattgaagatgatgaaacagaggcttctctggcaaagaaactacttgaaggtagttattttcttctatgttctttgcaaaaacgatccctcaggcatttgatttatggcctcttacgatgcagacgatggcaatgatgtgaagaggaaaaaacagcctgtggaattgacaaattgtggcacctctttagttgccaataaaatgaagcagagtaagactgggcaaacgatcaaatcatctggttatgctggtgcattaaccccaaaggagaacacaccaagagaaggaaaagagacaggttngaaaattcttttgttgagggtggtttgtcctcaaaactaaaacca

SEQ ID NO: 90287 - DNA, 274 bp, Zea mays
  Clone ID: MRT4577_182345C.1
accctatcaaacacacacacatatacacacacacacacactccaacacacactataacacacgcacgaccaatcccacggcacacacacacacacattgagatgactacaagtatgtgtgaaagaacgggcgaagagaggactgaaaataaagagacaaaaacaaccgtgacagccctaaaattggaaagagctcaatgaaactgcaagtcactactacaaaggctgtgctacggtgccctagtctacactacaacccgccaaaatgccaactg

SEQ ID NO: 90288 - DNA, 373 bp, Zea mays
  Clone ID: MRT4577_182346C.1
ggaagccaaatataaaataatagaaggagaaatagctgctaatataggaatataaatgaaaagaaacaacataatcaaagatgagatcaaaaatgcatttgaattaaaagatggaaatgcttcaatggaggcacataataagaaaaatgcgattgaagaagaggatggacatataatacacagcggagagtttcagtacatcaagatagtttcacagctgagcagtatgggagccactttagtgatgaccatcatccaaactgccgctcacttccaattggacagaacgaagacttaccagttggggctggtttatttgatcacctccgccatcttcatctgtttgaaagatttgtttgtgttgaaatctctc

SEQ ID NO: 90289 - DNA, 365 bp, Zea mays
  Clone ID: MRT4577_182347C.1
ctcatttgtcaccaccgccgtcgttacccacgttcgacaacactatgagggcgggcatttggagctacatcggccgggccaatcttcaggtcggatactcgagctgggagtctgcctgcatcaacaagagcaattaggcaaagttgtgctggcttgccaaaacatggactgaatagggttcctgaaatattgggtgatataaagctgactgcacggtaatggaccttccgctgctagtacgcatttgtgaaaagagtgtatgtccgtatagttgagcggatagaagcacaggcagtgattgcataccttatttatgcttgtacaaaaggatgtgtgaatgactgttataaggcttgtacataagt

SEQ ID NO: 90290 - DNA, 172 bp, Zea mays
  Clone ID: MRT4577_182348C.1
cggaaggtggcagacgcatagatgagggtgacagcactcggcgggagcgcttgacgagcgaccagtaaaccctaatgctgtgatcgcggaggagtcctttggaacagtaccgaatcgatccgcctacatgcctatgaatcctcctcccccgccgtctcctgcgtctgcgtct

SEQ ID NO: 90291 - DNA, 1416 bp, Zea mays
  unsure (1)..(1416): unsure at all n locations
  Clone ID: MRT4577_182349C.1
atggcgcccgccgacggcgagtcctccccgccgccgcacgtggccgtggtcgccttcccgttcagctcccacgcggcggtgctgctctccatcgcgcgcgcnnnnnnnnnnnnnnnnnnnnnnnnnnnnnnnncgctctcgttcctctccaccgcgtcctccctcgcgcagctccgcaaggccagcagcgcctccgccgggcacgggctcccggggaacctgcgcttcgtcgaggnnnnnnnnnnnnnnnnnnnnnnnnnnnnnnccgtgccggtgccgcggcagatgcagctgttcannnnnnnnnnnnnnnnnnnnnnnnngaaggcctggcnnnnnnnnnnnnnnnnnnnnnnnnnnnnnnnnnnnnngacctgcgtggtgggcgacgcgttcgtgnnnnnnnnnnnnnnnnnnnnnnnnnnnaccgggcccaaccggggcgtccggtggacggccgcgtcgtgcgcgctcctggcgcacatccgcaccgacgcgctccgggaggacgtcggcgaccaggccgcaaacagggtggacgagccactgatctcccacccgggcctcgccagctaccgcgtccgtgacctcccagacggcgtcgtctccggcgacttcaactacgtcatcaacctcctcgtccaccgtatggggcagtgcctcccgcgctctgccgccgccgtggcactgaacacgttcccaggcctggacccgcccgacgtcaccgcggcgctcgcggagatcctgcccaactgcgtcccgttcggcccctaccacctcctcctcggcgaggacgacgccgacaccgccgcaccagctgacccgcacggctgcctcgcctggctgggccgccaacctgcgcgcggcgtcgcgtacgtcagcttcggcacggtggcgtgcccgcggcctgacgagctccgcgagctggcggccgggctggaggcctcgggcgcgccgttcctgtggtcgctgcgcgaggactcgtggacgctcctcccgccgggtttccnnnnnnnnnnnnnnnnnnnnnnnnccgggctcgtggtgccctgggcgccgcaggtggccgtgctgcgccacccttccgtgggcgcgttcgtgacgcacgccgggtgggcgtcggtgctggagggcgtgtccagcggggtgcccatggcgtgccgccccttcttcggcgaccagcggatgaacgcgcggtccgtggcgcacgtgtnnnnnttcggcgccgcgttcgagggcgccatgacgagcgccggagtggccgcggccgtggaggagctgcnnnnnnnnnnnnnnnnnnnnnnnnngagggcaagggccaaggagctgcaggccttggtggccgaggcgttcgggccaggcggtgagtgcaggaagaacttcgacaggttcgtcgagatagtctgtcgcgcgtga

SEQ ID NO: 90292 - DNA, 278 bp, Zea mays
  unsure (1)..(278): unsure at all n locations
  Clone ID: MRT4577_18234C.1
agcagctagctctggttccgctctgcgcggcgtaccggccgacgacgacacgatgcctttataggaagctcattcctcctcctgctcctgcatgccctgcaatgcctaacccttgttctaggagacatgacgagcacgacacctgccgccgatgaccggggcgtggtggacgtgaacacgacggcattcaccatgcatgactctgctgcgtgggcgtctcccgatggtgccgaaaaccttgaaatgtactactgcttnctctggacggaacgacaccc

SEQ ID NO: 90293 - DNA, 379 bp, Zea mays
  unsure (1)..(379): unsure at all n locations
  Clone ID: MRT4577_182350C.1
gtgtttagagacagatacagatcgcgcgcccagggggggttgtaatcctcgtcgcggtcgctcaccctggngcagatctcgccctacaccttctccaccatcggcatcgccgcctgcatcgacgtctctgttctccgcgcggcatggggcatcttcatcacggggagcagcctcatcggcgccgccatcaaggcccccaggagcacatctaagaacctcatcactgtcctcttctgtgaggctgatgcaatttatggggaaactgtggcaagcatcctccagacatagctcgtaagtgtgccaacatcccaaatgcactatccgaagtctttttcacctggctatgcgacattgagcatctggacttatcgctggcttc

SEQ ID NO: 90294 - DNA, 2322 bp, Zea mays
  Clone ID: MRT4577_182351C.1
tgggtacctcgaggcttgcccggccgggagcccccgtcccgctcccttcctgctacctgctggccgctgcccttcccttcccggaatggtatcgtgcgacctgtagtcgtcgccagccacctcgctccctcccagacgacacccagctagtgctcccttccacacccaggaaccagccacctaaccccgcccgccatgccgggcctcgccgcctccgacaactcgcccccggcgccggcgccgccgccgcgccggctctcgtcgccgctaccccgtcgcgcgccgtcgtccccgtcgccgtccgcctcctcgcgcgccaagcctcggaagccctcgccctctcccgcggccttccccaccgacgccgacgactcgctcgacaacccggatctggggcccttcctcctcaagcaggcgcgcgacgccatggtgtcgagcgagggcggcggcgccgcgcgcgcgctcgagttcgccgagcgcgccgccatggcgctcgagcgacgcggcgagggcgccgagctcgagctcgccatgagcctccacgtcgccgccgccatccactgcggcctcggccgccacgctgacgccatccctgtcctcgagcgcgccgtcgcagtcgtcacgccgccgccagaggcgcctgccgacggcgaggccgaggccggtgcagccggcggcgacgaccaccagcagctgcagcctgccgagcctgaccagaggggcgaggagtggtccctcgccgccttctccggctggatgcagctcggcgacacgcacgccatgcttggacgcatggacgagtccatcgcctgctacggcaagggcctcgagatccagatggctgcgctcggcgaccgcgatccccgcgtcgcagagacctgcaggtacctggcggaagcgcacgtgcaagctctgcagttcgacgaggccgagaagctttgccgcgaagccctggagatccaccgggggcacagcgcgccggcgtccctggaggaggcctcggaccggcgcctgatggcgctcatcctggacgccaagggcgactacgacggcgcgcttgagcacctcgtgctcgcctccatgaccatggtcgccaacggccgcgacatcgaggtggccaccatcgacgtcgccataggcaacacgtacctggccctcgcccgattcgacgaggccgtcttctcgtaccagaaagcgctgaccgtgctcaagtctgcacgcggcgacgaccaccctaccgtcgcgtccgtctacgtccgcctcgccgacctctaccaccgcacgggcaggctccgcgagtccaagtcctactgcgagaacgccctgcgcgtctacgccaagcccgcgcccggcgctgcccccgacgagatcggcggagggttgatggagatcgctgccatctacgaggcgctcgacgacctcgacgaggcgctgaagcttctgcagagggcgctgaagctgctggaggacgcgccggggcagtggagcaccgtcgctgggatcgaggcgcagatgggcgtgctgtactacatggtggggaggtacgcggagtcgaggagctcgttcgagagcgcggtcgcgaagctgagggccagcggcgagaggaagtcggcgtttttcggcgtgctgttgaaccagatggggctggcctgcgtgcagctgttcaagatagacgaggctgcgcagctgtttgaggaggcgagggcggtgctggagcaggagtgtggcgcttctcatcctgacactcttggcgtgtacagcaaccttgctgcaatctatgacgccatgggaagagtggacgacgcgattgagatcctggagcacgtgctgaaggtgagggaagagaagcttggcacggcgaaccccgacgtggaggacgagaagaagcggctggcagagctgctgaaggaggcggggcggtcgcggaaccggaagcagaagtcgctggagaacctgttcggtaccaactcacagcgggcgaagaaggaggccgggaggaggtggtccaacttcgggttcaggagctgagctgaggtgccctttttgtttgtaacattaaaaaaaaaggcacgtgtaaagatgttgctgtaggtgagtagtattgttagcaaggtgggtggtgattatgctgtttgcttggcactgcattgctgttactgttttgggttattttcgagttaaaatttgtttttttattattaactgcgagctgagctgctgtacccggatggatggagaaagagtctttgtggtgttgactggtgagtgatgaaaatacctgtgattgctagtttaaaaaaaaaaaaaaaaaaaaaagcggca

SEQ ID NO: 90295 - DNA, 439 bp, Zea mays
  Clone ID: MRT4577_182352C.1
atgtggtaaggctaagattgtttgtaaacaaagagattaagtccaaatagggcagggaccacaaacgaactagcatacagataacaaaacaacagcaaccccttaggtggaggaaaaactttgtgcaaaaaaaaagggcaggatacaaaaataatctcaaaccgagggtggaaaaaagggggtaaagccaaacaacattggttggaagagcaatcgaaggggaaactggcctctaagaaaaaaagggaagatgtgaggtggccccatccccaactacgaaaacggggaccaaaatcttggcgggggcctccggggataccccggaaatggggaccagaggcaatctggggtcaacaaggttcccaaatggggggcgtgatagggaacgggggataaaaggggaaagaggattcccggggggaaatgggttaaccttcaa

SEQ ID NO: 90296 - DNA, 764 bp, Zea mays
  Clone ID: MRT4577_182353C.1
ttgggaccctcgaggccggccggggcctacgccacgcgcctccctgctcacgctccttctcctactcgccgtccagctccctcccgccgccgccgcgtccaagcaccgccacgcgtcagaatctgccccagcaccaccagcctcctacttcctcgtatcgtgggcaagcaacctcacgttactgggctccgcctctatccaaccaggcgccacagcggtcgcgctcaccaccccgtcccatgacggcgttggcgccgggcgcgccctcttctcggagcccgtccgcctcttcgtcccctcctcctccgcagccgcctccttctctacccgcttcaccttccgcatcacgcccgcgcccaccttcggtgacggcctcgccttcctcctaacctcttcccggactttcctcggcgcctccaacgggttcctcggccccttcccgtcctcctcggcctcagacgagggcgaggccgacctcggcggcgtcaccaccgtagccatcgagttcgacacccaccgcgacgtggcgctgcgtgacccagacggcaaccacgtggcgctcgacgcgggttccatattctccgtcgcgtcggctagccccggcgtcgaccttagggcaggcgtacccatcaccgcctgggtggagtaccgcgcccggcgccgccgcctcagcgtgtggctctcgtactcgccgttccgccgcccagagaacccgccctctccgctgatgccgacctttccggactcatgcgcacatatatgta

SEQ ID NO: 90297 - DNA, 250 bp, Zea mays
  unsure (1)..(250): unsure at all n locations
  Clone ID: MRT4577_182354C.1
gtcaactgtttaactcgctcccacaggtcggttgtggagtacctttcatattcatcggggctaacattggccaccctttcaccggtatcgttnaaatcccatctatctcaaccttgttcgcctatttcaactcttttttcaacaattatgtgaccagaattcctgcccaaccacacctttgctaggtgatccagcaacttgtttagatctgccttcatcaaattgaacttttttaaatccataacctctt

SEQ ID NO: 90298 - DNA, 217 bp, Zea mays
  unsure (1)..(217): unsure at all n locations
  Clone ID: MRT4577_182355C.1
tattcacgtccgtccgtattttatatatctctggcgcgtgataactnattngtacaagagccagaaagcttggagctgtgcctcctggcgggaaagaatacgtaccttgattgttgctcacacttgtagacgatcccgttcgtgatccgggtccgcatcgtgctcacaaccaagtttcatgtctgatctcgaccttcagcttccatctgccttcgat

SEQ ID NO: 90299 - DNA, 658 bp, Zea mays
  Clone ID: MRT4577_182356C.1
aaagctaaatgacaatgtttcatatattgaagccatatggccatatggggtttaatttacacgtgagaataacgatgtatatcactcagtcctagggctacagaagacacgatttacaattagagctgttactgctagtcaagcttcggccaccaagacgacatacagtgaagtccgttgtaacgatcagcaatgcactgcttggtgattaccttctgcgccgtgaggatcaaataggggctcaatcagataaccacatgttttagtgaagaacacttcctaccactgaaccagcaagacaagaaccccaatggacctggtattgttggttcacgaatatcagtttctcttctttgtaacgctcttaagaactcttctgggctcaagttcccatcctgatttgtgtcgaacacatggaaaatgatgtctactactctatctgttaagtcgaccccgcaaacatgttgcgctgcacgttttagatcctccttcgtcaataacccattcaatttaccgtaagcaaagatagccatcgacagtggctccaatcttcgtcgcaaatcagcaaagccttaaactcctcaaagggatgcgtatgccttcaaatctggtccttgaccaaactatactctatcaagcagttgtgtatggtcatgca

SEQ ID NO: 90300 - DNA, 278 bp, Zea mays
  Clone ID: MRT4577_182357C.1
cttggttttttttttttaccatataccgtctattcaaacatgttgctgctttaaatagtctgccatcgtggttcgtcggagccttgctgttcacgattcgacacgacggcacacaagcatacaggcagggagggggctctatgcggtatgtgtaatgggaggggggggcaaggggattactaggtgtggttgttggacgctgccagatagatttgctgcacgttgtattttatatataatgaagctggcccttcatgcagggttcgtttgttatggac

SEQ ID NO: 90301 - DNA, 393 bp, Zea mays
  Clone ID: MRT4577_182358C.1
ggggaacaatcatgtccaggttgcataaaagaagacataatatttttacaggatatttcatggggggggtccactccaaagggggcatacaaaaaaacactagggggacaatttttttggggtcccaaaggtcccttaaaaaaaacgggggcaacctggagggtttacgggacacgcatgcaagcataaggccctcgctaacttgccggggacaaaattgggggggaaagcccaggcgtttttgttgacggggtcggcaatggggtcggggaggtttttgagggggcccttgccggggacaaaagcctgcacaaaaaaaccgaacatggggaacataggggggggggcgttctaaaattccttaaccttgggctcgggaaacgcctccgggtc

SEQ ID NO: 90302 - DNA, 649 bp, Zea mays
  Clone ID: MRT4577_182359C.1
gcgcccacgcgtccgctatgtgcaactgagaaaatccctgtcattcccattcctgggccatctgctgcgaattggggctctttctgcatcgggtttgccatcaaatgaattcacatttgcatgctcggtcaagaagagataggcttgagatatctgctcgtgaagctgctacacaaatattctatgttcctccccatggcattcagcagtttcttgttgatgctgcttcatcttttggcgattccaggcattgtgtggtcgcaagggagataacaaaaatacatgaagagttttggcgtggaactttaggtgaagcaaatgaagcttttgcaactcgacaaccaaagggagaaataacagtgctcatagaggggaagttaatttcagatgacgaaattccatcataggatttccttgagcatgaactaagagaattgacggcaaagggatatactctttctgcggcggtgaaattggtcactgaaaccacatcagcaaagaaaaaagatgtttatgcactcgcattgacgtggttgggaaataagtaaaatggaatttttggtcgcatctggtaattaaacttatttctatgtactggcatattttccatttgacttttgagatcccatgaatcacattgggaaggggg

SEQ ID NO: 90303 - DNA, 213 bp, Zea mays
  Clone ID: MRT4577_18235C.1
attcggctcgaggcagaacgaaatggtaatttgacaaccatggccgatgcttaatggacggtttttaacaagacaagcatggaatcagactgcattgaacaagcggaggcgggtctaaacacgaacaaacgtttcatcttaattgaggaaccagggaaatattccgggcaggacaggtggcccgaaaaacacccactgagtgaccaggataat

SEQ ID NO: 90304 - DNA, 1420 bp, Zea mays
  Clone ID: MRT4577_182360C.1
ctcgaggccggccggcatgggcttttgacactcctccccgcgacgccgggccgcctgcccggctgccatccgaatcccatgtcgtcgctgctcctcctccaggccctggctccagccatgaccgtcccccgccaccatttcctcatctcccctctccgcctcgcctctgcagtcacagttccgttcgctcgacgcctctccaacgccgcttccagcaacaagccggagccactcctctcggaaccggatctggagtcaggtctgtatcttgtgtcaacgccaattgggaaccttgaagatatcaccttaagggcactgcgtgtcctaaaatgtgctaatgtgatactatctgaagacacaaggcattcaggaaagctacttcagcattacaacatcaagacacctcttcttagcttccataagttcaacgaacgggagagagagcccactatcttaaggaggcttcatgaaggtgaagcagttgcactgataagtgatgctgggacgccaggtattagtgaccctggcatggaactggctagactatgtgcaactgagaaaatccctgtcattcccattcctgggccatctgctgcaattgctgctctttctgcatcgggtttgccatcaaatgaattcacatttggtaaataatgctgatactgtactcattttatttttcagttgtaaggaactattggggtcagttcatattttcaattttagttgggtttttaccaaagcatgctcggtcaagaagagataggcttgagatatctgctcgtgaagctgctacacaaatattctatgttcctccccatggcattcagcagtttcttgttgatgctgcttcatcttttggcgattccaggcattgtgtggtcgcaagggagataacaaaaatacatgaagagttttggcgtggaactttaggtgaagcaaatgaagcttttgcaactcgacaaccaaagggagaaataacagtgctcatagaggggaagttaatttcagatgacgaaattccatcagaggatttccttgagcatgaactaagagaattgacggcaaagggatatactctttctgcggcggtgaaattggtcactgaagccacatcagcaaagaagaaagatgtttatgcactcgcattgaggttgtttggaaaataagtaaaatggaatttttggtcgcatctggtaattaaacttatttctatgtactggcatattttccatttgactctgtagataccatgaatcacattgggaaggtgttatttctctgtataatgttcatgattctgttaatcaccgtggcatcgttaggttagcttgatgggacataatcagttacctagttttgtttatcttacaccttgcatacaaataaattattagttagttttaaaaaaaaaaaaaaa

SEQ ID NO: 90305 - DNA, 392 bp, Zea mays
  Clone ID: MRT4577_182361C.1
gggacggacacgttccacaaaaataacttccagatacgacgagcgcccttaaactttccgagatcatactattggggtgggtgtacttctcactggggctagctatctaaaccaacacagactctggctcaagcagagccataccactacggacaggaaaggttgcggcactgagacgcactaccggcaggcccggttcaacctgctggaacagctcacccacccagctgctcgaggacccaggccgcaactaccgagtccacaatctgaaggcccagccgcgcgcgttcctgtacaccaaccactacaacaccgacgaggtgatcaccacgaacgaatgcgagggcgacatcgccctcatcaacggcggtaagatggactcgttctacttc

SEQ ID NO: 90306 - DNA, 397 bp, Zea mays
  Clone ID: MRT4577_182362C.1
aaaaaaaaaaaaaaaaaaaaaaaaaaaaaaaaaaaaaaaaaaaaaaaaaaaaaaaaaaaaattttttcctttgacccaaaacccctcttgggctaagtttttagttcctttccttcccccttgcgggggttgtcccctttccttttggggggccccggtccccctttttggggtgcccgttttccacttacactggccggggttttcaaattcactgggcttggggatacccttggcccttccccacatttactcttttttgcacccttcccctttttccttagggggggtaatgttaaaacggcccggcccttccccttttccccttttttgaactccttttttgtgatttggcccccccttttccctgttctttacccccggggggtggggtttt

SEQ ID NO: 90307 - DNA, 459 bp, Zea mays
  Clone ID: MRT4577_182363C.1
cccacgcgtccgaacgacgacacacgaccatgcatgcatgagttggctacaaagaagggaggagcagctagctggtactggagatggatatggatgcatggggagaactacgtacgtgcgtacgtggaaagaacaaattaaagtagtcattttactcgcgcagagagagaaaagctttgtgagatggatcgtcaccagctagcttgcgtcgtcgtcgacggcgatgataagcaaataacattttacacgcagacagcagtagtaacagcaaatcgcgacccaccctccgccgcgaccgccatcgcgtccacggtacagcgtacagtcgtcctggtcgccgtcgcgcgcccacctcatcaagatcaggctttggccatgtccttgccgccgtcaactccttcgccaaccccagacccacccagagaggctagagcgaggccgcaggcggcggctgtggat

SEQ ID NO: 90308 - DNA, 549 bp, Zea mays
  unsure (1)..(549): unsure at all n locations
  Clone ID: MRT4577_182364C.1
gtctccacctgaacccactgggggccggagtcccgccagagctacaggagtgcgaggaccaaaacaaaactatggtgaaacacgcatttgacagctttcgcgctctccaagcgccgtgtcgctacaagcctatgtgaccacagttcatcgccactctaatgtctgcgacttcgccggcggggggtgcgcctttgcctactctctacctaccaacggccctgctctccacccccccgccctgcctgccatcctcatctcccatgcattcgcgctctttctggatgtgttcatgggcctcaacataattcgcagaactactgaacccccctggcactcttacctctccgcgctcgcggtgacatccccattaccacctgcctcctgatactcgtctcccagcttctttgacctcnggtcgcctgctttcctctgccttgcgttgcacactcgcaggctatccctacgcacgctaggtccgcgatctccgacatctaattctttctgatgaatatcgtggtcaccctatcgctcacatacaccgggtacgct

SEQ ID NO: 90309 - DNA, 295 bp, Zea mays
  Clone ID: MRT4577_182365C.1
acaaacaggccttacttccatctttttttttgcatcaggctttaacagccagtaaaaactcccaatggtttctacatcaagcacacgaaagaaaggctgcgacataaaaaggcctccgtaacacgcaccccacactgtatggttacaggcgacgcatatcgcccaccacccaagggaaaacgggtaatacccaaaccgagcatgaatatgggcctagccggagctgtgcaagccggcggggaaaccgttaatggacaggacaagctgggtcctccaggcccgtgaggtactctct

SEQ ID NO: 90310 - DNA, 372 bp, Zea mays
  Clone ID: MRT4577_182366C.1
atcccacggcagcagcagcacgccaacgcagggaacttcccttccttctcgccagggcagggagcagctagcagccatggcgctcggcacccttgtagcagggacaacgcccttccttcctccctgtttctgtccatggcgagcaggagtttttccctcccatggccgacggcttccatctccatcagccgccatggccgagctcccttggagcaggcgctccccaccgtggcgccctcctccctggcgcttgctccctgcaggagagcagccggcgccccattttcctccttccctgcttggtgcgcgcaagggcagaagctccagcagccatggacgcccaggcccgacgccctgcgtgcgttcctccat

SEQ ID NO: 90311 - DNA, 527 bp, Zea mays
  Clone ID: MRT4577_182367C.1
ggctagaacatcattcattcactggtcaaccggtacagtatagcaaaaatgcctgttcagattaagctaaactttgacggatttctctagacagcgatgtctccccagatggccagagacacgagctaccaattcatttactcttgcgctcactggtgtagtcatcaatcagcttctcgacatccttccaaaacaggccctccacaagaactccttcctttgtaaaccactttgttacgctcttagtgaaatgaactggcttgtttgcagagatagactgtggatccgcacttgctattgtgagagtgtacatgtccgaaaatcttggtaatttaaaaaaaatagtgaggccagtgctgctgaaagaaccctgagaggaaacccataagttagcaaagctattgacaccacgtcgttaataaatactgaatcaaacaagaacagacatctcacagaactgctgataacaattacctatagttaaaataagatcacatcaatatctaacaaggcattcaattcggcat

SEQ ID NO: 90312 - DNA, 662 bp, Zea mays
  Clone ID: MRT4577_182368C.1
atactctcgatgaacgaacggatatcactctcaaaaaggattcgtctcttgtcctgagaacaatctactagctatgtgcgattagagcgagcgaagatacaaaacatgaaaatccctaagatatactaccatcatcttacggttgaattaacccgcccagtaaaggcatgggcactaatgatagagagaacatttctctaggactcctcatgtggatctctagccgctcgtccttgggatgccgctgatactgacagagagcagaaacgctcgtcaggcccgttgatgtttgcgctcctagattcgctgtgcgatgtaatacaatcataacttcctgtctgcacctgcatgccgaggtggatctccacacggaatcgacttccctgttgccacccccggtgctctgtgtcaggaccgtacacaaatggatactgccttgccgatgtacgcgcgcaacatctgtcactcaagaggactccacctgattacctctgcgtctgactgcgctataagagtttgacctgttcacgcgccgaattgaggacaaatacacgtctgccgaaaatggcattctcaacaccacgaaagaatagactgtctggctgcagagacatgacgcgctgctctcgattactaccacaataatgtgatgcggacgctgc

SEQ ID NO: 90313 - DNA, 686 bp, Zea mays
  Clone ID: MRT4577_182369C.1
gccggccggttcgggactctcactccctcgctccgtctaccagtaccaccacgtccctcctcgtcgacgatctcgtagcggcggcgcacatggcgagcgacggcgcggcggctacgccagtgaaggttaccccaaagaaggccaatctcctcgacccgcactccatcaagcaccttctcgacgagaccatctccgaggtcgtgaagagtaagggctacaccgaggacacgcggctgggcaactggaagctggggatcggagccgccgtgattgctgtcgccctcctcgctcagttttaccccaagaagttcccgcagaaccgcgatttcctccttggctgcatcgccctgtatgtggtgctgaatgtggtgctgctgatccttagctacaccaaggagaaggatgccatcctattcacgcaccctcctatggtttacaaaggaaggagttcttgtggagggcctgttctggaaggatgtcgagaagctgattgatgactacaacagtgagcgcaagagtaaatgaattggtagctcgtgtctctggccatctggggagacattgctgtctagagaaatccctcaaagtttagcttaatctgaacaggcatttttgctatactgtaccggttgaccagtgaatgaatgatgttctagacatgaaaaaaaaaaaaaaaaaggccccta

SEQ ID NO: 90314 - DNA, 1243 bp, Zea mays
  Clone ID: MRT4577_18236C.1
gccgcggcctgtagcgtcctcaaccgccgccctgagcccttctgcgactctccccagtggcccgatgactacgccgacgattcgtgtcaaccttgccctccgaacgggcgatgtgtggacggcgagttggagtgcgtccaggggttcaagaggcacggcaaagcatgcatagaggatggactgctcattcaaagagctaacaagattcttctacagctaaggatctgcgatcagcatgctcgtgctttatgtggccattctgccgaaatcctgtttcaggagcatgaggtctcaaatgcaattgatgaactcttgtcaaagattcccgctggtctaactgaggatgggcttcaacttgtgaaaactagggtgctggagagtgccgggggcttcttcgatacaacatttacttccagcaaagtcaaagtatataaatgccctgagctggttgcggagcttcatatgccaatgggttgtcgagttcgccaatggatctttagaaataccacatctgtggcaatcttttgtatcctgtttgcagcactgctttggatactgtggatcatttacaagaggcggacattatctaatagagctgagcaaatatacgagcaggtatgtgaaatccttgaagataatgctgtaaacgccgagattgacaactccaattctgaggtttgggtggttacctcctggctcagggatcacctgttggttcctcaagagagaaagaatgctttcctgtggaagaaggtcgaagaactcatacgagaagattctcgaatagatcaatatccaaaggtgattaaaggggagtcgaaagttgtttacgagtggcaagcaagtggctcgcttagtgcaaagattaaaaaggtgcaaggtgcaagggccaagtcaaggactggtgtaggtgtcataaaatttggggaagaaatgagtgcttcctccttgggtgaggtgagggagcagggctcgtgtgatttaacacgcgaagaaagaagtaaggacaaggtcacgtgcagtgattaggttatcaatcaatctatctacatgtatgcctctggtctttagaggaaccagcacgtgagcttggcaagagttactgatcttttgtaaattttgatgataggagccgagccgtcacagtgtgttgttgctgttacagttgagtttgttggcatgtcatgagattgtctggtacagtttcaacaactgatgaatgaacatggtcactggaagatgc

SEQ ID NO: 90315 - DNA, 394 bp, Zea mays
  unsure (1)..(394): unsure at all n locations
  Clone ID: MRT4577_182370C.1
gattccggtcgccacgcgtcgtccctgaaatataaatcagctggagttgggggaaaggaaaatatctttatctgtctggtgtactccactttgtgcacacactgagataagtttagggtggacaacaaagggtctcgtgctccagttcctgctgcagaaaatatcaactttggatccactagtgcctgtattcagagttcttatctggcccttntccctgtctatgttactggactaagttcagtgtctaggaaagccagtgtcctgcgtggtatgtggatttgggagccacgtttgtgagtccctgctgtgttgtcacccttggaacccttctccaccagtctagctgaactcgaggacatctgccctatcctggttgctttagcgcctggat

SEQ ID NO: 90316 - DNA, 1603 bp, Zea mays
  Clone ID: MRT4577_182371C.1
tgtattttgaagattcagtttgaaattcatctttgacattgagattaaaatcacaagtgccgctgtcagcacatgatgagcagtgtcaggttgtctggttgccctattttgtttcttgacatctaggctgaatttgaaactgaatcgttgcaactatacttaaccttgtctgtcctatatacaccaccattgttgtgattttttttgaaacgttgcaaaatgatattttatctaacgagggcaccaaatctgcattggtttcaaaatttactgtgatatccagtcctagtggtcactaaagcatatgtttcaaaagcagtgcttgttatttgcccaataattctttttggtgaacacattgccttgaaattgatgccgaattgaatgccttgttagatattgatgtgatcttattttaactataggtaattgttatcagcagttctgtgagatgtctgttcttgtttgattcagtatttattaacgacgtggtgtcaatagctttgctaacttatgggtttcctctcagcgggccggccgccatccgtcattgacagatcccgcaatactcacagggccctcttctctcatctctcactccctcgctccgtctaccagtaccaccacgtccctcctcgtcgacgatctcgtagcggcggcgcacatggcgagcgacggcgcggcggctacgccagcgaaggttaccccaaagaaggccaatctcctcgacccgcactccatcaagcaccttctcgacgagaccatctccgaggtcgtgaagagtaagggctacaccgaggacacgcggctgggcaactggaagctggggatcggagccgccgtgattgctgtcgccctcctcgctcagttttaccccaagaagttcccgcagaaccgcgatttcctccttggctgcatcgccctgtatgtggtgctgaatgtggtgctgctgatccttagctacaccaaggagaaggatgccatcctattcacgcaccctcctatgggttctttcagcagcactggcctcactatttcttctaaattaccaagattctcggacatgtacactctcacaatagcaagtgcggatccacagtctatctctgcaaacaagccagttcatttcactaagagcgtaacaaagtggtttacaaaggaaggagttcttgtggagggcctgttctggaaggatgtcgagaagctgattgatgactacaacagtgagcgcaagagtaaatgaattggtagctcgtgtctctggccatctggggagacatcgctgtctagagaaatccgtcaaagtttagcttaatctgaacaggcatttttgctatactgtaccggttgaccagtgaatgaatgatgttctagacattaactttggttccaagctttctgtcgtgtccatggataactatccgtccgaatcctagaaacgtggtccgtgcttgtaacctgtttgttctggtgcttccatacgccggagcagattttgaagagaaatgaaacaaatcgttaaatcaaaaaattaaagcggcccggccaatgaaaaaataactgtacaaattattaacaaaagtaatgtaaaatatccatcaag

SEQ ID NO: 90317 - DNA, 382 bp, Zea mays
  unsure (1)..(382): unsure at all n locations
  Clone ID: MRT4577_182372C.1
tttttttttttttcctttttttggatgcgttgcacaagcaattaattcctcccaaatttctacttaaaaaaataagcatctgatcttcagcttctccgatccctacatgcatacttacgcctctcgaaaaaacctaagtaatgngggaaacagggctaagatccatccgatttaatattggaaaaaaaaagcacgctacctgatccccgtacgcgtcgttgccgccactcacacgatccagcgaagcaatgcatgccctacgctgcatgctatagctagagcatcagcatacacatgcatgcatggagcacgcatcatctctcgggccgaattcggcacgagtctctctctctctctctctctctctctctctctctctctc

SEQ ID NO: 90318 - DNA, 1145 bp, Zea mays
  Clone ID: MRT4577_182373C.1
cattgggtacctcgaggcccgggccagccagtttaggcagagggttcttccttcgccatcttcagttccctccccacaccgttgcggcgcggcaccacctgaacccgaccaccgcccacaccatgttgtcccgattgccggcgacggtgagccttcttcgccggtcgctccgagaaccgcgcggcttcagctcctctgtgctggcttcatctaaggaaacggccgacggaaagctggtggcgtcggtgcttttcgagcgcctccccgtcgtcatccccaagatccaccccgttgtctacgctttccaagaattctcatttcggtggaggcagcagtacagacggcaataccccgaggaggtcctcggcaaggccgacgcgaggggtaagggtgattatcatattgattatgtgcctgctccaagaattaccgaggctgacaaaacaaatgaccggaagtctttacaacgagctcttgataataaactttatctcctgctgtatggcaatgcttatggggctcctgatggaaagcctgtatggcattttccggaaaaagtatacgaaaatgaagaaactatgcgactgtgtgcagaggctgcattaaaatctgttcttgggggacttgaccatacatactttgttggcaatgctccaatggctcatatggcagttgaacaaacagattcaagtgtttcatcattcaagcgtttctttttcaagtcacaagtggttggcacaacgaaataccatgttggaaaatgcaaggacttcgcgtgggtgaccaaggatgagctgctggagtattttccagataagatagctctgtaatcaggctatgggctatctgaacaattagcattttgtttcttgactggcgtacaagtgcagtgccactgttctgtcgtcacgagcagcattgccgaggaaccaccagggcggcgggcaattgacacatgcccattttgcctcttttttcttgggctggttatgttgtgtttggcagtgacatttctgtagcatgttgtcctctcttacctgctgtatgttcacgtattatcagtttgttgtacaccatggggaagaataataattagcagggcgacatttgattccttgctttgttatcgaaaaaaaaaaaaaaaa

SEQ ID NO: 90319 - DNA, 684 bp, Zea mays
  Clone ID: MRT4577_182374C.1
tgtatggcaatgcttatggggctcctgatggaaagcctgtatggcattttccggaaaaagtatacgaaaatgaagaaactatgcgactgtgtgcagaggctgcattaaaatctgttcttgggggacttgaccatacatactttgttggcaatgctccaatggctcatatggcagttgaacaaacagattcaagtgtttcatcattcaagcgtttctttttcaagtcacaagtggttggcacaacgaaataccatgttggaaaatgcaaggacttcgcgtgggtgaccaaggatgagctgctggagtattttcctgagaacaaggatttcttcaacaagatgatcatccacattagataagatagctctgtaaccaggccatgggctatctgaacaattagcattttgtttcttgactggcgtacaagtgcagtgcactgttttgtcgtcacgagcagcattgccaaggaaccaccagggcggcgggcaattgacacatgcccattttgcctctcttttcttgggctggttatgttgtgtttggcagtgacatttctgtagcatgttgtcctctcttacctgctgtatgttcacatgacgtattatcagtttgttgtccaccatggggaagaataataattagcagggcgacatttgattccttgctttgttaaaaaaaaccaaa

SEQ ID NO: 90320 - DNA, 389 bp, Zea mays
  Clone ID: MRT4577_182375C.1
attcaactaaagaaaaggatgcgccgggagcccaagacccaaagctggccccagttggggcccctgcccgctgcagggaccctgggggcggttggaaaaaaaatttccagcgggcaccccaggggacaaaaaaccgggttagcgacccccaaaaccccggggggggccaaccaaaaaggcccccgggcccggcggggaaaggcccccccaacggactgaaaaaataggcccccggatgagagggtaccaggacacactctttggtaaacctaaaacaccaggtggtttttggccacaccgggtgatccgaaggaggccccaaagaaaagggggcccgggaccaaaccaacgggaaaaacaccaggggggggggccccggttaaaccaat

SEQ ID NO: 90321 - DNA, 290 bp, Zea mays
  unsure (1)..(290): unsure at all n locations
  Clone ID: MRT4577_182376C.1
gtctaggcgccggcgaagtcgcaggatgaggcggcggcggcggtagaggaggagcgtggagagcgcgagcgagatgaagaggaaggcggagagcagggagatgatgaggaggaggcggactggcgcgtggcggtcggcgaccggcgcgcgcgggatctctgtntataggggggcggagggggcagggcgtactcagagcatgccttgccagcgccggggcagagggggaggcactcgagcggtgcttccgtgcagttgagggtgactgacgttgccgccgcgtgcgggtg

SEQ ID NO: 90322 - DNA, 437 bp, Zea mays
  Clone ID: MRT4577_182377C.1
gggaagaaaaggaagaggggaaaaaaaaaggcggggaaaaaaaaaaaccccagggcaaaaagaaaaggggggcgattaacgttttaattcccaaaacaaaagctaaaaaactttaccgaaaaaaacaaggggatgtatcggggggccccaaatctggacaaagggaaaaacaagcccccgaaaacccaagccggtttcaacaccaccagggggcagttccctttggcagccgctccattggattttgaagccctttccacgagccaaaattggacacccaaccgaaggtgggccccaggggaaaatctaagccaaaacaagaaattaatcatttgaaaaagcccaggccctgggacctactggaaacactagcgagcttgaaaacaaaacatccaaggctgacccactgattaccgaaactgcagttgaaacgtttt

SEQ ID NO: 90323 - DNA, 465 bp, Zea mays
  Clone ID: MRT4577_182378C.1
agtagttgccaaatctgtttatttgtatgtggaaatatgaaacaaagcagtgtctagtagccagtatggctgtatgggacatgatccctggctggtctttattgataaactttcccaaaccctctttattgcttaatgtttaagttgaaaaggcatttgaagttcttaattgagacagtcatatatgattttttggtttgtttatcttaaaaactcttcgtcagaattgcctaaatgtgtggtttctcttagttcatgcaatggaaccgttgatataacagcatggtgtcaatggttgagctatatttctgataacgttctctgcctaagttcttttttttcatttcttttgtgcagaatcaattttggtctcttggtttattttattactttgaaaactctggtactaataagggtttggtgactaggaactgttggatttgggtgaggcagttggaacccaga

SEQ ID NO: 90324 - DNA, 174 bp, Zea mays
  Clone ID: MRT4577_182379C.1
atagggaaagcggaaacgcctgacgccaccaggtaccgagattccgcaattccgcacgccacgacccacgcgaacttatcacatgttctaacaagacgagcgcacagtaggggcctacgagtgccctggccccccttgctatcgcgcgccagatccctatctcgccgcgatcca

SEQ ID NO: 90325 - DNA, 808 bp, Zea mays
  Clone ID: MRT4577_18237C.1
gtaactttctgcagggccaagcgccgccaaaaggcatcagcagagaagaaggcgaccgtggccgcaagggataagcagttacattcaggcgtattttaagctcgagactttgaagcaagaccttaaatttcgagtctgcaaattctcaaactaatccagcttcaactaatctgcattcctccctccgcccctagacgaggggaagcaagctacataaggaacatatccggccttcaagtatttatttcaacctcaatcaggccttgaaatttgaatgtgtaaggatctgctgctaaactattttactgctagcaagaccacaaattgtgaatttcattcagaacagactttccaactttcccgagcagatagagaaacagtccagagacaagaatatgatctccaggtttggtgcatccttataaatgacaaagtccagttcaggatgcaatggcctcaatatgcagaattgcaagtgaacggtattcctgtacgagtaatgaccaggcccggttctcagttactagggataaatgggcgggatgatgggccactggtaaccacatgcagtagagaagggatcaacaaaattagcttatctagagtggatgctcgaaccttttgctttggagttcgaattgttaggaggactgttcctcaggttttgttcatttagctttctacttatcatatagttgaaatgactaggttcacatgattttctgttttgtaaatggtccctatgtattgtgaacttttatcttgtttcatgttaaatatcatctagacagcaatattttgtgttgcc

SEQ ID NO: 90326 - DNA, 1316 bp, Zea mays
  Clone ID: MRT4577_182380C.1
ctcggccgggagggatcctcctcggccgcaaacaaaaccctcctcgtcatccgcgcccgctttcccccctgccggcccccggtctcgctctcgcccaagcaccaaatcttcctcccactcatcacaagacgaagtttcagtgcctgcgcgtgccgcgcgatctctcgtccttggcgtcgtcaagacgcgttagtttcagtgcgcgcacgagtgtgtgttgtgggagttagtgagagcgagagcgagagcgagcgcaccaagcgattcggcgggcggcggccgatggggagggcgccgtgctgcgacaggaccaagggcctcaagaaggggccctggacgccggaggaggacaagctcctcgtcgactacatccagaccaacggccatggcagctggcgcctgctccccaagctcgcagggctaaaccggtgcggcaagagctgccgactgcggtggacgaactacctccggccggacatcaagcgcgggcccttcacatccgaggagcagaagtccatcgtccagctccacgccatcgtcggcaacaagtggtccatgatcgcggcgcagctccctggccggacggacaacgagatcaagaactactggaacacgcacctcaagaagcagctgcgtcggatgggcctcgacgagcccccgcccggcccggccgccggctgcccctccgcgcgccacatggcgcagtgggaaacggccaggctcgaggcggaggcgcgcctctccctcctcgccaccgccgcctcctcctcctcctgcggcgccatcgcggccacctccgcctcatcctcctcctccaccgtggacttgaagaccgcatgcgccaggcccgcggacatcttcctgcgcctgtggagctcggacatcggggactccttccgccgcaagacggccgcggcgcccgtggtcaaggggaaggacgcggtgatcaagcaggagtcgcaggcgctgctgctgggtcccggggacgactcctcggccgcgtccaacgagacggaggtggcggaggcgctggaggagtaccagatgttcctcgacttcgccggcgaagagctggggctgtttcacggccggcacggcggcttctcgctgttcccgccgctcgacgtgctcgccgaggcgtccctggacacggcgttcaagtgaagacgtagcgagtaccacgtacgtacacatacctattgccatgggcaagcggcagtggacatgcctctacggctagctgtatactgtacgccgcctccgccttaacatgagcgcggatgtactatgtatatatgcatgctgtctcgcgtacc

SEQ ID NO: 90327 - DNA, 235 bp, Zea mays
  unsure (1)..(235): unsure at all n locations
  Clone ID: MRT4577_182381C.1
gcaagtacatataggcacangagagatcaatatactttctagagataaccaatttacatattgtgaatcactaaggccaacgatgaaaggtattgcaaatacatgacctatctaatagaaaaggacctatccttcttctacaatcctcaagagggtatgatccatttcagtgcacactgggtgccacttacctaacttgaggatgctcaacatacttacatatatcagatggagg

SEQ ID NO: 90328 - DNA, 362 bp, Zea mays
  Clone ID: MRT4577_182382C.1
tacgtaagctcggaattcggctcgaggcattaccaaggaccggctggcatcggagtgggccggagtcgactcgagggtggctttcaaccggatctggggatctacaccttgttcgacccgacagcggccggttgaagtactagtccggacgggcactgctatagaacaggctggacccgaggaaaactcgcccgacacaagacctacgctagcaatggaagaaactgagcaaactctgaattactagcagcggcctgccgacaattcgaccaaggatggcaaccgacgccaacgatgagagatacatggacgagcgggagccatcggcgcaggaataattaataaaaaagtgccgagagtgg

SEQ ID NO: 90329 - DNA, 229 bp, Zea mays
  Clone ID: MRT4577_182383C.1
aaaatagatctgaaatttttgaagtggagctctcctaaacagggcctcaatgaattgctccactaactcctgcaaattttctagaactagatctatgcccaaacaaggtctaaacctaaatatttcatggttcacatatacgacgatacattaaatatttactaatcatatattaatttctctaataaatttatctcttcgtttcgtcttcatcgctataatctcgtgc

SEQ ID NO: 90330 - DNA, 306 bp, Zea mays
  Clone ID: MRT4577_182384C.1
tcgaccggcctcagtgggcggtaacatccgagatgaacacaccagcaagacgctcaagctctaatatttccatataacgcgactttcaaattcttgccatgcatcagccttcatcttctctctctaaagcaccctcttaagcttctcagtggatactgcacccaatgatggctaccttgtgccctatgaagaatggtatacttctaactgaagtatgagataagattatcctcctctccacttataaaagctactcatacatgaatgactacaatgtgccaaattctaaaacattactcgactttg

SEQ ID NO: 90331 - DNA, 1071 bp, Zea mays
  unsure (1)..(1071): unsure at all n locations
  Clone ID: MRT4577_182385C.1
gggtacctcgaggccggccggngataattacgttaatgtttacataaaaaaaaaaaaataaaaaaaaaaaaaaaactcgcacctcgcccattcgcttcaccaagggtttaagaccggcggcgatggcggcgaagctggcgcagctgcgcacacaggtaacgcgtgcggcggagttcgcctcgaagcacggctgctcctactacaaggaggtaatggagaagaacaagcagtacgtcgttcagccccccaccgtcgagaagtgccaggagctctccaagcagctcttttacacccgcctcgcaagcctaccaggtcgctatgagtcattctggaaggagcttgattgtgtcaagcaggtatggaagaacaggaaggacctcacggtcgaggaccttggcattgcgagtttatttggagttgagctctatgcatggttctgcgtaggcgagattgtcggcagaggtttcaccttgaccggctataaggtctagatgatttccactggtcaagacctgctttataattgatactcttagctgatgcttgtcgcgacggggcttgtaagacctgacctagtgctgaatgccagcaaagacgggcacatggttgcaacattgcctcaataatttgcccgcgcaattcttgattttgatgcatgtaattctttgtcagttgcatgtgctgcagtccctgcgtgcagactcatttcgtgtcaaaaaaaaaaaaaaaaaaaaaaaaaaaaaaaaaaaaaaaaaaaaaaaaaaaaaaaaaaaaaaaaaaaaaaaaaattttcctcacgaataatcctcttgcttgttcgtcctcgtccggttcttcgccctcgccgcgcaggactaccaatccaaactggcaacaaccctgctgccaccccacagaaaatttgaggagcggacgcccgtttaaatggctattgaagtcccatccatggagctccaccgctcctcaccgttgctctcgggtggccaaggagaaaatacatgcctacaaaaaaagcccttctttgtccaagcaaaaagactagtggggatggagaaagcaagtacgaggcca

SEQ ID NO: 90332 - DNA, 241 bp, Zea mays
  Clone ID: MRT4577_182386C.1
ccgcctcttcctaatccgcctgccgcggcttattctccgccgtggaggaaggatcaactcgatcgccagtcatgacccggtgagagaaccaggattcccataccgggaacgtcttcgccgcatctgcggcttctcctggaccgaatccggcatcttcggttgccggtaagggcgctgagggccattctgtggtgcggccgctgcagtctgagctgattgctctgattatgggcggagaccc

SEQ ID NO: 90333 - DNA, 319 bp, Zea mays
  Clone ID: MRT4577_182387C.1
gggggggggggagcaaaggaacaaaaaaaagcaagcgggaccacaccccacggacgccgcagccaaccaccaacaaggcgaaggacgaaaaacacggccaaccccagaccgagcaacgggccaaagcgaccaaccgaaggaaggacaagcagggggggggggggggacaagaagacgccagaagaaagccgcacgaagcgaggggagacaacccaccgaaggcgaccgcaggacagagggaagaggaccagcaagaccaggaaaagccgcggagacaaccgcagcaacaaccggcagcagagcagcccgcgcaggcaag

SEQ ID NO: 90334 - DNA, 831 bp, Zea mays
  Clone ID: MRT4577_182388C.1
ttctccccttcgatccccaaggtgagcttctgattctccaccataaactctgacctcttcccgccagatccgtagtctccccaccccgtgcgtccagatctggttcctttcgatttgactcggttttcccttcctgttcggggtgccgtagggtttaggatcggcggcgatggcggcgaggctggcacagctgcgcgctcaggcggtgcaggcggcggagttcgcctcgaagcacggcggctcctactacaaggagctcatggagaagaacaagcagtacgtcgtgcagccccccaccatcgagaaatgccaggagctctccaagcagctcttctacacccgcctcgcaagcctaccaggtcggtatgagtcattctggaaggagcttgatggtgtcaagcaggtatggaagaacaggaaggacctcaaggttgaggaccttgggattgcgactttatttggagttgagctttatgcatggttctgcgtaggcgagattgttggcagaggtttcaccttaaccggctataaggtctagttgatttccagtgatttaagacctgctttataaatcgacactttagctgatgcttgtcgaaacgacgatgatacctgccttccttcacaattttgtttcttgtaagagtctacctagtgctgaatgccagcaaagacgggcacatggttgcaacattgcctcaataatttgcccgcgcaattcttgattttgatgcatgtaattctttgtcagttgcatgtgctgcagtccctgcgtgcagactcatttcgtgtctttcgttctgcccacaaaataaattctttctgcgttac

SEQ ID NO: 90335 - DNA, 119 bp, Zea mays
  Clone ID: MRT4577_182389C.1
cggagcctgtgcgtaaggaaaagtgtgggcgctgctctggcttttctccccgctcgtctcgcgcatccgcagtcggcacaccctgccatttctattcgcagcaccaggcgccgcttctc

SEQ ID NO: 90336 - DNA, 311 bp, Zea mays
  Clone ID: MRT4577_18238C.1
tcgggcagcaacaccaccaagaagagcaagctgtcgtggtccaagagcttggtgaggaagtggttcaacatcaggagcaaggcccacgacttccacgccgacgatgtggccgcgattggtaggacagttgcaggagggggcgatgactagtggaggaggggcagcagcttcacccgtagggagccgagcacagtgaagaagagcaagacagagaggtcctcgaggaggagcaatggtcactcgaggcggttaaagattgtccttgatgccttcgaagccacattgacattggactttaggatatttgttgc

SEQ ID NO: 90337 - DNA, 331 bp, Zea mays
  Clone ID: MRT4577_182390C.1
ttgggtacctcgaggccggccgggatctcatactttacgcgtctgttcttctgcgctcctctcctcctaaactgcgattatagcacaacaggaattgactccatcgctagcgcacgtatgtaaacacgttgacgaaatgtcaagttagaataatgaccacgtgcctgatcgatggtgtcccaagctctcctctccgaccgggagctggtgagccgccccgtgcagacatcctcctctacgacctcggtaaggaacgcgcccttcgtcatcagggccagctccactcctaccagcctagtaaggtgtcgacaggcaaatgtggtttcccgtg

SEQ ID NO: 90338 - DNA, 294 bp, Zea mays
  Clone ID: MRT4577_182391C.1
gtcatgcgtacgtccaggtgtatgcacacgcgtacattagacagaaaggatagagaaggaactagctgaaactagatgtaatgtggaaaaagatctgaacaaagacaggatatgatatatttgagaagtacccgtgcacttaagaagaagtttgatgatgaattttgtgacgataactggggatattgaagagattggagagaactcggatggtgccatttgcatgtccaagaagaaccaatgtgctttctgagggatgaattgtgtagtgtgcatagtatgttcaagggagtg

SEQ ID NO: 90339 - DNA, 299 bp, Zea mays
  Clone ID: MRT4577_182392C.1
cgggcgggaaaaaagatccccaccagaacccccccgagagggagaccctcccaccgacaccacccagggatttcgccgggagagcgaccacctcccgagcgctcccgcaccccttcccatctacccagatccagagacggcgccggggcaccttcgtacccaccgccgcctccgagcgtcgcgaagacgacaaggagaccgctaaaggttccgagtcggaagcccggcgagagcccactagcctgccgccgaagggcatccctttctcgcggatctcgaagaacgcggcaagcgagaag

SEQ ID NO: 90340 - DNA, 294 bp, Zea mays
  Clone ID: MRT4577_182393C.1
ggaaaaaaactttttttttttcatttcaaatggtcattcaggggattggttaaactggcccttgcccccatgggggtgggggacacatttttacccaaacatcgccccttaaagacccaacttggttggttgcccggggtttttctacaacacaatttttttttaaggggggacaccccccgcaacaacctaagggccttgagttggtttttgtaagccccaaatttcccgaagttggttggcttttttggccgccaaaaaaccccggaactggcccctttttgggtttttttt

SEQ ID NO: 90341 - DNA, 664 bp, Zea mays
  Clone ID: MRT4577_182394C.1
aggtgcgataatcacgagggtaacagcgccattcttctgataaatcgtattagtactcctactctctactccacaaacgtccaattcgttccgcctccactcacggtcaacactgagagagaatggaagggaaggcgaagaacccagcggagtcggtggccgtcgtggcggtgccgtccccggcgcagggccatctcaaccagctcctgcacctgtctctggagctagcctcgcgcgggctggacgtgcactacgcggcgtccgccccgcacgtccgccaggctcgcgcgcgcgtgcacggctgggacgaggacgcgctccgctcgatccagttccacgacctcggcatctcgacctacgtctccccgcctccagaccccaccgccgacccgcccttcccctcccacctcatgcccctgttcgaagccttcaccgcgggcgcgcgcgccccgctcgcggctgtcctccgcgagctctctgcttctcgccgccgcgtcgtcgtcgtgtaccgatctcatgaacgccttcgcgtccgaggaggcggcgaagctgcccaacgaggaggctttcgggttttactccaccgccgtgtcgtccttcgtccggcggatggacgccgggtaccgcctcctgtgcgacaacggcctcacgcaccttcccacct

SEQ ID NO: 90342 - DNA, 613 bp, Zea mays
  Clone ID: MRT4577_182395C.1
ggttcggccgggtttactttagaccaccgaatagagagggccaccgttgacagaaagcgagagagagaaaggagagggagccgccgcgctcggtgatcgcatccaccgacgtatggtgcctggggagaggtcacagaggttcgccagcgtgcgaaggtcacgtgtgagcattcccttgggcacataagtcatcggagtccagggaatcgttcaccggagcgaaggagtccgccacggaccacgattctacgtggtcagagcactgaacaacacgatcgcagggtggcattgatggtatgtatatatactttcggtaagtaattatatgagctgacaggtagggagttaactgtacaaaagcttacctctttggaggggattcaagaggctcaaactttttacatatcagtgagagttttatgctgcttctataaaatgaaatgagtgagctattaaaaaatacaaatttcaaatcacaatactccacttttgaagaagatatgatcggatccatcacatttgccactttatttaccactttatcaggttgtttattcggaggtattattctattaatatggcaacatgaaaaatgcatgttatcaacagggaa

SEQ ID NO: 90343 - DNA, 337 bp, Zea mays
  Clone ID: MRT4577_182396C.1
ccggattcccggtcgaccagctccgaccggcagcggcgctgcgcatggccacccagcagtttcgccgctccgatcccgccggcgcccggtgcacacaggcgccgcgtcgccagcacgcgtcagagctggacttgcgactttcggctagccgggtcggctcggagcgctgcggcggagcgtctttcgactctgggccagtcgtgcaagcacgggaaacgcggagggcccgagagcgaactgaggggacaacgttcgcgatcggcggacttctcgggctgacgcggaggactgcgatgactgtcgtcggaacgaagggagcgtagaacgctccactctc

SEQ ID NO: 90344 - DNA, 774 bp, Zea mays
  Clone ID: MRT4577_182397C.1
ggggcgtagatccttcttgtggaatggaaacgacgaatgctcaggggcaagctgcctagtggcgtgggacacagtgtgcacaccaaaggaggatggggggctggggatcaaagacttgaagctgcacaacatctgtcttttgatcaagttgatacataggttgcactctgctacagactcgtcatgggcagtttgggtaaaagaacacatgaacatggccacaatggagggggatctaggaggaccacactgggatagcttgcggacacttcttccgatctatcaagcggtcagtacctcaactgtgggagatggatgcagcacgaacttctggcatgacgcatggcatggagaggatgatctcgctaccagactgccggccctgttttcacattgtgtgaagcagcaggctagtgtggcggacgtcatggccaatggacttcatcttgtgacacggttgtcatcacaagcacagttagagttgcatcaagctcagaacatcatcagtggtactcaactttctcaacaacctgatgaaagaaaatgcatgttgaccagcacacacgggaaattccagacgtccgctttgtatgagctcttgaagcgaccggtcaggtcagagaacgcattggcagcgttcgtatggaataacaaaacaccacctagggtgaagttctttgcatggctaatgactcaagggagaatacagagcaagaaaaatttgctgcgcaagcggattgtggacgaagatgtatgtgaaagatgcaatcaggg

SEQ ID NO: 90345 - DNA, 808 bp, Zea mays
  unsure (1)..(808): unsure at all n locations
  Clone ID: MRT4577_182398C.1
tgctagcgtctggtagactcgacggagtagtcagctcccggagggaggcgtgcagcagcatcagtgcgtagctcacnccaacggcgtacaccagcgcgaactgtaggttgcagacgtacagtagcacagcagtggcaatctgcgcacagtgcagcagagcctgggcaacccccgnagctctggtggtgaggtcccaatggtcccggcagtagcgcacgccctcccagacagcgaggctggccagcatgcccagcagagccatcggcatccggtacaggcagcacgcgaagacgaggatggcgagcgcggcgtagttgcgcgcgtaccggcggaagttctcctggacgcggagcctggcctgggtgggcgtgggcggccaggagtaggacgcggcgccgggggggccgacgaaggcgagcgaccaggacggggtgggtgcggccaggtcggcggtggagaggcgcgcgaaggggttgagcgcgaggagcgaggcgagggtgcgcgcgaaggcgaggacgtcggccgcgacgccggaggaagcctggccggcgccggggctgtaggcggcggaggagggggcggaggggcccgaggctgacgacgacggccttccggtggtggtggtggagtcgaggaggtccaggtagccgctgtcccggagccagcggtcgagcgcggggtccggcacgctcagcgacagcgggttcggcttgaaggaggacgaggccgccattggagtggaatcgattgccgttgctgccgccgcgacacctgaccagaggcagaggaagaggattgtattgctcgg

SEQ ID NO: 90346 - DNA, 519 bp, Zea mays
  Clone ID: MRT4577_182399C.1
accagaaggccacatctggttaatttccgccaagatgaaccgctcctgctggctcagcgtgtccgttccttttgcgacaccaaggacacctagcggcaccctgcttcctacgatgctgtacgactggcggctgtaggaggaatgactggtggtctgccaaggttcgacacaggctaccacctgcccggcaacatatcctgcacggcgcagtctgtgtacgacatggaccatcgaccagggcgacaaggcagggcgaccagcacatgtacttcttcgacaagtaccacgccaaccagaaccacagcagcaagatctgccagaaccagctcaagagcttcctgaacaagacaactgcaaactataatcgtacagtgtgataacgcttacacgctcttacggcactatagaagcacctgtcacaaccaccaaaggctctatacctacctgctcctacacatgctcgacgaccacaaatatagtaccagtgatagaaccgcctagatgatcgtaataaggaca

SEQ ID NO: 90347 - DNA, 762 bp, Zea mays
  Clone ID: MRT4577_18239C.1
atccaggagactgttgccgcgctcaggaacatggtccccgggggcatcgcgaaagacgccgcggctgttctggacgaagcgatctgctacttgcagtacctgaagctgaaagtgaagacgctgggagctgtctccctctagcgcctctctcctcgtcgtggctttgttgtcgaaggccgaagccactggcttctggtgagaggagaaacatctgttcagttcagtcccagaggagctcggatcttctcctacccgactcactgtcggtggctgcacatcacccatcttcctcatcgtgggttggtatgcaaaagctagaaacatctttccgctgagcgtgatccaaagcgaagcccccattccatgcaaagcgctgggtcgtcccgtgcgtgtggtggctcctgctttatatacgcgttgtgctcctgctttggctgatgtttgctttggtagttatatataatagttctgtgtactacaaagttaagtaagtcttgtaaacgtgcacatcctccaggagggttttgtttcaaaaaaaaaaaacaaaaacaaaaaaaaaaaagacaaacaaaaaaaaaaaaaaaaaaaaaaaaaaaaaaaccaaaaaaaaacaaaaaaaaaccaaactaaaaaaaaaaaaaaaaaacaaaggggccgccccctttaaaaaacccaaccttactaccccgtccatccaacgaaaaagttttttaataggggccccaaaattaaatccccggccccccgtttaaaaaccctgga

SEQ ID NO: 90348 - DNA, 190 bp, Zea mays
  unsure (1)..(190): unsure at all n locations
  Clone ID: MRT4577_1823C.1
cnttcccaaaancnnaggaagagaacaagcggggggaacacaggggggaacggccggcacacaccngcacagaannacangaaacaacacaangngaagcacacaagcagaggcaggacgcaccgcgaanccgagacacaagagcgnacacaagacgacacaccgngganagaaacacaccaaaaacacc

SEQ ID NO: 90349 - DNA, 208 bp, Zea mays
  Clone ID: MRT4577_182400C.1
aacttatattcacttattagttttttgattaattcccctaaaaacagaaagtgtctatggtccaccgcccaaccagagaataaaccccccaagccgaccaaacaaggaggcccaacatgaacagcccaacagccacgcttgtccacctctaagaccagatgctgaaaaaaaaaggcagccctgtgagcctgcgactgaagaaacccat

SEQ ID NO: 90350 - DNA, 326 bp, Zea mays
  Clone ID: MRT4577_182401C.1
aatatattattatttttttttgggccgaaaaaaacggggaacaaattgcactgccattgcggccgagatctcacgtttcaaaaacagaccaaaaaatggcccagcccgctgttgggggagaacagtaataacatcaaggtattggacgcacaaaaacatgggcccaactaactcccgaaggaccaggacaggaaaaaagggaaacgcacccggtttttttcaaaaacaaaccccaccgccagaaaaaccccattaacctgaagcactaaaagaggccaaggggggctaatatattaatggggacccttaggcttaggggggggggg

SEQ ID NO: 90351 - DNA, 601 bp, Zea mays
  Clone ID: MRT4577_182402C.1
tgggtacctcgaggccggccgggccgggattctcattcgcaatttccctacgagctcgagctcacggctcaccgcagctcaaaagccagcacaggcaaacccccgtcatggcctcctccaagatactgcgcgccgccgtcgtcgtcgtggccgtcgccgtgtcctccttcgccggcgccgccctcgccgccgaggcccccgcgccgagcccggcctccggcgccgcggccgtctcctcgtcgctcttggccgccgccctctgcccggccgtcgcgctcctcctcggcaacctgcgccactgatgacgcctgcctgtctcctagaccgacgagagccgccgtgtgctgtcgcgtgatgttattgtcctctgtatgtgtgtgtgtgtgttcctgacctgtgcgtgccttgtaccgccaccccgcgcgtggattggaactctatcgatcgttcggagattcagcgcgtttgtttctgtagcagcattggttcagacttcagagtgaacgtcgcccagattttctgatgttttttttagaagcacgaacattaaacataattcgtctgaaaaaaaattttcaaaaaaaaaaaaaaaaaagcggcc

SEQ ID NO: 90352 - DNA, 326 bp, Zea mays
  Clone ID: MRT4577_182403C.1
gcgcaggctgaagaaccagtacagggcaatctctgctgcggccctggggcaagtgggcggccgggatcagagacccctgcaagggcgtccacttctggctcgccacatacaggacggttcattttggacgccgacggccggaggcacacggtcgcggtactcgtgagatgaaagccaacctaagtgctcgacacgatgctgcggcccaaagtgctcaaaatccaccttttgaatctactacatctgatatcaccatcgcatacaggctagctcctccaccttcaccacctaatttccgtgctgacgaggttgtcggtaacatggac

SEQ ID NO: 90353 - DNA, 411 bp, Zea mays
  Clone ID: MRT4577_182404C.1
ctcacgcgtgcgatccgctgggccagcagctttgaccgccgtctgcttttgcttctgctggggctactccccacccgaatcccccgcaggagcggcggcggcggccgccaggtcgtaccccacatgggggagcggcggcggcaccggcggaaggaaaggccacacgctcgggcgcgcgcccaacaacaacgactacaccaagctctacgagatcctgggggtgcccaaggacgagttccaggacgacctcaagaaggcctaccgcaaggatgatatcaagaaccaccccgacaagggcggggacccggagaaggtaaaggagcttgcacaagcctatgaggcatagagaggtccaaagaaacgtgagatttatgatcaggctcgtgaagaagcccttaacggaggaatggg

SEQ ID NO: 90354 - DNA, 519 bp, Zea mays
  Clone ID: MRT4577_182405C.1
acatctggaaagaagccagtgctagaaacgaccaaatcacatagaggtacatagagctggtggcgtttgtccaatttcgtttccaacatgagcaagcaaggcgacggtcccaagactgagtggccggagctggtcgggcgcacgatcaaggaggcgaaggagaagatcaaggcggaccggccggacctcaaagtcagaattgtcccggtaggaagtattgtgacagcagacttggatttgaaccgcgttcgcatttgggtcgacacggtggcagaggttcccaagattggctaatatagcttataattagcctatcactgaaataaaggcccatggaagtctccacttcgttcagttaattggccgaataaataagcatgggtacagtttgaaaaaaatgtatagatgtgctatgtaatgttgttttgtttttgtttttgtttttgttttgtttttgaggataactcgccgctttatttatctaatgaaagtttgggatctccttggagactacatccg

SEQ ID NO: 90355 - DNA, 290 bp, Zea mays
  Clone ID: MRT4577_182406C.1
atcgccccgaggaacgcttcccatgcgcctctctcgcggcctccgcctctccgcccccctgtatgaagaggtacccaagcgtcgaccgaccttcgcggtttttcatcagaagtgggccagctgcagcgccaagctcaagatcctctgcctcctccatgacaagccagcgtccccaacggaccccggaggaaggggaagttcagggccaccctctcccaggctggccaggacaacctctcgcctacccgcccgtgccggtggcaaaccaccgggaccccaggcccccggcg

SEQ ID NO: 90356 - DNA, 230 bp, Zea mays
  Clone ID: MRT4577_182407C.1
ccagcgttcttgactcttgcggctctttgctcacatctaacgcgcctttgggcatccattcgcatcggccgtgtcctctatcctttgagatggtcgacatgataccatatccttggttgatgcacctaccccttttcttggggaacctatggacctgattactgtcctgcatcttcttatgaataagtcatgtgctcatgatggccttgttaaaggtcttcgtgaggctg

SEQ ID NO: 90357 - DNA, 753 bp, Zea mays
  unsure (1)..(753): unsure at all n locations
  Clone ID: MRT4577_182408C.1
gacgcctgcaggttccggtccggaattcccgggtcgacccacgcgtccgcccacgcgtccggttagaagccgtctgcatgcctgcttgctggctgggagcgcacgaagctgtggaggaggacaactgaggagcgtggagcgttcccgaaccccaaagagaatcccaatgtgagacctgagtgtttgagaccaaaccatccctgggcagtctgatgagaggaagccgcctgcctagtcccctttctcgggctctacttggttgatcgcggaacccagaagagaactagtcaactcaagttttaagccatggcccaaagactgatgacattcagagacgtggccgtagacttctctccagaggagtgggagtgtctgagcctggaccagaggagtttatacagagatgtgatgctggagagctacagccacctcgtctcagtgggactttttgtttatcggccacatctgttctccttgttggaaaaaggacaagacccctggatgattttgagggatgagacaaggggaccttatccagacatagatttcagttctcagaacaagaagttcctgggaaaacctagcacatatgaagaattatctcaaagggaaatgaaggaatattttagaaaacgcagtcttgaaagatttctgtttttggagatggnctgngatggcanaaatcagtttcaaacgcatcanaatcaggaatattctaagcanctggcagtcgcctatgaaaaagtgctcact

SEQ ID NO: 90358 - DNA, 261 bp, Zea mays
  Clone ID: MRT4577_182409C.1
ggctcgagggcgcgtaggttgtggaccggtaccagaaccggggcaaggtggttttttactgagtgtgcaccatcacggacatgaagtacgtggtgcaccactgtaccgtgagcgcggagcccggccgtggcgcgtaccaagagtactacatccaccacgtggatggccacgccatccggtgcgaggacgagcagcatctcctcattcgatagctggctgccgccatctatcgacgcaccgccgtccgacttgatctggagg

SEQ ID NO: 90359 - DNA, 1676 bp, Zea mays
  Clone ID: MRT4577_18240C.1
gggacccctcgggccggccgggaggccgcagccgcccttcccgtccttctttctcgtgaacagagcagggcaggctcaccagccagcacgcgcggccacgccacacccgcggagacgcggcacgcctccactcctcggccctcccccgactccgaggcgagcacgccgcacgctccgcctcgcagtcgcggccccgtgctctcttccttcttctccgtccaccgtcttctccttcttcgctcggagggttcgatctggtaactctggtgagaagtgaagacttagcacagtctgtgctcgtcaagtgccctggcactctggcaggatgcggtggctcggtctttcggtggcactctggtagttgtgtccatgggggacaaggttaatccctggtgccactgccattggcataatcctgcatggaaatccgacactgaaagttgtgccggcgatctccacccacctgacgctgggcatcttaccgccgattcggtcgcgttggctccaattttggaattccctccaccgtacccctcacgcaagagacctctcgttttgtaccagaaggagaagcgtgctcctgtactcccagctcctttgccgagcaagggcccgccgccgttagatcccgtgccggagctccaaggtagcaacgagactgacgtgactgatgctggagcaggagaagaaaccgaggagggtatgcacgagaacagggacgagatcaacgcgctcctggacaccgacaggcagtctggtggcgcagccttgagcgtggagtcggtggccagcgctggcgctggcgctggcgctgcgccgccgccggcagccaagaagagaaggctcagctcctgcaccgacaagtccgtcgttgacacggccagttcagcagcaaggcctcctgagcgttccatggagcaggagcagagggttgaacttgcgaacgaccgcgacgcgcagtcgtgctgcgttggggaggtggaaagcgggcgcaggtttgctctgggggaggcggaagcggaagcggcagagggcgacagccccgacgagcagaggcggaggagggagaggatccaggagactgttgccgcgctcaggaacatggtccccgggggcatcgcgaaagacgccgcggctgttctggacgaagcgatctgctacttgcagtacctgaagctgaaagtgaagacgctgggagctgtctccctctagctaagcctatctagccctctctcctcgtcgtggtggctttgttgtcgaaggccgaagccactggcttctggtgagaggagagctagcctatatcacccatctgttcagttcagtcccagaggagctcggatcttctcctacccgactcactgtcggtggctgcatcacccatcttcctcatcgtgggttggtatgcaaaagctagaaacatctttccgctgagcgtgatccaaagcgaagcccccattccatgcaaagcgctgggtcgtgccgtgcgtggggtggctcctgctttatatacgcgttgtgctcctgctttggctgatgtttgctttggtagttatatatagttctgtgtactacaaagtaaagtaagtcttgtaaaacgtgcacatcctccaggcgggtttgtttctctgctgcccgtctcctaaaaaaaaaaaaaaaaaactcgggggggggcc

SEQ ID NO: 90360 - DNA, 523 bp, Zea mays
  Clone ID: MRT4577_182410C.1
acttgcactacatttgaattatttgatccaggaaaaaaaagagagaatccaggaccctgcgtatcaaaatgtatatactcgactagagcagtcagaggagcagaggagagaatcttttgttgatagccgaaccctcctttacaggtcaggttaagatgcatgccaccttcctaaactcgactccacgcccgcgttgccgcttctgaaaaggagaaagccaccctgccagaattccaattacaagcaggagcaaacaaaggagcacgccatggcgcactggtggccggtgcgcgcagcacgcagcgctcacatgcccgtcaccgcgaggcgcgagccagcgaaccagcagggcaggcggcgatccaaccaaaccgcctttctccatgcgcgcagagcaggcaacacggactcccatcgcgatcctctttcagaagctgtttcagactgttggtttctgaatctctgagcagcaacgcccactagctgtttcagaagctgttgttagttgcggtttaggacctgc

SEQ ID NO: 90361 - DNA, 590 bp, Zea mays
  Clone ID: MRT4577_182411C.1
agcagtggtaacaacgcagagtactttttttttttttttttttttttttttttttttttttttttttttttttttttttttttttttttttttttttttttttttttggggcccacgggcccaaattacccttaaaaagggggaaaagaaaaaaaaaccccttttcacggggaaaacggcggccccccaaaaaaaacaagggccccccaaaaaaaacaagggccccaaaaggggatatggccaaaaagggcaaaggcccggggcaaaaaacatgggggccaggtttcgaccccatttcgaaaaaccccctaggccctaaaaaaaccaaaagggcccattggtcgggggctaaagggggcccagcttcaaggggctaaacattcactggggggggaaaaaaaaccccaaccccaaaaaccaagggggccccccggacaaaaaaatcatggcaaccgaatttcgttttgggaggccgaacatgcccaagcagggggggcaaacccccaggggggggaacaaaaaccccttcaggagggcccaaaaagaaaaagaacgcccaacccccaaggaagaaaaagaaaaagtttccc

SEQ ID NO: 90362 - DNA, 624 bp, Zea mays
  unsure (1)..(624): unsure at all n locations
  Clone ID: MRT4577_182412C.1
tcagccaaggcgcagtctaagncggcgncggtgtcaccaagctccccgccgaggtgcagcacgtggaacatgggcgagacagctgagctcgccaaggccctgtggcgcgagatgcgcgcgtggttcctgaccttcgtggacgaggcactggacgtggggttccacctgttcgaagatcaacagaacgtcgctggcaaggggaggcagcacggcggcggacacataacgatggtcctctcgcagttcaagaagatcagcgactggctggaccaggtagggaagatcgcggcggcggaggaggaggagcagaggaccaaggaaaagatcgagctcttgaagcgcaagatctacgggtttgtcattagccacatggggtctgcgttggagagcccagcatccgtctcggtttcttcgaggagctgagggctgttagtggatgcttcatgctctgaagctcgctctctctctctgctcgcagtttctgttcgtactggttcttcaactcgtttaagattgaaaaggccacacagtcatgtagcctgttgttggcgcggttcttttgtgttttctttttgggatgcctaatttatgttgtgaataaattaccgtactgtcattttggat

SEQ ID NO: 90363 - DNA, 524 bp, Zea mays
  Clone ID: MRT4577_182413C.1
aacacctcactcgtagctcaagatcagcggcagtagctctgggcagcgtgcgcacgtggggtacctaactcgctctgctatgctaccatggctgatcaccaccggggcgcgacgggaggtggtggtggctacggagacctccagcgcgggggcggcatgcacggtgaggggcaacagcagcagaagcaggacgccatgatgacggcgctcaaggccgcgacggccgcgaccttcggcgggtccatagctggtgctagcccggactgatcctggacggcaccgcgatggctctcacggaggacacccccgaggtgatgatcttcttccggtgctgtttttcatgactgatctcgggactggaaacaacaacaagatcaactgggccctgaaggacaagcaagagttcatcgacattgtggagaccgtatacaggggcgcccggaaaggccgtggtctggtgattgctccaaaggactactccaccaagtaccgttactaagaaggcaggcattccccttatgcaa

SEQ ID NO: 90364 - DNA, 574 bp, Zea mays
  Clone ID: MRT4577_182414C.1
aacacgtcttcaatccgctgccccctgccctggtaaaaaaaggggaagaaggagacgctgatgctaaccgccgcactactctactggtgcgtctgctgcgcatgcgcggagcaacagatgctacccggcgtacaaacacgcaagcagttccagatcgacgaggcatggcactactggcgggtcacagcgactctgaaccgatcactcaccacgactccgaaccggaccaacggcacgcccggccatggcccgtggccgtgctctcagaagaagccgcggcggcgcggcgggggcagcaagagggcgacgagcatcaaggcggcgacggcgacgagggccaacgccacgaggatgctctcgtcgacggtgagcaagcacaccttccccatggacggactcccaacctggggaatggcggtgcagaagggccctccgctgccagcgggcaagctccagaacgatggctggatgggcggccctggccctggtataagtggtggagaatctccggctctctgggtcaactggtcctccaaagcacctctcctttggttcccttggagcggtgcgatga

SEQ ID NO: 90365 - DNA, 314 bp, Zea mays
  Clone ID: MRT4577_182415C.1
tcgagccacgcgtccgggaatggcagaacacggaatgggcagaacagggaatggccgactactattgcagccttaataagtagtagagattatggcattcttaatacttctcttaccctttcatagtgccatgtagcagttgataatcagatgtgtgttcaccgtgaacttacttttccagaaatagcgatgcatattgaactatctattttctgatggagcttggttgacctgctgacttcatgattctgtgggtgatgggaattctaagaaaaatcattcaccagacgttaagaaaaggagaaagcgtatga

SEQ ID NO: 90366 - DNA, 919 bp, Zea mays
  Clone ID: MRT4577_182416C.1
cattgggtacctcgaggccggccgggaataggctattgttcgcgtctgtttgtggtcccaaagcagctatggcctctggccgcttgcccccaaaaaacgctgtagctagcccccaccccaccgcgctctcccgcgccggtctggccgcgcgcgtctttgctgctcttgtcaaacacgtcttcaatccgctgccccctgccctggtaaaaaaagaggaagaaggagacgctgatgctaaccgccgcactactctactggtgcgtctgctgcgcatgcgcgggtaaatacgatcggtatcgaggggggatactttggtcgctctctgcacatatacatataccatgaacttgtacaagacgatcccacacccacatacatgaactgtcatatgcatgatggtttacagagcaacagatgctacccggcgtacaaacacgcaagcagttccagatcgacgaggcatggcactactggcgggtcacagcgactctgaaccgatcactcaccacgactccgaaccggaccaacggcacgcccggccatggcccgtggccgtgctctcagaagaagccgcggcggcgcggcgggggcagcaagagggcgacgagcatcaaggcggcgacggcgacgagggccaacgccacgaggatgctctcgtcgacggtgagcaggcacaccttccccatggacggactcgcagcctggggaatggcggtgcagaggggccttcagctgcaagcgggcaagctcacccacgcgtccgcccacgcgtccgcccacgcgtccgtggactcgtgggtatctccgtctctctgggtcactgctctcgaaagcacttctttttttttctttgaagcgttgcgatgacatgcaccaaacaagcgtcagtcagcaaaaaaaaaaaaaaaaaaggccccta

SEQ ID NO: 90367 - DNA, 334 bp, Zea mays
  Clone ID: MRT4577_182417C.1
caccgcatcaccgttctcaggactttggctccttctcaagctccttgccagagcgcctgtcgatcttggtaatgagctcagcaaacttgacagcgatgtgggaggtgtggcagtccaactccaaggatgaccctgccaaggaggctgccagcttcacctcccaggtcatcatcatgaaccacgctgggctgattggcaacgaggtgtccccctctgcttcgactgccacacgtcccccttgttcttgtggtcgccggcgctcgtttccaggttgaccggcgctctggcctggagcttgcaaaggagcccccttgcctggaggcgggtggccagc

SEQ ID NO: 90368 - DNA, 244 bp, Zea mays
  Clone ID: MRT4577_182418C.1
ccgcttccgctcccagctcgtgttccgcttcttgcagccgtcgccgggaagcgctccagagaacttccgtcaacatggggaagacacgtggtatgggagccgggcgcaagctcaagacccaccgtaggaaccagcggtgggctgacaaggtatacaagaagagccatttgggcaatgagtgggaacaaacccttcgctgggtcagtccatgccaagggcattgtccatgagaagattggtattg

SEQ ID NO: 90369 - DNA, 222 bp, Zea mays
  Clone ID: MRT4577_182419C.1
actcctccgatccactctttcccccaatccctatctccctactttcaacgcaacggcgtttcccccggtcttttcttccacaattccgttggacccctaccgttcctaaatcagtcctggcccctcccagaaccggccaacaatccctaaccttattcccggtagctaccatgctgccctcttggatccctttttaaattggctgaaatttaaccgcccccc

SEQ ID NO: 90370 - DNA, 251 bp, Zea mays
  Clone ID: MRT4577_18241C.1
cacccacagaacggaaacaggggggagggggatttttagatatgcaaacccacacacagaaacaatgggggcatagggccacgataaaggacaccggcccgacacaatgaaaagaagggcaaacagaaggagtgcaataacacacagaagaatggtgaggtcacgcacctcaacgaagatggaaacccagcggccatagcaaccgctagaggcggtaaaaaaaaaaaaccggaagtgcgacaaacggcaag

SEQ ID NO: 90371 - DNA, 389 bp, Zea mays
  unsure (1)..(389): unsure at all n locations
  Clone ID: MRT4577_182420C.1
ttgattttggcggccaacgctacccagcgttgggcttcgaaaccccgaacgggaaggtgacatgctacgacagcggcaggacggctgacgacatctgctacttcatcaagatgagcaaggagaccgccggctccgacaccaccaccaccacccaggagccaccggcatgccagaaggcagacgccgccgagcccgtcaaggactagctgctagcatccaaggtgtggacggctgaggctgcttaagcatgggatgaaaaccgtggcgctaacgcgcctccaacggctagtttttgcgggaccagagggagatgagagagagggaccngagttagagagagagggctatctgtcgacggtgatctgctctgccacggcatgtgtgtgtat

SEQ ID NO: 90372 - DNA, 654 bp, Zea mays
  unsure (1)..(654): unsure at all n locations
  Clone ID: MRT4577_182421C.1
tcgtttggtcgcagacgttatggtagaagtgtttgacaaaagagcccggccaactgaatttcctaagcctgagggctgatactgagtttggaccggcgataactgggcattttcaaaaatgtttggaacaaaactcttgggtgaattgtgaaatcaaaattttgagtgtacaatttcagaaaagaaaaaattcgcccccagcgaaaaccagggaatttccgaaatgtcgggaattctagttcaaaagcaaatagggttttaaaaagcggtataattcatattaaaatgccaatttcggaaatatatatatttcggacccaccaaaactcaagaaaatttcggagatttctgcccgaaattgggaaccctgctctcgaaagcttggccttcaaaactcgaatttttaccaataggttccacaaatgaaacgtctactcaaatttttggagaagacaaaagtttgaacattccatcatgtatatttaatatctaaggttacattcatggtcagagtttcacaagtattcataaatgcagggagaactcttctcaagtgcttgtncgtttgaacagctcggtgctaaaaaaaatggcnttaaatattttagtatcgtgaacccatgcttttcaaaacangtgacaggatgatgatga

SEQ ID NO: 90373 - DNA, 213 bp, Zea mays
  unsure (1)..(213): unsure at all n locations
  Clone ID: MRT4577_182422C.1
cggacgggggaccaggancagaagcggaaaagagatgctgcgcagagcgctgaccctccgaggggggaggcgaagacagggagggatatgaagaatgggccctccaccaggcaggagagagcaccgaggggaaccaaacgacggtctgagacgagagaggcatggcggccacgggcattcgggcagcacaaggagcggggaaatgcgggggaa

SEQ ID NO: 90374 - DNA, 522 bp, Zea mays
  Clone ID: MRT4577_182423C.1
gaaacatataagctgggttggataagtaccattacgggccgatctgataacacaggtgctacagagagatagatagcatacatagaagccagtaggtaggagtacctaactacagtgagagacgtgagcaccggagagaatcctgcaagcggtggacgggcagcctaggccgaggtgaacttggtgacggacttggcgccctcggatacggctgtgcttggcgagctccccgggaaggacgaggcgcacggaggtctggatctcacgggaggtgatggcaggcttcttgctatagcgcgcgagcttgtgggactcactaacgagcttctctaagatatcgctaaggaatgagttcatgatggacatgggcttggaggaggtgccaatgcccgggtgcacctgcttcagcagcttgaagatgtaaaacttggatgcctccacgctcttcttgcccttcttcttgcgcctgttgccctcgtcggcttccttggtagcggactagccagtggggacccggttctc

SEQ ID NO: 90375 - DNA, 348 bp, Zea mays
  Clone ID: MRT4577_182424C.1
cagatatacaagaagcgagttctcttggtgagcaatgggagttcattgccagtggacatgatgatggtagatggatcatatgggagaagattacatgaaggcttattagaatactttcaggggatggagctgttgtggagtggatacagtctcatcccttcgactgatccgttgcaacaatgaaatcgataagacgatatagctatggacatccgatgctaatgctacatctatggattctggacctgaactatgatgtattcagtggcatatagaataatcagcagaagatatgtcggaaccgtcacagtgtactgcacgctgaatctttagaacgatttcagatgc

SEQ ID NO: 90376 - DNA, 312 bp, Zea mays
  Clone ID: MRT4577_182425C.1
ctcggccggagcagcagcagtcacagtcattcacactaacgaacgaactcttgctccgatacgagctagctgaggtcgacgatggcggctgtgctgaacagcaggaagacgccgcaggcggtggtggccgtgctggtggcggcggcgctgctggcttcatccgcttcggcggcgatcacctgcgggcaggtggggtcgtcgctggcgccgcgcatccagtacgcgacggagagggcccccgcgctccccgagtcgcgcctcagcgtgcgtaagatcctaaatagtgcggcgcgacaccagatcgccccgtca

SEQ ID NO: 90377 - DNA, 636 bp, Zea mays
  Clone ID: MRT4577_182426C.1
ggccggccgggaaaaaataaaaaaaaaaaaatccctatctctctctctcacatacactcaacaactaaacaagctttttccctctaatcaatcctctactacctacctacctcgcatcaaacccttagtcttctttccagaaagaacacatcaatttcatcatggacttcgtcaacaaactcgccggcggccagagccagggacagggccagtccgtaaacgagcaggtcgtcaaggaccagaacgcaggacagcaatcatcaggctcaggcggcttcctcggcggcattggcaacaagctcaacgaggctgctggcggcggcaaggctagcgagaagaacgaggattaccttgacaagggtgtcgactttgtccaggaaaagttcctcggtcagggtcctcaggacaacgagtctgcgctcgagcaagcaaaggacgagcagattagcgactttatccgcggacagtacaagggtgctaccggcaaggacatgcccttcaaggacaaataagctcgtcgtaatgaagaaaaggttgcgggcgctgggtgctacgaccttggggaatgatgatactgttatgatagtcatgaaatgaaataatgatgatctgtaaaaaaaaaaaaaaaaagcggcc

SEQ ID NO: 90378 - DNA, 796 bp, Zea mays
  unsure (1)..(796): unsure at all n locations
  Clone ID: MRT4577_182427C.1
gtgacagcacttgtgacagaagaaggggggcgccgtcgtcttgctcgcggtggtgccggtgctgggcggttgcatccacccgtcagccaagccaagccatggcgccggaccacggctccaaggtcgacatctccttcgccggccgcttcaccgccagcgccatcgccgcctgcttcgccgagatcaccacgatccccctcgacacggccaaggtcaggctgcagctgcagaagaaggccgtcgccggggatctcgctgggcccaagtaccgtggcctgctcggcaccgccgccaccatcgccaaggaggaaggcgccgccgcgctctggaagggcatcgtccctggcctccaccgccagtgcatctacggcggtctccgcattggtctctatgagccagtcaaatccttctatgttggtgagaaccatgttggggatgtacctttgtccaagaagatagccgctggcttcaccactggtgcccttgcaatcgctgtggccaaccccactgaccttgtcaaagtcaggcttcagtctgaggggaagctggcacctggtgtgccgcgccgttatactggggcaatggatgcttatgccaagattgttagngcaggaaggggttgctgctctgtggactggcatntggtccgaatgttgcacgtaacgccatcataaacgctgctgagttggccagttatgatcaagtgaagcagtccattttgaaacttcctgggttcaaaagatgacgtggtcactcatatctttgtctggtttgggcgctggcttctttgctggct

SEQ ID NO: 90379 - DNA, 170 bp, Zea mays
  Clone ID: MRT4577_182428C.1
tcgctgtattcccattccaagtccccgctcttctattcccaacgacgagcggggagcttcttggtccctgctcggagctcgttgcaacaggtgccgccatgtctgccgcgaaccagctcggcgctcaggtcagcaacatttacgccacgggtttgcttgacgatcagttt

SEQ ID NO: 90380 - DNA, 385 bp, Zea mays
  Clone ID: MRT4577_182429C.1
ctccactcccacgcgaaccctagcagtggttctcccttggggccccggtaaacagctgggttccaggctgtataagcatctccgatcccatccgcggcgggttgaagccatcagctccggtttctgcagccggatttgggatccgcgagatgtcttggtccgcgcccgacgacatcctcctatacacctccctcgccggcttcttggacacaaatgttgttcttcagggtgcttgtgaacgagtgattgtgggggaacaatattgtgatgttcctcttgggctgtacgtaatccggggagagaacgttgttttaatcggagaattggatcgcgaaaaggatgaactccctgctcacatgacctgtgtttcagaagcagaaataag

SEQ ID NO: 90381 - DNA, 378 bp, Zea mays
  Clone ID: MRT4577_18242C.1
acgatgggacgtgtgtcgacagatgggtaacatgacttgtgcctaaagagacgcatcctctggcgagtggaaaactggcatgctatacgcgctcaccgacacgaacgtctcggagccagacatgatgaactatggcactaaaatcaaatttgacatcttcatccaccctgggagtaccctactattacttatttttattatgactaaggcgtcggattcacctatacttagcaattgcttataaaaggccgtccaacttatcaaagcgagggcctaccttagcctgtattgcatgcatgcggcctacactgcatgaacttccagccttgctgagatcatgccacaatattatctacaacttggtttgcgatgaacgga

SEQ ID NO: 90382 - DNA, 620 bp, Zea mays
  Clone ID: MRT4577_182431C.1
ttgggaccctcgaggccggccggggacggcgtgagcacacattagcaaaggctgtaccttggggccgctaaagcagcttggtccaagctgtctgtagaacttaagcaactctgatcccagccacggcacacggcaggttgaagccatcagctccggtttctggcgccggatttgggatccgcgcgatgtcttggtccgcgcccgacgacatcctcctctccacctcactcgcgggcttcctggacaagaaacttattgtcctgctaagagatggacggaaacttcttggcaccctctgctcatttgatcagtttgcaaatgttgttcttcagggtgcttgtgaacgagtgattgtagggggacaatattgtgatgttcctcttggtctgtatgtgatccggggagagaacgttgttttaatcggagaattggatcacgaaaaggatgaactccccgctcacatgacatgtgttttagaagcagaaattagaaaggctgagaaggcggagcgggaagcaagggatctgaaaggcacgatgaggaaacggatggagttcctagacttcgactgataataaacccgttcctgtggtggttgctgctcccctcccattgcggcc

SEQ ID NO: 90383 - DNA, 1335 bp, Zea mays
  Clone ID: MRT4577_182432C.1
ggagaaaccgtcagtctccggcgctgcccctcccgccgtggccggcgacgggtggaggcagtatgtggagcgagagacagtgggcagccggagccggcgtgtccctctgaaggcctcacgacctgccggcttgtgatggccacgagcgcgtgcgcgtgagcgtcagcgtccgacctccagtggtccgtgtttccccgagcaagagcgaacagcagtttggcggcggctgatggcaccaagcgcagccgccggaccgccgtccctggcccggccatcgacatcgagtagcagccacctgcggcgcgccggcagcgccctccagcccgtctccgtcccgcgcgccttggtgcaggggcggaggcgcctcacgggcgccgtccgagccgcgccggacgcgccgccggtggtcagagcggccgtcagcgccgtcaccgagctcctcagagccctctccccgaacaaggcgctcaggggcgctgctacccagcagcagcagcagggcgaggagccggatccggacccgacctgcggcagcgtcgaggacgtgctcgccgtgctccgagacgattaccggcgcgcctacttcctcaccggggatttcactccgggaatatacaccgaagactgcgtgttcgaggacccgacgatcaagttccgcggactctccaggtactcccagaacctgggtctgctggtgcccttcttcgacagcccttcgctcgagctagagaacattgagaagggttcgagggccgaaacgaagttcgtcaaggcgacatggaaactaaggttcatcttcaagctccaaaaggcacacgacgtatctgaggcttccatggaggccgctggtcgcgatcggagggagcacgacgtatgatctggatggagatttcaaggttactcggcactccgagagctgggacgtctctgcgcttcaggccatcgctcagatcttcgtctcggccccggaggagaagctggaaggcagctgaggctgaggcagagcatgcaatgtacagcgccacgcagacgcaggatcagtgatctgaatccgtgatgagcaggtgtccaaagccgtctgtcagagctccgctggtcttctctgtgcaaacaaactgtaccctctctgttccaggttataaacattcgaataattttgctacttacctagatatatgttacgtatagatatatagtaaagggcggttattatggcacaaattcgtagggtgtaggtacaggttttgaatttgacatttgatgaacactgtataaaaaccgacttttctatattccaaacgaacatcctaatcagatagacccatccttctcgcc

SEQ ID NO: 90384 - DNA, 1038 bp, Zea mays
  Clone ID: MRT4577_182433C.1
cccccgcgtccgcccgggcgtccggttgaaataagaaaaacgcaagcctaaaaggattaggatctcctcgggtgcccgcgtatcaagtacccaaaccctttcgatctgctcaactaccaaactctgctcctccctgcttccgtcacgcgagagcactccactcccacgcgaaccctagcagtggttctccctcggggccccgctaagcagcttggttccaagctgtagaagcatctccgatcccatccgcggcgggttgaggccatcagctccggtttctgcagccggatttgggatccgcgagatgtcttggtccgcgcccgacgacatcctcctctccacctccctcgccggcttcttggacaagaaacttattgtcctgctaagagatggacggaaactgcttggcaccctctgctcatttgatcagtttgcaaatgttgttcttcagggtgcttgtgaacgagtgattgtgggggaacaatattgtgatgttcctcttgggctgtacgtaatccggggagagaacgttgttttaatcggagaattggatcgcgaaaaggatgaactccctgctcacatgacctgtgtttcagaagcagaaataagaaaggctgaaaaggcagaacgggaagccagagatctgaaagggacgatgaggaaacggatggagttcctggacttcgattaacaccgtcaccgcggccgttgccgctccccattgtggcggaatctttagtggcggcctgtgtgccatacatgcctggtgaccgcgccggcgcaccttggattgctggagggtttagcgaacagtttctttttaactagcagtgctgttttatactctcgtggccacagaccctttgagcgcctcctgatacagctttgtcaccactctgatcattgcctcgatgaatttatatacctgacgttttggattggatctgcgccaaaacgccatttctatgcagaaaatatgtaaacttatagctgagacagatttttttcctttaaacgatttgggattggatctgggcc

SEQ ID NO: 90385 - DNA, 313 bp, Zea mays
  Clone ID: MRT4577_182434C.1
cggactccccgtcacgccgccgggcaagaagctctccgcgccggcggagactgcgaaggccaaccactcccagccgccgaataactcggtggaagagcgacggattcagattgctcgttttaatgccctgaagcagcggcagctcctcaagcaccggcgggatcgcgagctcgccgtcgccacggcggcggcgtggggcactagtgttgctgggtctcatcgtgccgctgccgccgccgccggcgggtacggtgcgccggcgccggcgcccgcgccacgtgtcctgagctcgtacgcgtggcccccgctacag

SEQ ID NO: 90386 - DNA, 433 bp, Zea mays
  Clone ID: MRT4577_182435C.1
aaaaaaaaaaaaaaaaaaaaaaaaaaaaaaaaaaaaaaaaaaaaaaaaaaaaaaaaaaaaaaaaaaaaaaaaaaaaaaaaaaaaaaaaaaaaaaaaaaaaaaagggtgggcctttggccggaacccccctaggggggaattttgcaaatttccttcacactgggggccttttgaccttccttttagggggcccatttccccttttagggggtcgaattacaattccttggcccccttttaacaaccccggatttggaaaacccctggcgttccccaatttaagcccctggggccccacccccttttcccccgctgggttatttcccaaggggccccccccgatcccccttccaaacagtgcccccgccctgggtggcaaagggcccccccctgtggcggccctttaagcgcggggggggggggggtcaccccc

SEQ ID NO: 90387 - DNA, 260 bp, Zea mays
  unsure (1)..(260): unsure at all n locations
  Clone ID: MRT4577_182436C.1
tttttcctccctctctnntagagaagctncattgtttataaatattttgnttacaaccccaaaagattatacaacacatcctaaacaaatacttttatagtaccaatccataagaagatataaaccgttacacccaacatacaaccaaacttacgactacacattcatccacataaaattttgcttcgccacacaacatttaacatttttaaacaccgacacaccattcaagcaaaacaaacttattaaaataatattat

SEQ ID NO: 90388 - DNA, 637 bp, Zea mays
  Clone ID: MRT4577_182437C.1
aaccacgtgccgatcgccccatacaaagtttccttattaatccaccttttctaacctgcccaacgtagccttaaaactcgtttaatccccaacaggcacttcggaacggcatccagtgaatacctctggccgagtcctaaggcctttgttaatggttagtgtaagttttatcaccgaactttcgaacactatttcttagtatatggcatggccatctgccctttttaaagactatatacccaaaggggcacattcctgatccttattcaggtcatgctcattctactatgggatgtgctataaatgtggagtggccttgcacattatcagtgcgacttttacacttttcgctccattgaagaacccatggcattttagtttaatgccataattccactccccagggaatacctactgcatttcaatggcatccataaccggttgcatgtgttactgagcctataactcattgcctccattcttcggagagcatccgtttgacatatttgtgctttgaccatgtcctcaacattggcatcaccatgaagagcaaggttagtacccataactttgttgacaagtttcagaatgactcttaacccttacatctacttccttgctagcacctacagtggtc

SEQ ID NO: 90389 - DNA, 235 bp, Zea mays
  Clone ID: MRT4577_182438C.1
ggggggtataaaagaacaattggggattgaaccacaacttgggcaacacaactagggaattcatacaaacgtgaagggaaaaggaatgattatgattttcatggatatctagacattacagaaaatgaactcagccttactattcaagcgaaaccccacaattaacccgaaaaaacagtagccaagggaagcgtatccccaaaatggggctaaggaaaacctaaccctgaaagag

SEQ ID NO: 90390 - DNA, 269 bp, Zea mays
  Clone ID: MRT4577_182439C.1
acctcccccctccatgggggggagggaaaggtcctcaatgatatgcaaaatcccaatgcagccacatgtgaacacaaagaggaaatggattctcggttggtcttcggtggaaatgtttactatacatgcactccagatgaagtgcaacagtattttaatttttttggaactgttaacaaattgacaatcctgactgacaattttgggcaaccaaaagtggccgcttatgctgaatttgcctgaacttcaaactgtttacgaacctatta

SEQ ID NO: 90391 - DNA, 626 bp, Zea mays
  Clone ID: MRT4577_18243C.1
ttgggtacctcgaggccggccgggacttatttcgaaccaaaacatagatatggtcagctacaaccccacccaagaacaagagaccaacgaggttcccgctcaggagacacaggaggagaatgtcgagcgcaatgaggaagatcctcaagacgaccaggccggagcccccttccaatcacccgtaaattccgcatgggtatcatatgctgcggaccaggccaagaagggactacatgttgccgatgagcagtcggccaaaggtctagagacagctaaaaatgcgaccgcacaaggactgaccgtagcacgttctttcacggccggtctgttagattggggtctctcataccttgccactcgatctcagaatgccgatgatgattcgacgagagtcacagtgaatggctacgtcaacaagggtttcgatgtcgtcgagagggtcgcccttgggggcattgatgtcggcgcgatggtcaccaaagcgggattgaacgtcgcagaattctccgttgagaagatggacgaggttctcggacagcccagacctcagactgaggcacaataactcgtcgtcaccacttgtaaataaacatgagacatcgaaaaaaaaaaaaaaaaaagcggcc

SEQ ID NO: 90392 - DNA, 704 bp, Zea mays
  unsure (1)..(704): unsure at all n locations
  Clone ID: MRT4577_182440C.1
agtaataactctttttttctctactcatacaacaaacaaagggtgcatatcagtttgtgacatattgatacatagagaggtaatttataagaagtgtttgttgtgttcatgctacattaagaggaaatcacaaaccgagccaaggacactgcttccttgcttgcttaggtactaacttagctaccatctccaatggtacacctttcagctcgtgaggcttgaagttgaaaagcggtggaaggaaacgtccattaggtagacgtgcgtttgggtctcttaactcatcaaagaatgggtggactaatgtgtcgagagcggcacttcgtagattaggagagtattgaagaagtcttgagaccaaatcaacagcttctggaggcatgcgtttgtggaaaatcttgtgccatggatgagctttaatctgagggaatttgaattccgtgtagtttgggttcatgcacttgatttcttctctagtaggcgttcccaagaccttgataatctcttacaagttgatncaacaccgctctcaccagggaacaaggngctgtccaagcaatagttcagctagaacacatcctgcagaccagacatcaatggcttgtcgtatacttcggttgctccaaaaataagttcaggtgcttctgtaatacctcgagcagatgtaggaaaatgtttggtttctccttttaccaatacttttg

SEQ ID NO: 90393 - DNA, 554 bp, Zea mays
  Clone ID: MRT4577_182441C.1
gacttggtccaattttaatattataaaagttaatatttaggagtccagcttcaaactagacaggaaacaactttgtacggatggacaaacttaaacaaaaagcatgttgcacgactacaggtagggataaatgccatagcacaaatactgatcgccgcataagatagcactacttcgtatgggacacaaactttactcggtattctggtagaacgtatatgtgccgcccgagggggtgagttgggagaacctttcaaagagactggccttactctgttcgaacgttagggtaaaggggttggacctgaagggctgctttggtggctggtagggtgacttgacgacagaacgatcaccaactttggcaggcttggaccggactggacagagcttccagtgtatcagactaaattgcctcacttaatgtactcactgaagtgagagtgggacttctctggcttctctaagagaggattctcatgtagtgagcaacatggccaccatagatgtacttgcgacggatatcagcattcagctgcttgtcatccttcttg

SEQ ID NO: 90394 - DNA, 343 bp, Zea mays
  unsure (1)..(343): unsure at all n locations
  Clone ID: MRT4577_182442C.1
gcattgccgttganccatggacncaggctcgcgtactgctgctaaaagtgcgcctccatgagataatcaagcagtaacttagccaggctatgaaaccatcctgtgagatatgtcctacataataaccctgcatttcccattaagctacatatcttgccacagcagctttgctcagtgatacccacatgggaaaaatcccaggagatgatgcttaatctttttgcccacactgctttgcatacttatctactgaccgaagctcttctttccccactcaatacttcatgccctgtgatcaagtaagatatctacagcttgtagtcagacacaatcagtatcacag

SEQ ID NO: 90395 - DNA, 1096 bp, Zea mays
  unsure (1)..(1096): unsure at all n locations
  Clone ID: MRT4577_182443C.1
ggatccagatgtctgataagttgatggatgtttggttggatttctgcagttggagctaaggtgtggattgctagttagacattctgagttctagacatttccatctatggagtcttccttccagtgataaattattctatgcactaactttatttttaagctgtctttaacctatatgccatcatacgatggtgcaggttcactattattcttgatttaagatttttaaaacaattggttcctagtaggatgttttacctgagcgtatgaccgtatgttcatattttatagtccaaaattctcgatttctctgttagggcccatactaatgttagtctagttcttggattgcttctgactgcacagtcccccttatatatcaaattcatcatattgcacagttcctttcagtaatatattaggcattagatattattatcagcaaatgctacttgctaaccgtattcctttttgagttgtaatatgtgaaatctgagagatcgatcttgtggcaccgttagttttgttggttatcattagattgattgcctggaacaaatggaacacctcctcagtctggtttgtgacgttggcccccttgcctttttagaacattgttcatttgttctgtaatttcctcactctggactttccatctgacgcatcttatcctttgtggaacaataaccaagaaagattctgctgcttctgttcccgccaaaagtaagtctgtctgaacaaacttgtttggctgaactattgttgcccttgattacacaagcctatccgtgtgtttggttggttgtaccgggggagaaactgcatccacaaatcctcaaagcacattttgtttgtttcacttctctgcatgaccaggctgagcgggtgcaagaaacaacagcgagccagacccgctagaaacggacgctcggcgcgtacgcgcgcgtgcaggcccggcagcgagccaggcccgctagaaacggacgctcggcgcgtacgcgcgcgtgcaggccccgtgcagccacgcccgtacggaccaggctggcaccgtccatgaaccanacatgcgggatgtgactgtcttggggatgcaact

SEQ ID NO: 90396 - DNA, 1053 bp, Zea mays
  unsure (1)..(1053): unsure at all n locations
  Clone ID: MRT4577_182444C.1
tgctccattgccacaacaaccagctccaatanaattattgttcaagatcctagtgcaccatataacaagatgaatatatgaatatactaatctggagataatacagagttacataaatagaagcaaccgatcctagcttgcattcaagttgaacaaacaccaacctgtattgcatatcaacatgaatatgaactgcactacatgaatatgaaccaggatggctaaacttcaacccatccatgtatatgcaactactgctagtccacaaaggatttacttttgtgtaaatccagtttcatctcaaggactccagtttcatctcaaggactccacagttgcatccccaagacagtcacataggcttgtgtattcaagggcaacaatagttcagccaaacaagtttgtgacagatatacttttggcaggaacagaagaagcagaatctttcttggttattgttccacaaaaggacagttccatctcaaagactccacagttgcatccccaagacagtcacataggcttgtgtaatcaagggcaacaatagttcagccaaacaagtttgttcagacagatttacttttggcaggaacagaagaagcagaatctttcttggttattgttccacaaaggataagatgcgtcagatggaaagtccagagtgaggaaattacagaacaaatgaacaatgttctaaaaaggcaaggggggcaacgtcacaaaccagactgaggaggtgttccatttgttccaggcaatcaatctaatgataaccaacaaaattaacggtgccacaagatcgatctctcaagatttcacatattacaactcaaaaaggaatacggttagcaagttgcatttgctgataataatacctaatgcctaatatattactgaaaggaactgtgcaatatgatgaatttgataaagaatggccatattgagtaagggggttataccaaagtgcaatcagaagcaatccaagaactagactaacattagtatgggccctaacagagaaatcgagaattttggacaatataaaatatgaac

SEQ ID NO: 90397 - DNA, 221 bp, Zea mays
  Clone ID: MRT4577_182445C.1
attcccggtcgacgcatcttcctatttatgactgatgcaacctcttctgtaatgagaagaatacttggctgttgtagattgattcatgtaggctgtgcatgctcgttagcctaaatcagctgtgcagtttgaatacttccaaattaaatggtcctctgagactcttcagaggtatcggatcctatttttcatgttcactgatgacttacaggttacatctt

SEQ ID NO: 90398 - DNA, 174 bp, Zea mays
  Clone ID: MRT4577_182446C.1
gagcatattcttgtcaatggtcgattatttataaccgtgctcgcatgtcaccctgggaacggatgtgtcccagttggaaaaagaactctattttcttaccgattgttaatgaactttgtattattaaccgtccagttccactttaaaccatttggaatccaacctctttttttt

SEQ ID NO: 90399 - DNA, 248 bp, Zea mays
  unsure (1)..(248): unsure at all n locations
  Clone ID: MRT4577_182447C.1
gaatgtgattgattatgnnatgtgttttngttgangtatagtgtatatagagnaaaaatntnnaggggnngaaatgagagtgttatttttatgaaagntagntttttaggggggggggttnttggagnaaggaattgnngnngntttgatagaattggattgnnagtggtngagttgatttgtggngagnatttntggagggggnggtttagttaggggggtagaggnatttnattaggggttnntgg

SEQ ID NO: 90400 - DNA, 207 bp, Zea mays
  Clone ID: MRT4577_182448C.1
gagctcatatgtcggcggccgcccttctttctttcgcgtgctttcataaaatcatagggggcgtatataacccctttaaattcaatttactaggtgtcgctctacaaccttacttctctgaaattcttgaccttaccctatttaaacacccttgcgtacctcttcttttcatcttctgacgtaataccgatttggcctactccgatc

SEQ ID NO: 90401 - DNA, 151 bp, Zea mays
  Clone ID: MRT4577_182449C.1
ggaaaccgattcgaaggcgggcgctcccgctgcgtctcgcaccaacagcaggtccgtctccgtctccgctctgccagccgccttcccgccccagacacggcctcgttcgctccgctcgctccccggcggcttcgggtggcgcacgctgcga

SEQ ID NO: 90402 - DNA, 202 bp, Zea mays
  Clone ID: MRT4577_18244C.1
atgagctgatctgtagtcacagtgcacgtatgctaagacttagaattcgagctcagagtgcaaagtggatcagcaccgcaaccgcgaagatcttgcggggcctgcttttggcagctcgtcactgagccgctcgagccctacactcgcggtccgctcacaatggcattcatcataccagcgatccaaagcgaaatgcttacct

SEQ ID NO: 90403 - DNA, 264 bp, Zea mays
  Clone ID: MRT4577_182450C.1
aacgaattggacaatgcaacggcctgtagagattcaattaatcctgtacctgctgaaagctcatctacaagtgttgcacttccaagatcagctttggcgacctcaaacaggtccgtgtcgtcagctgctctgacgagttccagctttgctaccgtctgtatgtcacgtatgcacacttctatctatagacacctgattgaagtcgctcaccaggagggacctgttccatgccaacacccacggggtggacagcataacagactg

SEQ ID NO: 90404 - DNA, 592 bp, Zea mays
  Clone ID: MRT4577_182451C.1
acggtgatctcttgtactgtaagacaaccctatagacacatctcagctgagctcactgacacttgccatagcacttcaggattgcaattatgttaagcgtagctttatgggtgtggcattggaaatggtggctatgaaggcggaggttacatgggagcgctacatgcttcctagcgacgatgcctatgagatgctgctgaagcttatttaacaagtcccggaggaataccccacacggatgatgactatgcctatattactggaagatagctcgttaggatttcgacatggccaacggcaacggcaacgcattgtcacatattaactgtatctataagaggaaagcatgcagcatgttctgcttgtgtcttgcataaatcatacataatctttcctgacctgcggcttactatcaacctgctgtattcgctttgcacatagttgctatgtagaacgaaagtgtttaccatctacaacaacagctgcaacagtttatgccagcgctcagtcaactagccatggtgaaccctgccgtctacctacaactgcttccatctagcccgctcgctgtgggcaatgcggctacatacct

SEQ ID NO: 90405 - DNA, 595 bp, Zea mays
  unsure (1)..(595): unsure at all n locations
  Clone ID: MRT4577_182452C.1
ctcccaacactcactgaaanatttttgacctacaaaacttacgtttattaacacctgagcacttgcaacaaacgagatgaagtgatcatggcttcatcaatggtacacacattgatttggactttttcaatggtacaggcgattcggactttgaagttcttcgattctttcgttttttattcgaatttgactccattttgtacttttcgtgctctacacatttattttctccactcccgggtacaaatttctccttagtcgcactgttaattagtaacatgatgtatggggcatatggcattctcttagatgtgtgcatgtgattgttttccatctcctccaacatgtctactatgtcaaaaggcttcccgaacaaaatatgatacaaaatatgatacagtaggaccctacttgatccgtgaaccttacttttatctccaatcaaaggattgatagtctttgtaataatccggtttaatgaataaacttggttaccatctgcactcatgagctctttttcttgtgcatcagtcaattggcgcttaatcttaatattgtgctcagacggaacatggagaaccttttgacaaaatct

SEQ ID NO: 90406 - DNA, 298 bp, Zea mays
  unsure (1)..(298): unsure at all n locations
  Clone ID: MRT4577_182453C.1
gggtcgggaacccagnaagnacaatggacgccgccgtctccctctccctgcccctgcaccaccacgcccacggnccgctcccgctcccgcacccggngccccaccacctccactgcgcggtcccgctcagggaccacgccacctccgcgtccgncgtaaccgcgccgccgcccaagcctgacgttcaggctcctccagtggggcgtctgagccccgccctcgccgcgtcagcgccaccccgttcgtcctcgtccccggtcgccgtgcgctcctccagncgcgccgccacgggatacgc

SEQ ID NO: 90407 - DNA, 665 bp, Zea mays
  Clone ID: MRT4577_182454C.1
gttgctctctgtgctgccgtctccgacatcttaccttcgtcgccacgagcaacagataatcctccggcgctgagatgttgacttatcacgatctcctatctggccaatacgtcctgtcctctacattcacctacaagtagctcgagagcgaccccctgtgtcacgtctagatgatagagcaccacccaacgaccttggtgatgcgtactttgcagtcaatccatccaccaaggctgcagatcataagatcgatgatgacacagctgtgaaggcgtgtgacattgataacaccttccgactacaatatctacctccttttgacaagaaaatcatcttgtgtcttacatcagagaatacgtcaccaatctcactgctgtggatggacacacagaaagccgatgcagtcacaaaaagatagccgcaggctgctagcaatgttctccttaagcaagctggactatctcctattttttggtcatgacctcatgattgatgacgcccctgagctattccactattacgagaatggtgtcactaatcctacattccactatgtctctcatggccatacatgcatcaagagctaatcttgccgcgaaaataaatacccatgctgcagactatcgatggactattattatatccatgactatagtggtcctgtg

SEQ ID NO: 90408 - DNA, 355 bp, Zea mays
  Clone ID: MRT4577_182455C.1
accgtatcagctatgcacggggacatgcgcgaagaagaaagggatggcaggaggggagagttcaggactggcgcaactcgagagctaataactacagatgattgggctcgaggacaggacgtacagcaggaatcacttgacataaaaaatgagctcccaaataatacggagctggacatccatcgcattggtagatctggacgatttgggcgcaagggagtggcgaacaactaactgcgcaaggatgacatccgtgtactgagagatatagaacaggacgacaggacacaaaagagacgagaagccaaagaaagatgctgaacttatatgagcagcatgaggaacgggaggggag

SEQ ID NO: 90409 - DNA, 161 bp, Zea mays
  Clone ID: MRT4577_182456C.1
ataaactctcagttattttgaaatggcaaatttctcatgatataagtctggatctggaaaggacatgacttctgaaatagccgctgctgggttttaaaagctgaggtctctcaaagtgtggaggagacgttgccgtcagggggtgctagtgccgggaagat

SEQ ID NO: 90410 - DNA, 392 bp, Zea mays
  Clone ID: MRT4577_182457C.1
ggcggaccacacccttccgaattaccaacgtttttgggacctatttaagtctccagctccgttaacataatggaaaggggcaggataataaaaacgggggccggttttatcgccccacaaattaatgaaggcggtttaaaatttatcgcccttgattagcgtgaaagcagtaggccaaataccaaaattggttcgttggcctggttaaccagccattaagcttactggccagaccagattgcttaccgttgggggtttgaactgttgcctacttgtttcaaagggtttccacatcctaatttagtaaaaaaaaatgatttggggctttgttcgactaggcatttgtgttttgtcttaggggtggggagctgttttaccctacttttcttttt

SEQ ID NO: 90411 - DNA, 186 bp, Zea mays
  Clone ID: MRT4577_182458C.1
gccggacccacccatgcgagcggccgtttaatcatggaaagcgccccctgagagcgcttggggggcgtaacagaaccgaaggggggggaggcaccagccacacgaggggaccggagaggccactaaaccaccacccacatgccctgagagccctatcgaccgggagacaccggaaccacacggccc

SEQ ID NO: 90412 - DNA, 335 bp, Zea mays
  Clone ID: MRT4577_182459C.1
actcgtccgaccacgcgtccgaaaaccctagagctccctttccagtcgcgctagcgacacaaaggtcaggtctcttttaaagcgctggctggccacagctgaactcatccctcgagttttcgttgcgaacctgaatccccgtgtgacgctgctatacattcaagaccactaccgcacatttgcggctctcataaccccatccgttcctaggtaaccaccacgttttcacttgatcaacttccacgaccgcatggattcacaccaacacatcaatcatttcgatcgcaagacttctctgaggcaaaatctgtcaaccaatactaccaccgtctttt

SEQ ID NO: 90413 - DNA, 221 bp, Zea mays
  Clone ID: MRT4577_18245C.1
atggagagctttgtgttagatttataggtttaatcaaggtagcaacacccctaaggtatgtacaaccggctaaaaaccttcgtgaattatgtgcccaactctttttagctgcaaatgggatgaccatgaaatggtgaatgttattctaagatcactattggtttgttaacggtgctggcggcggtgggttgtgggaggggtggtggggtgtggggtggtgt

SEQ ID NO: 90414 - DNA, 453 bp, Zea mays
  Clone ID: MRT4577_182460C.1
ggccgcgggttttttttttttttttttgaccgttgagcattagattttattactagactgaacaccggtgccaaaacgtgccacggcactacgagcaacaaacatcctgattctattcatgcacaagatgctactgcagtgcaagctcactgcctgacgccaatacgagctcttgaggtcacacacacacacataggatcttgcatggatcttttgtgacagctactatgaacgagacatcaaccgtgatacgcgcccgcaggacattgggaacgatcaggccacgaacccgaggaagctgatgggcctggcgacggagtggcgcggggcgaagagcgcgcggaggaagaggctggcgccgtggaggagcaccaccacgccgctgcaccccacgagcaggagctccagcatgctcgatgtgatgctgatgcctccgcttggccgcccggccgg

SEQ ID NO: 90415 - DNA, 583 bp, Zea mays
  Clone ID: MRT4577_182461C.1
ctggccgggatcgcggccccatcccgccgcccacaatccacatcctcccttctagcgcccgcctccaacctcgagctccctcctgctccactggttcgacctccggcgcgtcacatcctcccttctagcgcccgacattggcacctaccaggacagcggcttcatggaaacctcctccgatgacggatctttctccggcccgagcgacggcgaggcccgcggcgggcgccgcggcggtgacgacagcaagggcgcgtggccgcggagttacaggcagtcgatcaacatgctaagcgtggtgccgtcgccgacggtgagcatgctgatggcagcgagcccaaacctgctacacaggcttgctgctccccttgttgggtgaccaggattctgaccacatcttatggaatcaaggaagggggatggtcaagcctcctgctgctccccttgttgggtgacagctcttgctacacaggcttgcttatgaagagatgcatagacagttcgcccaacattgggacatacccagacattaggttgttctttacttggagctttatgcaagctgtgtggagtacatcacgct

SEQ ID NO: 90416 - DNA, 348 bp, Zea mays
  Clone ID: MRT4577_182462C.1
gggtggggtttttttgtggggggtttttgtttttttttttttttattttttatttttttttttttcgcagccccaaaaaacaccattttttccttaggaataaataaaaaaaaaaccctgcaggagaaaaagcatccatcaatccacaatccatgctggttaatgcacgggtctgctgaaccccgtgataaacacatccataaaaactgtcacaaagcgacctttcaattaaaaaaacaattgggccaccacaaaccatacgaaccaaaataaacccttcggactaaggaaaacatcacgggtgcaaaaaaaataacttggcccggcggcccccaccattaaattcct

SEQ ID NO: 90417 - DNA, 299 bp, Zea mays
  unsure (1)..(299): unsure at all n locations
  Clone ID: MRT4577_182463C.1
aaggctaatcctctacttaacaccttccttaccgaaaagatcatcccttgcaggttggacaaaaatnataatgaaaatttccctgttaagcttactgcaaatgccacatacacactatcagatttcagaaagcctcttcagctcctgatgaaaggaaaaataataaaccatcctcatctgatgttaagcacagatcaattactatggtcccccgatggtatggaacaattcagatcacgtcaacgggagaccggcacttatattctgtatgacaggcacagtcttaatattaaaatttt

SEQ ID NO: 90418 - DNA, 599 bp, Zea mays
  Clone ID: MRT4577_182464C.1
tggaggccgcccgcgtggcggtcgccgagggcaccgcccccgtggcgaaccggatcgcggacagccggtcgttcccgctgtaccgcttcgtgcgcgaggagctcggctgcgtgttcctgaccggcgagaggctcaagtcccccggcgaggagtgcaacaaggtgttcgtcggcatcagccagggcaagctcgtggaccccatgctcgagtgcctcaaggagtgggacggcaagccgctgcccatcaacatcaagtaaaagaacgccaaggagaagaggagggaggggaggaaatacgtgaaaaaaaaataaaacctgtacacgtgtctgtccagatcgtgccgtcgatcgctcttcgttgttgatttttggttgtattgatcgatccgtatgtgtgcgtgcgtgtgtggcgttgctctttcttcttttgtgtagctgtgccctgccaccggccgacgtgcgtgcatgccatggtggcgggcagcgttttctaaggtcatatactgttgttgtgtttaagtacatcttgcttgcgtactcaattccttctaagtaagtatcctaatactagaatgttcctctaaaaaaaaaatataaaaa

SEQ ID NO: 90419 - DNA, 643 bp, Zea mays
  Clone ID: MRT4577_182465C.1
agagcggtcgtcttttttttttaagctgaagtttttgattgctcaccgtttggattcatatagctagctttgcagcagcagaggcgaaaactcgctgtgattaacttacagcagacaatagtttcgaactggtggacaaaaatgagggagagagatagaggaggtgacactgatcgaagatagccagcgtgggactgctacgcgaggagccagaagtccctgcgatgcttgctggagacgaggtagccgccggagctcctgcggcgcacggccagcgccacgcacggtgcgtgctcgatgcagtgctccaccacgccgccgccagccctgcgccggcaacgccacagcgcctgcagccagcgcgccacggcgtgccgccgcgggcgctggccaagcacgagcagcgacgcgccgtgccgcctcgccgcctccaccaccgccgccgcgcgctcctccgcctccacggcgcacgtctccaccttcacctgcatttgtgcgtgaccgtcagcgtctggtgagagccggcctcggatcccgacgcctccaccattattattttgttttttcttttggcgccagtgcgcgcggtgcggccacgcccccacccgcaaaatccgctaagtggctgttcttttttgaacca

SEQ ID NO: 90420 - DNA, 130 bp, Zea mays
  Clone ID: MRT4577_182466C.1
aagctgcgccgcctgaccacccggacataccgccggttcacccacccgttttttctccgaccgcagttcgagtcacagagcatctattgatgcgccgctcgaggagctctgtgacgaggacaagatcacc

SEQ ID NO: 90421 - DNA, 368 bp, Zea mays
  Clone ID: MRT4577_182467C.1
cctcaggtaccggtccggaattaattcccgggtcgacgagctcactagtcggcggccgccctttttttttttttttgaaatttatgtggacgaaacgagctttatgtcggcccgtgtcggaaggaatgtcacccaattcccgtgaagcacgggacggaggtataaaccaccgctccacggcttttaatatacacggaatcaaatcatgtacacgagaaaattccaaacacattgccaccaccggaaaacagggggtggacggttctagaatgcaccgtaacacgagcatcttacattaaccacagaaaccgctcataccgctgggaagaacttatccatatcgaacgggcgggaatagaactcctcta

SEQ ID NO: 90422 - DNA, 311 bp, Zea mays
  Clone ID: MRT4577_182468C.1
ctttcaaccccccccccgaccagttcatgctttcacttttcaataccaacaccatttcctgtgcacctatttattagaactttagacatcccatcaaacacaccaaaaatctcactaacaacaaagacattgccaggagcaccaacttactacaaagtgcagctataactactatcgttactagctgaaacctaactcattaccaagcattcctaaagcatcgacacagccctttcctaatgccaattctacaatcacgccagatacaaccaactagctgccaggtattacaacaacaatagtctcatgat

SEQ ID NO: 90423 - DNA, 532 bp, Zea mays
  Clone ID: MRT4577_182469C.1
ccggccgggccgggattcaagggcaagacagcgtaagaggagaacgaggatctcgtacgctattgccctatcgggttcgattaaattggatcccggccagacacctatggagacatggatcctacctctaccttcacattatctagtacccttgcctgaattgatccctaagtgaaggaagcttggatgcacgagctattctgactgacaggagccgaggtttggctctgatacaacgttcataccgacgaaaggatgacttcgctcgcctgttacaactacgatctgcggccaacgcaaagtctgcatcttatatatcgacacaggtatatgtacatgtggctgatgatcctcgctgctggcgtcataaaacaactcatgagcctattgacatcagatgtcgtcaacaggccgatgcgattctcgttatctgtatgatatagctaatgtgaaggcaatgtgagtgcatctagaatactgaaacgcaggcgctcaagtacttgacatcaatgtgccctaacagctatgcatg

SEQ ID NO: 90424 - DNA, 293 bp, Zea mays
  Clone ID: MRT4577_18246C.1
gggagagggggaggacacaccacacaaacaaaaacttaaatggcgccaaaaaaaaaaaaccaatccaaacaccttggaggccactgttgaattaaaaggaaaagggggccaaaaaaaaccaatattaggaaaaaacaaaaccaaggggaagcggcaaatgttccccaatcaaaggggaaaagatggccgttttaaaacaaaactaagattcccaaacacaaaaaaacggtttttacggcgaaaaaaacttgtggggttcgcccacttaaaaaaaaaaaaaaatgccccccttt

SEQ ID NO: 90425 - DNA, 269 bp, Zea mays
  Clone ID: MRT4577_182470C.1
gccatgcaacatgctatatctgcaagatttcttaataacacgggttagccaaatcagaaaaagatattacacatatagcgcacacattatatagacatttatatttgcctgctctgctagtatggatgttctttcgtttgtaagccttcgcaaatcacgaatcatttattctcgaaagcttatcattatcgctgtcacctctacttttctttaacctgatgacgtgattttttctccgaatgtcctacaagagaaccatagatttctat

SEQ ID NO: 90426 - DNA, 223 bp, Zea mays
  Clone ID: MRT4577_182471C.1
aatgaccggggtttttttacgatgtctcttagtcttttcaaaatattgaaaaaaacaatgccctacaaaacggtacaaaacactttcaccaatggttggtttccgacaatcggagcagaaaaaaaatgtttttggagcacaaacctgtaagagacgctaggggggggagttgccttcatagatccttgcatgctctcatcagtttgttcatcctcttcacgca

SEQ ID NO: 90427 - DNA, 348 bp, Zea mays
  Clone ID: MRT4577_182472C.1
tcccactcgtccgaaaaaaaataaaaaattaaaaacaaaaaaaaaaacaagagaaaaaggaaaaaaaaaaaaaaaaaaaaggaaaaaaaaaaaataaaggggggccgcctttttagatcctccattcttaccccccccttcctacgacttaatccttcttttttttccccacctaaaattttactacccgccttcttttaacaacctgacttctaaaaaaatcctttccttccccaaattaatctttttgcaaatcctccttttttcacctattgcaataacaaaaaagccccccccacctttctcccttaccaatttttccccctccctaattaataatgcgccccc

SEQ ID NO: 90428 - DNA, 329 bp, Zea mays
  Clone ID: MRT4577_182473C.1
gtctggtaattctcatgatatggtgagtaaatttcttttacagcaatcaattgaacacccggttggtgccatcaaggtcaattcaaaagcggacaaacccaattacccactattgttgatacggacttaaaaagactaaaataaatgccaaatggtatattctctagatttgcagctcttattccattttactagcgtctggtttttttccgggagcgaaatacttttataaaacattgtaaaaatcatacacggcttcatagcatgggaaggctttatacttccatctctcggacttttgtgagaggggttgccaattttatgatact

SEQ ID NO: 90429 - DNA, 327 bp, Zea mays
  Clone ID: MRT4577_182474C.1
ctcctttaacccacatttcattacacataatgggcagcgggctgcttttttttttttgttctcatcaagtcacattttctctatcatcaaccacaactggcgctaaggtcctcccaccttgatctcaccggcgagaactacttctcctgcgcctaaattaggaagcggttcaacccccgctacctgctgagctcgggggaggacgttgtctccttcctcaaaaagaaagctacagctacagctggctttcaggacacccgggctgactacatgcatgttcttggataggcagcaaaaacactgaagttgaagcctccgtgctttacc

SEQ ID NO: 90430 - DNA, 319 bp, Zea mays
  Clone ID: MRT4577_182475C.1
actagttctagatcgcgagctgccgccctttttttttttttttttgggccagaaacttctcatccgtgtgcctggaaggaacctaataaaaaatctgaaagttctagtagcatgataaaatgatagtatccgttggccgtctcattttgcacgcgaagcttttgtgcagccgtcggcactttgcaaatttacagtgctttacccaatctcagtcattgtagggttacctgcagggcacatgatctccgtgtttgcttacatgattggtcttcccactgttgtttctctatccttttgtcatgaatggccgcatgctttt

SEQ ID NO: 90431 - DNA, 474 bp, Zea mays
  Clone ID: MRT4577_182476C.1
ggtcgagttaaattttatcgttttatttataaacttcactagtaggtacgtgcatatggggggggacagggaaaaagaaaaaataaaaagatgccgttaccccctgaaacaagcgggggcccatgggagggggcaaccaaaaaacaacgttgaaacaaaaaggcgccaaccccatcaagcccgcggcaggggcccccaagccagatcaggggcagaagacgaccgggcccccaagggccccaatgaacaaacgggggtaaggggccctttccctgggggggcgcaaaaagccccccggagtccctttaccgcagggcaaaaaccgggtctaaagaaaaagggcatggggaaaccctagcgggaaaccaaagacccttcacaaaagggggggccccggcccccacaaaaaggaaacggggcgggggtcccccgggacccccaaaaaaggctaaaaggagggggcgcccccccccc

SEQ ID NO: 90432 - DNA, 529 bp, Zea mays
  Clone ID: MRT4577_182477C.1
gaacattgctcctgcctagccttcctcctggcccttactctgacccctactccacttgaagcgttcgtgcctgcgtgtggaaggtaggacacataagcaactctgtggacgactgcctgtgcgggccggagtacatttgctaggccccaccaccggctcacaggttcagtttgagcaaagatcgcaacatcggatacctaatatcgcatgcacccaaatagccttatgtccttattcttgacagtcgatcgactcaagattcttcagggtctgaggaggacgtcagcaccacattcatgaggacctatcttagaagatggagctatcaagcgcagactacatatttaccacgactatgacgattctgaagtattcgtctacttcacacccgaacttatgtgccagcgcgctatagatggcatcattttctgaggctgtagcataatacatgctgatgaccacatctgggttatgctatatgcagcacgctaaaccactcaacatggaaatcctgttattgggtctgaca

SEQ ID NO: 90433 - DNA, 223 bp, Zea mays
  Clone ID: MRT4577_182478C.1
aagaagcacggggactgtttcacatgaacgggtgtgatggctttgtaaactttacaaggcaagagggaggggcctggatatgttcgagaagctgacgtagctgggcttattagaggtgctcatgctgtgaatggtctgggcaatgcattagtggtgacatgtacgtgctggtgatggaatgttccatgagctaaaagcatttaaagacacagaaattactgat

SEQ ID NO: 90434 - DNA, 364 bp, Zea mays
  Clone ID: MRT4577_182479C.1
aatctatccctcttttttttttttgttggagagattatgggggggttggtttctctcaaccccctcccacaaaaaagacacaaaaaacaaaaaccccctgggggagctatttaatgcacctactatcctttttttttttattttgaacacatgacccatccatttggggggggggagaacccaaactacccctatgtaccctctgtttactccgcacccatgatggatttatttggtggtttggagataccagctataggcccttctgccccaaacaccacactgggaacggcgccttgtgccccaaccttacccattttaaacagcccatttgggtaatgtgccttgccccgaacccgtggaa

SEQ ID NO: 90435 - DNA, 350 bp, Zea mays
  Clone ID: MRT4577_18247C.1
cgaacaataacaattgaaaagacacatccaactaaattatcacttaccaaatcccttctagtattatgcagcgtaaattggtgatacaaccattccattttaaggaaccatcgctccatcatttccaagaagtttggtaatcattatcgagaaaaacatcgagaggtcggaaaagactaccaaacatatgaacatcaactctacgagctacgaattgatgcacacccatattgcgactgcagccaccactaacatattgcgactgcagcaaagggaaaccacttacaaagaacagcaacaaccaccactaacatattgcgactgcagccactggtgtctacagggctacc

SEQ ID NO: 90436 - DNA, 893 bp, Zea mays
  Clone ID: MRT4577_182480C.1
acgggttctgcccctccacgcccgcacctgcctccgtgacccccttccctccctcccccaccgggatccccggcggcaaaccaggacgccatcctcctcccccgcctcccttccatcctagcccgccccttccatactcctccccgcatcctttccatcctcgtccgtactcctccccgcgtccatagtggataccctgagctcgcccccgcctccatggctccatcctccactcgcgattccaccgtgcctgttgcgcctgcctcctcccgccccgtcctccgcacctgccctagccctcacgctcgccgctgccaccatcaaggcattatggtgctacccccggtcgagatagcctcccgagcatcgaggtggtggtcgaatcgatggagcgttgtgcccccgtcgccggtctcctgctgctcctaaatcgccgcgctgctagccgtatctcgcccgtgcatgcccaacccacgcctcccaaattgccaccaactccccaagctccacgagatctcgtgtcatcggtattgcctccctcaccgctgactgctcctcctagccagtagtctctccgccgccccacccctcgatcccacccactccgtagcaaatcttgccgggatcgtagatctagaaggtagcatcagatggctccatagggaatggaagcatggatgtaggcgttgacaggggtggcgaggatgaaggcgactatgatgaggaggacatcgaccagtttctgtatgtagctgctggcttatcgacgctccagtgatgtggcctattgcctcgtgggctgtggaggcagcggcagggcgacggacatgcgctcgtgaactgggggaggcggggatctggtcgatgcaaggctgcgtctggcgacctgcgca

SEQ ID NO: 90437 - DNA, 568 bp, Zea mays
  Clone ID: MRT4577_182481C.1
cccctttcgagtttttttttttttttttttttttttttttttttttttttttttttttttttttttttttttttttttttttttttttttttttttggcccccaaccaaaccccttttttttttttcggcccccttaaatttgtttaacccccccccggaattttttttttttttgggggccccaaccaatcctttcagggaaaaaaaaaaattttggttttttcccctgggggggccaggaaacttggggtcccccctccccctgaaaaaaaaaaggggaaaaccaaaccaaaattccttgccccttgaaaccgggcctgtttaaaaaaacaaatttggggtggggggctttcctaacccaaccggggtcctttccccgttggccccccttttttgcccttttttttgcccccaatctgaaaaactgaacccgggctccttaaaacagccggaaaaaatttttcccttttaaaagagggttttatttgctccccccttttccgaaaaactacttttttttgcgaaacctgccctttaaaggcccccctaccctgggggcccacaaaa

SEQ ID NO: 90438 - DNA, 321 bp, Zea mays
  Clone ID: MRT4577_182482C.1
ttttctctttttttttttttttttattttttttttggtgtttttttattttttttcaaggggacaggaaaaaccaatgggagcccaaacacggaaggtatcgcgccagggggacccgacatcacagggaaaaaaccaccccagggcctggccaacgcccgcgacgagacgggcaccgggccccgcaggcaccacaagccaaagcccgggaaggaggacataaatacaactggacaagagggccaggaggcctcccccggacaagaggccacgacgcccggcactttagggatcgcgcccagggtccagaaccccccggggg

SEQ ID NO: 90439 - DNA, 739 bp, Zea mays
  unsure (1)..(739): unsure at all n locations
  Clone ID: MRT4577_182483C.1
ccggggcggttcgtgaagacggtgctgcggacgccgcagctgttcgcggcgcggatggcgcagtcggtgctggtcggcgcgttcctcggcagcatcttcctgggcaccaccgacctgcagtcccgcctcggcttcttcgccttcaacctcacctacctgctcacctccaccaccgaggccctgcccgtgttcctccacgagcgccgcatcctggagcgggagacctcccgcggcgcctaccgcgtgtcctcctacgtcgcctccacgnccgccgtcttcctgccgttcctcctcgccgcggcggtgctgtacgcggcgcccgtgtactggctcgtgggcctggcgcgcgagcccgccgccttcgcctacttcgcgctcgtcgtctggctcgtcatgctcaccgccaactccttcgtcgcctgcctcagcgcgctggcgcccaactacatcgtggggaactccatcgtcgcggggctcatcggctgcttcttcctcttctccggatacttcgtggcgagcaagaacatcccgcgctactgggtgttcatgcactacgccagcctgttcaagtacccgttcgaggccctggtggtgaacgagtacggcggcgcgcgcggagccagggagtgcctcgcctcggccggcggcgcggggggactctgcgtgctcgacggcgcggggctgctgcggcagcaggggatgagggagggcatgcggnggagcaaccttggcgtcatgc

SEQ ID NO: 90440 - DNA, 307 bp, Zea mays
  unsure (1)..(307): unsure at all n locations
  Clone ID: MRT4577_182484C.1
gnatgtcttattttttattgggttttatatatagtgaactttggcacacgnnatgaacattgaaaaccaagtgaataagaataacgtactgttacatactctatatataaaataattaactggggtccaaactccagacaggtcagccaaatttttgacagcagtgcaaaggtcaaccaaacaagaaagaaaaaacactgatgggaggcagaggcgcagagccacgcattgggcaattagggcctccagttgcgcgctcattcgaccagtaacctggggatgtacatgttggtcgaccccttgttct

SEQ ID NO: 90441 - DNA, 502 bp, Zea mays
  Clone ID: MRT4577_182485C.1
cctgccggagtttacactatcgagagcagacgacggcagcgcacgaacaggcgcaggcccaggagtacctgcgccaagccacattggatatcttacgcagattccttgcatatctctctgtgccactgatgataagccgaagggctggaggaagatagcgagaagtatgatgctttggtctgtcacgtctgttcaacaccaagttgtcaagcaataagacagtgaggagggtcctgtgttcgcgtcaagttcgtgatgtggaggtctatttgccttgatactgctatgctactcatggctgaagtgaacctgttacttgctgatccggttcctagacgtgccactaacttcataaacattgcgcttgtaacgacacaaactttcttacagagcgccattgtaccaatggatgctctgctattgaagcagggtcttctctgtgatatctggttgcgttgctgatgccaataaccacgctgttgcccagaacgataatgctgac

SEQ ID NO: 90442 - DNA, 440 bp, Zea mays
  unsure (1)..(440): unsure at all n locations
  Clone ID: MRT4577_182486C.1
cccacgcgtccgcggacgcgtgggttgtggatgaagaggaacagtctggtaaatctgagtgctaatgaatctttgaactagctcataatatccttgattgtggatgaagaggaacatcacgcatccttgttctagtctatgtttggttaacacgcccaacagcagctctagggagatttctaccccttagatgctcagtttcaccaactagtttatcaacaacccctcagaatttttatcaacaacaattagtcggttgaactcctatttggacgattaatcaccgtttaatcgtggttagtgttacgatcagagttctagttgccctagtcgcgtcgtgcaccctaactgatcttgcaatggcgataaggccgactaattgcgactaatcgtgattagtcggacgactncaaaacatggctaggcacatgtatttgcaa

SEQ ID NO: 90443 - DNA, 455 bp, Zea mays
  Clone ID: MRT4577_182487C.1
gtctactttaccctactggctggcgagtatcaaactccaggtgcatagcggacaatttcatcatgagctcagggaacaacagatgggatcctgtattttaaggattgcattgtaactattgatggtacacatgtaatagccactgttcctagagatatggagcatgcctttcttggaacgaagctctatgcgacttagaatgtaatggtgggtgtagattctgatctacactacacttatgtgtatgctggatgctagggaacaactcatgatgctaatggattatgagatgctctacaacgtgtgtatggtctttgagtttcacaaggttgattttacctaggtgatgcctgatatggatcaaaactggtattattgtctgcttttcatggggggagataccatttaaaccaatggggtaattattccgtactaaaccataaagaaggggatta

SEQ ID NO: 90444 - DNA, 1093 bp, Zea mays
  Clone ID: MRT4577_182488C.1
ccggccgggaaaatcccgccgcgtccctcacatcccgtcgcgcccgtgcctcctccccccgcctcgccgcactcagccgtagccgcctcacgcccttgccctcgtcctcggcgcagccgccagtcctcggcagccaaagcgacgccgcttccgcctctgatacagccccccgccatgctccagtaactctgctgtccgcaaagcccaacaaactttcagcccaaatcggcactcgcgggcgctcccccgcatcccggattcgcctccgccgcttgcctcgtgactctgggacaatcccctcccctcgctctggcactcctgtataccagatagctgtcgtcgttcaggtgtcaggtgctgctccgcgaggcacccccttcggatttcggatatgtccaggcctcgatcatcaagggagcttcagtttatatagcctgtactatgtattatgagaagcacaagcagttcgttgacacatctaggaatccagaagccatacacagacgacgtcgcggctccgcatggccaacgccaagggctcgtccaccggcgtagccatagtgacctcggctgggccattttgcacgagcagcaccagacattcatggcctccgtgctccgcaccgggcgccataaatgtgcaccactagcagcacttccaccaatacctcgctgcctcgtccaccgccgctcgagcgtctcctgccttccaccaccaacactactgcgcgcgaggcaagaatgctggaatcgcgtgaaagaagctacgggcgcacgcgctggggcgattgggggaaatcccgcgacacgcaaatttgcgcgaccaaagcgagtggatgcgggacgcgaagctattggggaggagaagggggcaatgttggaggggcaacaatgcgttttttacctataaacgctattggggttattttacactgtttgttggagttgctctaaggccaactgttgacttgtttggggcatgatgcgaatcggtgatcaacctaggcgtgggattagttgtatttctttaacactgttatctagcaagctcgaaagcacagcaaaaaaaaaaaaaaaaaaaaaaaactcgaga

SEQ ID NO: 90445 - DNA, 363 bp, Zea mays
  Clone ID: MRT4577_182489C.1
gccaggtgtacgtactagtactagtagatgcgtcacatactatccagctacgtactactactagccggtgcacatcactagcgatgactgccatccacggtagccatgcgtgcccaccgttgaagatgggtcaagtccgccaccagcctcgccgtggtccagcgtatcaagagcagcctcagcctcgtcagcaaccgccgaaggatccggagcatgcacgtcttgaccgactacggaaggatgaagtgcatgacgctgtcgtacgtgtacgcgatgtcgacggacgagacgctgaagcacgtggactagctgctgagcgacgacctgatgcactaggtggactacatgatgctcagctgctgg

SEQ ID NO: 90446 - DNA, 624 bp, Zea mays
  Clone ID: MRT4577_18248C.1
tatacaacgaatttatgctatttttaatcatatttaaaccaatgtttagctatctagccattatccgtcaatctaaacaggccaataaactttgaggtggatggcgtgatcaatatctcacccacactgcaccagaaataggttttaataatggttggtgttggggaaaagatcctcggggccctaggacccactagttagcaaaaggacgaaggaaaggtccgtctcggtagcacctgccccccggatagtcccgaggcaccgagcctaggatcgagcaagttggagttagaaggaggggtcgggcgaatcgaggaaagccactcgagtggatttctcggctgacccaagactgacccgtcgtaagtgactgaccgcattaactgtgcatggcaccaagccatcgtgggagattcggccctccttccactcatgaccttcgggcccctaggcctgtgacccactcatgacctatcgaccctaggcctgagtgcactagtcgtctacagaacccacaacatgcgagccacagatagaccctggctatggagacgaggggtcgacatggcactgagacggtaatgatggtgctagatctcttcgccgccaatgcaaccactctta

SEQ ID NO: 90447 - DNA, 354 bp, Zea mays
  Clone ID: MRT4577_182490C.1
ctcccgactcgaaccaacccaagccacgtcttggtgaccggtcgacagtccacgaacgaggaccaacctaaggactgacgctgggggcaatatcgatctgatcgaggtgagctgtgtcggatggggtaaggatcgggggaggagccgatgctacgaaagggttgcgctgaacaagaagagggttggcttggctggggcatagctggaggacaggaaaacactttctacatgcaccgtgcactaggtgagaacaatctaaatgacgctctgaattactggaggcatatgctttttgaactggacacttagtgaatatagtatcacaattactgcgaactgttcatgaaggctttt

SEQ ID NO: 90448 - DNA, 567 bp, Zea mays
  unsure (1)..(567): unsure at all n locations
  Clone ID: MRT4577_182491C.1
cttgccaaagcgccaanagatgcctggggtgatctggggcacaataataatgagaaagaagttgttgcaaaagatacttcttttctgtcgtcgtgactatgggttgcgcattgttcattctatatccgttttgatgggttcacaagcacgttccaagataaactcttggagaggggtgtgacatgngaaatacacaaccaaatattctacacaacagtctgctcttgtcttcttagtttaagcgggctgattctccagaatcatctgattccagctgtggattttatgttccgtcacccagattgcttctccgatgttgtaatcctgtccagcgttgcaacagcgagtcagttcttcatatcctacaccattcggacatttggcgctctcacatttgctaccataatgacaactagacagcttgtgagcatattgctgtcctgcatctggtttgtacatcctctcagctggatgcagtgggttggcgcggccattgtgttcgtagccctatacacaaagagcttcctgaggagtaaaccgcagaagctagcggtgtcaagcccgcca

SEQ ID NO: 90449 - DNA, 1773 bp, Zea mays
  Clone ID: MRT4577_182492C.1
cccacgcgtccgcccacgcgtccgcggacgcgtgggcggcgaaccccacccgccgggcgtgcgccccatccaccaccgatcgggcccgtcgctgcaacaaaggcgttcagtttcgttccgtttgggttggtctgtttagtgcggctcgttccgtttgggttggtctgtttagtgcggcggcgacagcgacagcggaggagagaggggacgggaggggccatggcggacgcggcggcggacagggagagggacaagggcaaggacgaccgccgccgctgggcggctcgctgcggtttcgccgtcctcggcatcatgagcaccctcctcgtctacggcgtcctgcaggagaagatcatgagagtcccgtatggagtggagaaggagttcttcagatactcgcttttccttgttttctgtaaccgcatcaccacatccatggtgtctgcaatggtgttactggcaagtaagaaatccttggaccctgtggctccgctacacaaatatggcgttgtctccatatcaaacatactgaccactacctgccagtatgaggccctcaagtatgtaagcttccctgtccaaacacttgccaaatgcgccaagatgatacctgtcatgatctggggcacaataataatgagaaagaagtatgttgcaaaagattacttcttttctgtcgtcgtgactatgggttgcgcattgttcattctatatccggcattgatggatgtgagcccatttaataaaggcagagaaagcactatttggggtgtttcactcatgctcggttatcttggttttgatgggttcacaagcacgttccaagataaactcttcaaagggtatgacatggaaatacacaaccaaatattctacacaacagtctgctcttgtcttcttagtttaagcgggctgattctccagaatcatctgattccagctgtggattttatgtttcgtcacccagattgcttctctgatgttctaatcctgtccagcgttgcaacagcgagtcagttctttatatcctacaccattcgaacatttggggctctcacatttgctaccataatgacaactagacagcttgtaagcatattgctgtcctgcatctggtttgtacatcctctcagctggatgcagtgggttggcgcggccattgtgttcgtagccctatacacaaagagcttcctgaggagtaaaccgcagaagctagcggggtcaagcccgccacgtggttccagtccgaaccctgttagcaatagttgacaattggtgacataataacataggaaacaatggacttgttgcggtgtaacgggacgaagtctccgtgtctgagatcaatggcaccatggctgcatatgcaaggcgaggtaactggacagataggttccagatgttgctgtgttactgctccctgacattttttcaaggtcatgaaggtggccattttttcaagctagtcgaccctagtgttagtttagtgtccagagacccaattttgtagcccagtgagctgtgttaccaattttgtagcctcaacaaagcatcgtgtgtgtgtgtatttgtcgagcgttggcgactgagagttgaagaagtcacagcagaccatctgcaaaaactcaccagataactagaactgcgatgcgtaacaaattgcaaaacacaggagattgtcagctaacagctgtggtccgatgtaaagatcagcagctaacaactgaaggcctgtttaccatggtttttgagtataccgtagtattttatacc

SEQ ID NO: 90450 - DNA, 1513 bp, Zea mays
  Clone ID: MRT4577_182493C.1
gtttcgttccgtttgggttggtctgtttagtgcggcggcgacagcgacagcggaggagagcggggacgggaggggccatggcggacgcggcggcggacagggagagggacaagggcaaggacgaccgccgccgctgggcggctcgctgcggtttcgccgtcctcggcatcatgagcaccctcctcgtctacggcgtcctgcaggagaagatcatgagggttccgtacggagcggacaaggagttcttcagatactcgctattccttgttttctgcaaccgtatcaccacatccatggtgtctgcaatggtgttactggcaagtaagaaatccttggaccctgtggctcctctacacaaatatggcgttgtctccatatcaaacatattgaccacaacctgccagtatgaggttggactggtctctgcccttttggttcttttgccattgtgttgtttcgtgttactatgtaaagtacctttttccaggccctcaagtatgtcagcttccctgtccaaacactcgccaaatgtgccaagatgatacctgtcatgatctggggcacaataataatgagaaagaagtatggtggaaaagattacttctttgctgtcatcgtgactctgggctgcgcattgttcattctatatccggcaatgatggatgtgagcccatttaatagaggcagagaaagcactatttggggtgtttcactcatgtttggttatcttggttttgatgggttcacaagcacgttccaagataaactcttcaaagggtatgacatggaaatacacaaccaaatattctacacgacagtgtgctcttgtcttcttagtttaagtgggctgattctccagaatcatctgattccagctgtggattttatgtttcatcacccagattgcttctctgatgttctaatcctgtccagcgttgcaacagctagtcagttctttatatcctacaccatccgaacatttggggctctcacatttgctaccataatgacaactagacagctggtaagtatattgctgtcctgcatctggtttgcacatcctctcagctggatgcagtgggttggcgcagccattgttttcggagctatatacgcaaagagcttcttgaggactaaaccgcagaagacagcggtggcaagcccgtcgcatggctctagcccgaaccctgctaacagtagttgacgattgatgacatgataacattaggaaacaatggacttgttgcggtaccgggacgaagtctctgtgtttgagatcagtggcgccatagcgccatggtgaggtaactggacaaatgggtcccagatgtagctgtgtaaactgctcctgacctggaggtgatggaggtggtctccctttttagtggaaaaaaaccaaggtagtcctgatgttagtttagtatccagagaccaatttttcagccatcccaggctgtgctatgttttttttttctcgaactcgcaagagaattaagtgtcaaaataataagag

SEQ ID NO: 90451 - DNA, 339 bp, Zea mays
  Clone ID: MRT4577_182494C.1
caaacacacaatggcaccaaaaaagatgcacctgggcggttcaacttttctgggggtgggcagccacaccaacgccacgaagggccaagtggcatcggtcaacgcgggccaaacaacggacgccgacagcactagaaagaacacgaacgctaaagacggatacaaggggccacaagtggcaatcaaacgcaagaacagcaacggcaacaactagacaaaggccatgagtgagaaccaaaccaaccgagccttcagcgtcccaatcaccgccaacctacacagggccgactgacacacgcaagtacacagctacgccaataactcaccaaaccctgggca

SEQ ID NO: 90452 - DNA, 673 bp, Zea mays
  Clone ID: MRT4577_182495C.1
atctccatccctagccatcctaacgagcagcggcacaacgccctcctacacaagcaacacatcgtagatggcggccgacctcgcgacctgacacacggccgtggcggccgactcccgaaccgcgagcgttgacgccgtgggcagctgcaatatcgccgagacgctagcctgaccgagcgtcgccaatacacttcactcctccctgcacagcgcgtccacgacctggctcctggccttggtgtgcccgatctgcaacctcgcgaatagctcctagatgttgggggtttgcagcagggacgagccgacagcgtgctacagaacgccggtcttgacgagcagcacacagttctggaggctgaggtcgatcctcctagagagcgcgcggttgccccctccttccttaccccgcacctctcaaatggcactatgcttatatttgatctatagtttaggaacaaaactattttggttgaacaaggtaactgcttgatccatgagcttcttgagagtaatttctgaagggatgctcctcaactctgctttctttgttacagattgactacaacacaatttgggtagaaggtgtttgatttgtctattaggctagggcaaagcaatgcaggcgttcttgaggcaaccacttgaactctaacaaccttttggataaaaacat

SEQ ID NO: 90453 - DNA, 264 bp, Zea mays
  Clone ID: MRT4577_182496C.1
cttggacatgcgtgcagccgccagagccgccctccagggtacagggtgggcccgggagagcttgtgtgctcacacctgggcggccccgcggcagcaatggcagctctcctgtacaggctgagtttcagccacaccaagaagtcaaagctaaccgaggctgtgccttccgagacccccgggatggcccctgggaggccaaggagtcggggactgggtacccggagcagagtcactgtggccacggagaaccgcagctgagcttta

SEQ ID NO: 90454 - DNA, 364 bp, Zea mays
  Clone ID: MRT4577_182497C.1
aaaaacacatataataggacttgggaagaaaaaagtccactgaaaaagcacatccccaaatacatacacattttttagttcatttttaacactcgcttgggctcattctttgcgacaaggggggggcagccgtaaccagttttcagccaggggcttttaattcctaaagaggggcttgggagcaaaccttgggggagagcgagcattgaaagagggcccattgaagagagagaaaactggttagttttttacagggatgaggtttttaattcatgatgcgataaataaatactagttttgggattgggtttaaagctcgaaaatgatcaatgcgataggtgcaacactgccttcttttcctcca

SEQ ID NO: 90455 - DNA, 304 bp, Zea mays
  Clone ID: MRT4577_182498C.1
cttaaatattttattttagatttggggtatatgtgcaggtttgttacatgtgcatacattttcagtgctcttgtatttacattttaatctggatgttatatctcactttacagaatttttttcacagttatttctctctagggtttgtggtggaacacatgtagacagagaaatagttgttaggaagacatagacctggtagtttgtcactctgaagtgggctgtcagctgaaaagcttgaagaccatgggtctagacagacagctcattccaactacaactatcatagattgaccaactcctg

SEQ ID NO: 90456 - DNA, 849 bp, Zea mays
  Clone ID: MRT4577_182499C.1
ccgctcaggcggcgtcccttttccatccccatctttcgtccacccctcccccctctcgccgcggaccccatccgccgcccgccgccgccgccgttgacactacccgcgaatctccttcttccgagtggtggagaggagacatggcactccggaggctgcttcaggggattgtcctaccgcggacgacgggccggcatgttggggcatcgttttccacggaggctggggagactatccgcgcaaccctgtttcctggtgatggcatcgggcctgagatcgccgagtcggtcaagcaggtattcaatgttgcaggtgtaccgatagaatgggaagaacattatgttggtacggaagttgatcccagaacagagagctttttgacatgggagagcctggagtcggtgcgtagaaacaaagttggcttgaaaggtcctatggctacacctattggaaaaggccaccgttctttgaatcttacattaaggaaagaacttggactctacgccaatgtcagaccttgcaacagcctcccaggctacaagactagatatgatgatgtgaaccttgtgacaatccgtgaaaatactgaaggagagtatagtggccttgagcatcaggttgtgaggggtgttgtggaaagtttgaaaattattacccgccaagcaagtttgagagtggcagagtatgctttccattatgccaaagccaatggcagggagagggtctctgcgatacataaagctaatatcatgaggaaaacagatggacttttcctcaagtgttgccgtggagtagctgagaagtaccctgaatcacatatgaggaagcattattgacaatgctgcatga

SEQ ID NO: 90457 - DNA, 208 bp, Zea mays
  Clone ID: MRT4577_18249C.1
cacacactcgcgaactccatttcgatcccatatgtgatgaatccatactcgcgttgtgcgttttgcaacctctcatcctcatagccaatatcaagatcggtatcaacgtgtatagcttgatctgttggctggtggccatggcggcccttcagagcgacatctgaaaactcaattctttgaacgtacacgatataacaagcgattacat

SEQ ID NO: 90458 - DNA, 352 bp, Zea mays
  Clone ID: MRT4577_1824C.1
ccaacagaaaggaaacaagcattaaatcaggatggcacaagcatttactgcaacacttccacttaacaaagcatataccaactgtttcatctgttacaccacgatggatagcaaaaagtgcctcagcagcacactaccatctacagtatgaccaatgatgttcagaaacatgcatttgacaactaaaaggaaacaagatagtagttcccagtacaggagttgaaccgacaattaaaccaggtaacagtagcaaaacgagaaaattagagcttgtcctcaaactcagaaagaggggtcatctgttccttgagacccttcctcttgcggatatccagcaccagctgagcagcct

SEQ ID NO: 90459 - DNA, 464 bp, Zea mays
  Clone ID: MRT4577_182500C.1
aacaaaaaaaagcgagggaaagagggaaaaggcaggggacaacagttaaagaggggttccaaaccaaaccagacggggctcaagggccccacgccaaaaacgagggggaacaccgaggccttgccagggagaatcctttacggggggcccccaaattttagggacaaaagtaaaaacacggttaaaagggtccaacccaaaaaaccaggttccaaaaaaaattgaataggggaattcgacagcagcaaacactagctactagtttttaggcacaaaaagccggtttaactgcccctaactcaagacccgttggggcccctccttaattttttaagaagggtcctccgaaagggaaaaggcccatagggccaagttataacaaaggagctgaataaaaaaagggctgcccttgtaggactccccgttaagggggtccagttccaaaagggcctaggaaaaagcct

SEQ ID NO: 90460 - DNA, 464 bp, Zea mays
  Clone ID: MRT4577_182501C.1
ctctacagagagtcactactactctccactctcccatcatcatgtctgctgcctcccaagccgtcaagaaggctcccaccttcttccagacctggttccgtgtcgaggtcattcccatctacgctgtcctcggcgttgcatgcggtggtgccgcctggtacgttacccgtcttgcccgtggcccggatgtcacctgggaccgcaagaacaacccccacccttggttgaacattgaccaggagacccagctcaagctgatgaccgtcaaggagaaccagggcttcaccaagacctactcccgcgatcgtctgtaaagaaaagcctcggccgctctctctctctccttcatttcagcacactagacattcaaaacacagaatcaatccgggaatccttgggtcatcaagagtctttgttgatgccgttggacgaaactggcacgtggatgtgaggcgtttgatgag

SEQ ID NO: 90461 - DNA, 174 bp, Zea mays
  Clone ID: MRT4577_182502C.1
ttgttagtttgttgactttagaggatcgtttcaaaatcacgcggacaggccaggaagagcaatggggtagagaaacatgcacttaacaaccaaaccgaagcaagacaaaaataggaccgagaaaacgcgtgacaataccaaaccaaaacgcctggcagaacaaaaagattacgg

SEQ ID NO: 90462 - DNA, 556 bp, Zea mays
  Clone ID: MRT4577_182503C.1
gtggacgcctgcggttccggtccggaattcccgggtcgacccacgcgtccgctctgcgggctgctgctggccgtgctcggctgcgtctgcgccagcggcccccgcaccctcgtgctgctggacaacctgaacgtgcgggacacgcactcgctgttcttccgcagcctgaaggaccggggctttgagctcaccttcaagaccgcagatgaccccagcttgtccctcattaagtacggggagttcctctatgacaaccttatcatcttttccccgtcggtggaagattttggaggcaacatcaacgtggagaccatcagtgccttcattgatggtggcggcagcgttttggtggctgccagctctgatattggtgaccctcttcgggagctgggcagtgagtgtgggattgaatttgatgaagagaaaacagctgtcatcgaccaccacaactatgatgtttctgaccttggccagcacacactcattgtggctgacactgagaacctgctgaaggccccgaccattggtggggactcatctctgaaccccattctct

SEQ ID NO: 90463 - DNA, 316 bp, Zea mays
  Clone ID: MRT4577_182504C.1
gaaatccaacgggaacggggtttcgcaattaaaacaaattaactctggggcggggtccttcgcctcggaataggaaccaaaaattcttacgggaattttacgggtcacccaaagcggccatcttgttttggttaaattaggctggggccttgcccaaacaccaccattgccagccccccgggggaaggactgaccaaaactcacccctttattttcttaaaggaaactttttggcaacttttggccctctctttaactggcttaggacacaaaatggcctaaattagagagcctaaaaaaacaaggtggaccccct

SEQ ID NO: 90464 - DNA, 698 bp, Zea mays
  Clone ID: MRT4577_182505C.1
ccggccggggtacctctattctcttcattctacacacacaaaatgtctgctcctgctcctcttcgtctgggctctaccgcccccaacttccaggccgagaccacaaagggaaacattgacttccacgagttcatcggcgacaactgggtcatcctcttctcccaccccgaggactacacccccgtctgcaccactgagctcggtgcctttgccaagctccagccagagttcaccaagcgcaacgtcaagctcatcggtctctccgccaacaccatccagtcccacgagggatggatcaaggacattggtgaggttactggcggcaacgtcgagttccccatcattggtgacaaggagcgcaaggtttctcttctctacgacatgatcgaccagcaggatgctaccaacgtcgatgagaagggcattgccttcaccatccgatccgtcttcatcatcgaccccaagaagaccatccgcaccatcttctcctaccctgcctccaccggccgcaacgccgccgaggtcctccgcgtcatcgactccctccagaccggtgacaagtaccgcatcaccacccctatcaactgggtccctgggtgaggacgtcattgtccacccctccgtcaagaacgaggagggccagactctgttccccgagttccgcatcgtcaagccttacctccgattcacccctctcg

SEQ ID NO: 90465 - DNA, 4380 bp, Zea mays
  Clone ID: MRT4577_182506C.1
atgaatcctcctaatcctccaccaggcggagttgacccactggttgctgctcagatggcggtgatgcagcaaatggcagacaccatggctgatatgcgtgcccagatgcagcaagaacgccaggaaatgcgtcaggaaagagaagatatacgccaggagttgcgccaggagagagatgagatacgccaagaaaggagggcgcaacaacagcagctgcaacaacaacttcaacaacagcaacaacagcaacaagtgccattgcctccaccaccaccaccagttccacctcatgataagcaccgggagtttatgagtcataagccaccgaccttcgccagttcgccagatccacttgatgcagacgattggttgaagtcaattgagaagatgctgaatattgcacaatgcactgaccgggagaaggttttatatgcttctggacgtctgactggtcctgctgctgactggtgggattcttatactgctgcccatgatgctgcggatactattacttgggcagagttcagtacgcaatttaggaactaccatattccagctggtatgataaagatcaagaagaaggagtttctgtcattaaagcaaggcaacatgtcggtcagcgagtacagggacaaatttattcagttgtcgaggtatgctccggaggaagttgctgaggatgaaagaaagcaggagcactttattgaaggacttaatggacccttgcagtatgcactggtggcacacacctttccatcatttcagaggctactggataaggctcttgctattgaacacaagcgtgttcaactgagtgatttgaagaggaaggctatctcgcagggacagggtagcagcagtgttcgtccccgctacgttccaccacagggtacaccgactcgaccaggaggaccacgcccagttcagcaatcaccactgaggattccacctcctcgacaggctacccccactggcaccccgacgaggcctacaggacagaagaccggccctacatgcttcaagtgcagtcaggttgggcactatgctaatgcttgtcctatgggaaattctggtacaccagctaagaacaagcaacagacccgtggcaagggatattctatagccagggtgaatcaagtcagcgttgatgatactcctgatggtggggacctcgtaattggtatgttttatgttaatgcaattcctgcaacaatattatttgattctggtgctacacattcattcatgtctgctagatatgccaacacaaatgaaataccactgctaaatatgagaaaacccatgatagtaattacacctaaagggcctgttgaggcgaatcaaatgacacgtagattgaccttgaccattatgggtagagaatttggagctactgctataatattagagtcaagcagtatagatctgatccttggtatgtcatggctaagaaaggcaaaggccgttatagcatgtggtaggggtaccgtagaactcactaccactaaaggagaaagatttcaagttaatattgcagtaacctcctcatccatgcgtgcaatgttctttatgcctgaggagtttgttggtgacaacatccgggtggttagagattttccggatgtctttccagaggagttaccagggatgccccctgatagggaagttgagtttgttattgatctcttacctggaaccgcccctatttctaaacggccatataaaatgtccgtagaggagttgaaggaactgaagaagcagttgattaatgatgttacggtgaagaacaagtatctgttgccccgtattgaggatttatttgatcagatgagaggtgctagagtattctcgaagattgatctccgatccggttaccatcagatgaggattagaccatcggatattcctaagacaacattctcgaatcgatatggattatatgagtttactgttatgtcatttggattaaccaatgcaccggcttatttcatgaatttgatgaacaaagtgtttatggagtatttggacagattcgtcgtggtatttatcgacgatattcttatctattctaagaatgaaagtgatcatgaacaacatctaaggttggtgctacagaagttgcgagataatcaactctacgctaagttcagcaagtgcgagttttggattgacaaggtgccattccttggtcatattatttctaatggaggaatagcagtggatccttctaaagtgaaggagattatggagtggagagtgcccactacagttactgagattcggagtttcttgggactcgcaggatattatcggagatttattgaagggctctctaagattgccaagcctatgacctcgcttttggagaaaggaagagaattcaagtgggatgagaaatgccaagagagctttgatcaattgaaggagagattaatgtctccgccagtattggttatgccagatctgcagaagggatttgacatttactgtgatgcatgtggccaaggacttggatgtgtgcttatgcaagatggtcatgtgattgcctatgcatctcgtcagttgaggaggcatgaattgaactaccccactcatgatttagagctggcagcagttgtgcatgcacttaagatttggagacactacattatgggaactaagtgccaagtatacacggatcataagagtttgaagtatatattcactcagaaggatctcaatcttaggcaacgtcgttggttggagctcattaaggattatgatttggagattcactatcacccaggcaaggcaaatttggttgcagatgccttgagtcgaaaggagcatgttcactccgctttcgttgtccagctacctgatgaattagcaaaagattttgagagactcaacctgggaattgttacacatacggaaggagtgactattgaattggaacctaccttggagcaagaaattcgtaaaggtcagattggtgatgccaaaatccaggagatcaaggatctgataacagagggtagaggcccggaattcacagaggatgagcaaggcacgatatggttcaagaatcggatctgtgttcccgaaattgatagtcttcgggaaactatattgaaggaagcacatgactcagtttattctatccaccctggaagtactaagatgtatcagggtttgaagcaaaaatattggtggtatggattgaagagagatgtggccgcacatgtggctatgtgcgatgtgtgccaaagagttaaagctgaacaccagaggccagccggactattgcacccactgaagatacctgagtggaaatgggaagagattggcatggacttcattgttggattaccccgcacatctgctggatatgattctatatgggtgattggggacaggctaactaaagtagcccactttattccagtgaagaccacgtattcaggagccaagttggcagagttgtacatggcacggattgtatgcctgcatggtgtaccaaagaagattgtgtcagaccggggatcacagtttacctctcgatattggaagaagttgcacgagtccttggatacaagattaaattttagttcggcttaccatccacagactgatgggcagactgagaggactaaccaagtgttagaagatatgttaagagcttgtgctcttaagcatggtggtagttgggataagagtctaccatatgctgagttctcatataataatagctaccaggccagtttgaagatgtcaccgtttgaggctttgtatggcagaaagtgcagggctccactgtattgggatcaaactgatgaaaggcagttgtttgggcctgagattatacaagaagcagaggatcaagtccagcaaataagggagaatttgagaactgcacagtccaggcagaagagctatgctgatacccggagaagattgcttgagtttaaggagggagattatgtctatttgaaggtgtcaccactccggggtatgagaagattcaaagtcaaaggaaagttgtcccctcgctttattggacccttcttaatcttaaagcgagtgggtgaggttgcatatcaattggagttaccggatcatcttgcggatgttcatgatgtatttcatgtatcccagctgaagaaatgtctcagggtgcctgaagaacaattaccaatggaagaccttagtgttcaagatgacctgacttatgctgaataccccatcaagattttggatactttgactcgagttacgaggaataaggttataaagatgtgcaaagtgcaatggagtcaccatggcgaagatgaagcaacatgggaaagagaagaagagcttcgcgtagattttccccaccttttccctagatcttcctaa

SEQ ID NO: 90466 - DNA, 442 bp, Zea mays
  unsure (1)..(442): unsure at all n locations
  Clone ID: MRT4577_182507C.1
cctttggccatcctaggtctcgtgtacagtcgtcccctccgctcctcgcctcctcctctcgcgagtcccgaacggccgatcccgacgccggctgcgtggctcgcctcagagccccagccgtatcctgccacccttgtccgtgagcgcccgctatcagcgcagctagtccctccctccgcccgctatcttgagcggtggtgatggagtttactttcgaggatgcagcggaactgtgcgcgctcgtttcgaatcagcaatcccacgtcgacgagaagcggaggtggctggagtcaatgatcctcagaccggatggctgcatcaggcgcgcgaagcgacccangtttttggattgaagtgtaagcgtgcgccaagttctgggatgcgagtagtggtctaattcaggccttttcttggtctctttaaataagtggcccgaagttag

SEQ ID NO: 90467 - DNA, 184 bp, Zea mays
  Clone ID: MRT4577_182508C.1
cgcgccggcgcgctgcagttcctggagcgcgtccgcgacgcgttccggagcaccgcaggcgctcggcgggcgccagtccatcgagtcgctggtgccggccgtgcagcggtgcctggtgtcgctgcagaacatgcgctacgccgcgctggtgctcgatggcgccggcgcgggcgccggcgacggc

SEQ ID NO: 90468 - DNA, 4410 bp, Zea mays
  Clone ID: MRT4577_182509C.1
ttaagaagatctagggaaaaggtggggaaaatctatacgaagctcttcttctctttcccaagttgcttcgtcttcaccgtggtggctccattgaactttgcacatctttataaccttattccttgtaacacgagtcagtgtatccagaatcttgatgggatactcagcataagtcaaatcttcctgaacactaaggtcttccataggtaattgttcctcaggtaccctaagacatttcttcagctgagacacatgaaagacatcatgaacatccgcaaggtgatccggtaactccaattgatatgcaacctcacccactcgctttaagattaagaagggtccaataaagcgaggggacaactttcctttgactttgaatcttctcataccccggagtggtgacaccttcaaatagacataatctccctccttaaactcaagcagtctcctccgggtgtcagcatagcttttctgcctggactgtgcagttctcaaattctcccttatttgttgaacttgttcttctgcttcctgtataatctcaggcccaaacaactgcctttcaccagtttgatcccaatacaatggagtcctgcactttctgccatataaagcctcaaacggtgacatcttcaaactggcctgatagctattattgtaagagaactctgcatacgacaaactcttatcccaacttccaccatgtttaagagcacaagctcttaacatatcctcaagcacttggttggtcctctcagtctgcccatcagtctgtggatggtaagccgaactaaaattcaatcttgtatccaaggactcgtgcaacttcttccaataccgagaagtaaactgtgatccccggtctgacacaatcttctttggcacaccatgtaggcaaacaatccgtgccatgtacaactctgctaacttggctcctgaatatgtggtcttcactggaataaagtgggctactttagttagcctgtccacaatcacccatatagaatcatatccagcagacgtgcggggtaatccaacaatgaaatccatgtcaatctcttcccatttccactcaggtatcttcagtggatgcagtagtccggctggcctttggtgttcagccttaactctttggcacacatcgcacatagccacatgtgcagccacatctctcttcaatccataccaccaatatttttgcttcaaatcctgatatatcttagtactcccaggatggatagaataaactgaatcatgtgcatccttcaatatggtttctcgaagactatcaatatcgggaacacagatccgattcttgaaccatatcgtgccttgctcatcctctgtgaattccgggcctctaccctctttacgaatttcttgctccaaggtaggttccaattcaatagtcactccttccgtatgtgtaacaattcccaggttgagcctctcaaaatcttttgctaactcatcaggtagctggacaacgaaagcggagtgaacatgctccttccgactcaaggcatctgcaaccaaatttgccttgcctgggtggtaatgaatctccaaatcataatccttaataagctccaaccaacggcgttgcctaaggttgagatccttctgagtgaatatgtacttcaagctcttatgatccgtatatacttggcacttagttcccataacatagtgtctccaaatcttcagtgcatgcacaacggcagccagctccaagtcatgagtggggtagttcaattcatgcttcctcaactgacgagatgcataggcgatcacatgtccttcttgcatgagcacacatccaagtccttggccacatgcatcacagtaaatgtcaaatcccttctgtagatctggcataatcaatactggtggcgacatcaacctctccttcaattgatcaaagctttcttggcatttctcatcccacttgaattctcttcctttctccaaaagcgatgtcataggcttggcaatcttagagaacccttcaataaatctccgataatatcctgcaagtcccaagaaactccgaatctcagtaactgtagtgggcactatccactccataatctccttgaccttagcaggatccactgctattcctccattagaaataatatgtccaaggaatgacaccttgtcaatccaaaactcgcacttgctgaacttagcatagagttgattatctcgcagcttttgtagcaccaaccttagatgttgtacatgatcactttcattcctagaatagatcagaatatcgtcgataaacaccacgacgaatctgtccaaatactccataaacactttgttcatcaaattcatgaaataagctggtgcattggttaatccaaatgacataacagtaaactcatataatccatatcgggttgagaaagtcgtcttaggaatatccgagggtctaatcttcatctgatggtatcccgatcggagatcaatcttcgagaataccctggctcctctcatctggtcaaacaaatcctcaatacggggtaatggatacttgttcttcaccgtgacatcattaagtgatctatagtccacacacatccgttgcgatccatccttcttctgcacaaataacaccggtgctccccaaggtgaggaactcggacgaatgtaccccgcttcttgtaactcagttaactgcttcttaagctccttcagttcttctacagccatcctgtatggtcgcttagaaataggggcggttccaggtaagagatcaataacaaactcaacttctctatcaggtggcatccctggtaactcctctggaaagacatccggaaaatctctaaccacccggatgttgtcaccaacaaactcctcaggcataaagaacattgcacgcatggatgaggaggttactgcaatattaacttgaaatctttctcctttagtggtagtgagctctacgatacctctaccacatgctataacggcatttgcctttcttagccatgacataccaaggatcagatctatactgcttgactctaatattatggcagtagctccaaattctctacccataatggtcaatgtcaatctacgtgtcatttgattcgcctcaacaggccctttaggtgtaattactatcaggagttttctcatatttagtagtggtatttcatttgtgttggcatatctagcagacatgaatgaatgtgtagcaccagaatcaaataatatggttgcaggaattgcattaacataaaacataccaagtacgatgtcaccaccatcaggagtatcatcaacgctgacttgattcaccctggcagaattccccatcgggcaagcattagcataatgcccaatttgactgcacttgaaacatgtagggctagtcttctgtcctgtagacctcgtcggggtgccagtcggagtggcctgacgagtaggtgtccgtggagagccctgtggagcatactgaactgggcgtggtcctcctggtcgagtcggtgtaccctgtggcggtacgtagcggggacgaacactgctgctaccctgtccctgtgagatagccttcctcttcaaatcactcagttgaacacgcttgtgttcaatagcaagagccttatccagtagtctctgaaatgatggaaaggtgtgtgcaaccagtgcatactgcaagggtccattaagtccttcaataaagtgctcctgctttctttcatcctcagcaacttcctccggagcatacctcgacagctgaataaatttgtctctgtactcgctgaccgacatgttgccttgcttcaatgacagaaactccttcttcttgatctttatcataccagctggaatatggtagttcctgaactgtgtactgaactccgcccaagtaatagtatcagcagcatcgtgggcagcagtataagaatcccaccagtcagcagcaggacctgtcagacgacctgaggcataaagaactttctcccggtccgtgcactgtgcaatattcagcatcttctcaatagacttcagccaatcatccgcgtccagtggatcaggtgagcttgcaaatgtaggtggcttatgactcatgaactctctatgcttgtctcggggtggaactggtggtggtggtggaggcagtggtacttgttgttgctgctgctgctgttgttgctgttgcatttgttgttgcagctgctgttgttgtgccctcctttcctggcgtatctcctctcgctcttggcgcaactcctgtcgtatatcttctctttcctgacgcatctcctggcgttcttgctgcatctgggcacgcatatcagccatagtgtccgtcatttgctgcatcaccgccatctgagcagcaactagtgggtcaactccgcctggtggaggattaggaggattcat

SEQ ID NO: 90469 - DNA, 671 bp, Zea mays
  Clone ID: MRT4577_18250C.1
gtgcggcgctgaggcggttttcaccagaatcttccgcttccgcccgaccccgcgcgccgcggaccagcagtcatgtcgtgctcccacctctccaccgcctggtcctcctcggcgctcgccagcagcgcctccaccacccgtcggcgctccccccctcgctcggctctcctggcgcggcgttccctccgtgagctccgacacccgcatcgactccgtcaggaacacgcacaaaatcagggaggccatgaagctgctggccgccgccaaggtccgaacgcgcgcaggagggcgtccgctcctctctccctttctcgcaggcgctggtggaggtgctctacaacatgaaccagcagatccagacggaggacatcgacctgcccctcacccgcacccgcacccgtcaataaggtgcgcctcgagatgcatgaacggggagatgggcctctgctggacgttccagaacaacgatgttctcgaaagcggaaacccgcatcgatgacctcaagacagctgaggactccaatacaccgccgcaagagagtgacgaacaaggagaaggacaacttccagcttcacacctacatcccgctggaactgtgattatgtatgttactgaagtgattctccgcctaggattcctcatatcatttgtcgacctcggctactcgctc

SEQ ID NO: 90470 - DNA, 2310 bp, Zea mays
  Clone ID: MRT4577_182510C.1
ttaagaagatctagggaaaagatgggggaagtctatacgaagctcttcttctctttcccacgttgcttcatcttcaccgtggtgactccattgaactttgcacatctttataaccttatttctcgtaactcgagtcaaagtgtccaaaatcttgatagggtactcagcataagttagatcatcttgaacactaaggtcttccattggtagttgctcctcaggtaccctgaggcacttctttagctgagacacatgaaatacatcatgtacatcggatagatgatcaggtaactccagttgatatgcaacttctcccactcgctttaagatcaagaaaggtccaataaagcgaggggacaacttccctttaactttaaatctcctcataccacgaagtggtgacaccttgtggtacacatgatctccttcctcaaattccaatggtcttcttctgttatcaacgtagctcttttgtctggtctgagctatcttaaatcctcccaaattatacggacttgttcttccgcctttataagtagtcttgaccggaatgaaatgagccactttggttaggctatccataataacccatatagaatcatatcctttcgaggtgtgaggcaacccagtaataaaatccataccaatctcttcccacttccactcgggtatctttaatgggtataatagtccagcttgtctttggtgttcggccttgactctttgacacacatcacacttagccacatgtgccgcaacatctcttttcagtccataccaccaatacttttgcttcaaatcttgatacatcttagtgctaccagggtggatagaataatcagaatcatgagcttctttcaatatagtctcacggaggctatcaatctctggaacacatatccgatctttgaaccatatagtaccttgctcatcctccgtgaattccggaactcgaccatccgtgatcagatccttaatctcttgaatcttagcatcaccaacctgacctttacgaatctcttgctccaaggtaggttccaactcgatggtgactccttcactgtgtgtaacaattcccaagttgagcttctcaaaatcttttgctaattcatcgggtagctggacaacaaaagcggagtgaacatgctccttccgactcaaggcatctgcaaccaaattcgccttgcctggatgatagtgaatctccaaatcataatccttaatgagctccaaccaacggcgttgcctaaggttgagatccttctgagcgaatatatacttcaaactcttatgatccgtgtacacttggcacttggtccccatgatataatgtctccaaatcttaagcgcatgcacaaaggttgccaattccaagtcatgtgtggggtagttcagttcatgtttccgcaactgacgagatgcgtaagcgatcacatgtccttcttgcatgagcacacatctcaatccttggccacatgcgtcacaatagatatcaaatcctttctgtaagtatttgtcatcccacttaaactctcttcctttctccagaagcgatgtcataggcttggcaatcttagtgaatccttcaataaatctccgataatatcctgcgagccccaagaaactccgaatctcagtaactgtagtgggcactctccactccataatctccttgaccttagcaggatccactgctattcctccattagaaataatatgtccaagaaatggcaccttgtcaatccaaaactcgcatttactgaacttggcatagagttgattatctcttagcttctgtagcaccatcctcagatgttcctcatgttcactctcactcttattcttcaaatccataaaataagctggtgcattagttaatccaaatgacataatggtgaactcatataaaccatatcgggtcgagaaagccgtcttaggaatatctgagggtctaatcttcatctgatggtaacccgatcggagatcaatcttcgagaatactctagcacccctcatctgatcaaataaatcctcaatacggggcaacagatacttgttcttcaccgtgacatcattaagagatctataatccacacacatccgttgcgatccatccttcttctgcacaaataacaccggtgctccccaaggcgaggaactcggacgaatgtaaccagcctcttgtaactccgtcaactgcttcttcagttccttcaactcctctacgaacattctatatggtcgtttagaaataggggcggttccaggtaagagatcaataacaaactcaacttctctatcaggtggcat

SEQ ID NO: 90471 - DNA, 1209 bp, Zea mays
  Clone ID: MRT4577_182511C.1
atgggctacccctatagtgttagaagagagcactatagacatgatccttgtttcaaaggagaaagatttgaagttgaaattgcagtaactaccaccatcagactagtggcattcttagtagatgagaagtttgtgggtgccaacatccgtgcagttacggattttccggatgtctttccagaggagttaccagggatgccacctgatagagaagttgagtttgttattgatctcttacctggaaccgcccctatttctaaacggccatatagaatgtccgtagaggagttgaaagaactgaagaagcagttgacggagttacaagaggccggttacattcgtccgagttcctcaccttggggagcaccggtgttattcgtacagaagaaggatggatcacaacaaatcaaatgcaagttttggattggcaaggtgccatatcttggtcatatcatttctaatggtggaatatcagtggatcctgctaaagtgaaggagataatggagtggatagtgcccaccacagttaccgagattcggagtttcttgggactcgcaggatattatcggagatttattgaagggttctctaaaattgctaagcctatgacatcgattttggaaaaaggaagagaattcaagtgggatgagaagtgccaagaaagctttgatcaattgaaggagagactaatgtcgccaccagtattgattatgccagatctacagaagggatttgacatttattgtgatgcttgtggccaaggattgggatgtgtgctcatgcaagaaggacatgtgatcgcctacgcgtctcgtcagtggcggaaacatgaattgaaataccccacgcatgacctagaacgggctgccgttgtgcatgcacttaagatttggaggcactacatcatgggaactaagtgccaagtatatacagatcataagagtttgaagtatatattcactcagaaggatctcaaccttaggcaacgtcgttggttggagctcattaaggattatgatttggagattcactatcacccaggcaagacaaatttggttgcagatgccttgagtcggaaggagcacgttcactccgctttcgttgtccagctacctgatgaattagcaaaagattttgagagactcaacctgggaattgttacacatatggaaggaattaccattgaattggaacctaccttggagtaa

SEQ ID NO: 90472 - DNA, 265 bp, Zea mays
  unsure (1)..(265): unsure at all n locations
  Clone ID: MRT4577_182512C.1
gcccattatgctactctgcctagcagggacgtggtccatccacatttccattgagccaaaaatattgtacntgtgttttcatgtttccacacaagaacagaaaggggctaaaatatttttcctttttgtcaggattgttgcttgatcccagaatcaccattctatttggaaggcgaaggcggactttttagatacatagaaaaacgtttgaaggacaatggtcatatggttatccgtgttgcttaaggtgctggaccgaaactta

SEQ ID NO: 90473 - DNA, 1884 bp, Zea mays
  Clone ID: MRT4577_182513C.1
atgttctttatacctgagaagtttgttggtgacaacatctgtgtggttaaggattttccggatgtctttccagaggagttaccagggatgccacctgatagagaagttgagtttgttattgatctcttacctggaactgcccctatttctaaacggccatatagaatgtccgtagaagagttgaaggaacttaagaagcagttgacggagttacaagaggctggttacattcgtccgagttcctcaccttggggagcaccggtattatttgtgcagaagaaggatggatcgcaacggatgtgtgtggattatagatctcttaatgatgttacggtgaagaacaagtatctgttgccccgtattgaggatttatttgatcagatgagaggtgctagagtattctcgaagattgatctccgatccggttaccatcagatgaggattagaccatcggatattcccaagacggctttctcgactcgatatggattatatgagtttactgttatgtcatttggactaaccaatgcaccaacttacttcatgaatttgatgaataaggtgtttatggagtatttggacagattcgtcgtggtattcatcgatgatattcttatctattctaagaatgaaagtgatcatgaactccatctaaggttggtgctacagaagttacgagataatcaactctacgctaagttcagcaagtgtgagttttggattgacaaggtgccattccttggtcatattatttctaatggaggaatagcagtggatcctgctaaagtgaaggagattatggagtggagagtgcccacaacagttactgagattcggagtttcttgggactcgcaggatattatcgaagatttattaaaggattctctaaaattgctaagcctatgacatcgcttctggaaaaaggaagagaattcaagtgggatgagaagtgccaagagagttttgatcaattgaaggagagattgatgtcaccaccagtattgattatgccagatctacagaagggatttgacatttattgtgatgcatgtggccaaggattgggatgtcgaggtccggaattcacgaaagatgaacaaggcactgtgtggttcaaggacaggatatgtgttcctgatattgaaagccttcgtgagactatattgaaggaggcccatgacttggattattctgttcatcttggaagtaccaagatgtatcaggatttgaagcagaagtattggtggtatggattgaagagagatgtggctgcacatgtggctatgtgcgatgtgtgtcaaagagttaaggcaaaacaccagaggctagctggattactacacccacttaagatacccgagtggaagtgggaagagattggtatggatatcattactggattgcctcgcacccagaaaggatatgatgctatatgggtgattgtggatagattgactaaagtggctcacttcattcctgtcaagactacttataagcatggtagtagttgggaaaagagtctaccgtatgcggagttctcatataataatagttaccaagccagtttgaagatgtcaccgttcgaggctctatatggcaggaagtgcaggactcctctatattgggataagactagaggaagacagttctttcgacctgaacttattcaagaggtagaagaacaagtccgtataattcgggagaatttgagggtagcccagaccaggcaaaagagctacgctgataatagaagaagaccaatggaatttgaggaaggagattatgtttacctcaaggtgtcaccacttcgtggattgaggagagttaaagttaagggcaaattgtcacctcgttttattggaccattcagagtttttaggtga

SEQ ID NO: 90474 - DNA, 5683 bp, Zea mays
  Clone ID: MRT4577_182514C.1
ttaagaggatctagggaaaagatgggggaagtctatacgaagctcttcttctctttcccacgttgcctcatcttcaccgtggtgactccattgaactttgcacatctttatcaccttattccttgtaactcgagtcaaagtgtccagaatcttgattgggtactcagcataagtcaggtcatcttgaacactgaggtcttccattggtagttgctcctcaggtaccctgaggcacttctttagctgggacacatggaatacatcatgtacatctgacagatgattgggtaactccaattgatatgcaacttctcccactcgctttaagatcaagaaaggtccaatgaagcgaggggacaactttcctttaactttaaatctcctcatacctcggagtggtgacaccttcaaatagacatgatcaccctccttaaactccagtagtcttctcctattatcagcatagctcttttgcctggattgtgcaattctcgaattctcccttatcatttgaacttgttcttctgcctcttgtataagttcaggaccaaagaattgtctttctccagtttgatcccaatacagtggagtcctgcattttctaccatacagagcctcaaacggagacatcttcaaactggcttgataactattattataggaaaactcagcatagggtagactcttctcccaactgccaccatgcttgagagcacaagctcttaacatatcttccagcacttgatttgttctctctgtctgtccatcagtctggggatggtaggctgaactaaaattcaactttgtatccaagctctcatgcaacttcttccaaaatcgagaagtaaactgtgatcctcgatcagacacgatcttcttaggtactccatgtagacaaactatccgagtcatatacaattctgctagcttggctcccgtgtaattagtcctcacaggtatgaaatgagccacttttgtcaatctgtctacaattacccaaatagagtcatatcctgctggagtgcggggtagtccaacagtaaaatccataccaattttttcccatttccactcaggaatcttaagagggtgcaatagtccagctggtctttgatgttcggccttgactctttgacacacatcacacttagccacatgagcagcaacatctcttttcagtccataccaccaatacttttgcttcaaatcttgatacatcttagtgctaccagggtggatagaataatcagaatcatgggcttccttcaatatagtctcccggaggctatcaatctctagaacacatatccgatctttgaaccatatggtaccttgctcatcctccgtgaattctggaactcgaccttcagtaataagatccttaatctcttgaattttagcatcaccaacctgacctttacgaatctcttgctccaaggtaggttccaattcaatggtaactccttcagtgtgagtaacaattcccaggttgagtctctcaaagtcttttgctaattcatcaggtagcaaatttgccttgcccgggtgatagtgaatctccaaatcataatccttaatgagctccaaccaacggcgttgcctaaggttgagatccttctgagtgaatatatacttcaaactcttatgatccgtgtacacttggcacttagtccccataatgtagtgtctccaaatcttaagtgcatgcacaacggcagccaattccaagtcatgagtggggtagttcaattcatgcttccgcaactgacgagatgcataggcaatcacatgtccttcttgcataagcacacatccaagtccttggccacatgcatcacaataaatgtcaaatcccttctgcagatctggcataatcaatatcggaggtgacatcaatctctccttcaattgatcaaagctctcttgacatttctcatcccacttaaattctcttcctttctccaaaagcgatgtcataggtttggcaattttagagaatccctcaatgaatctccgataatatcctgcgagtcccaagaaactccgaatctcagtaactgtagtgggcactctccactccattatctctttcactttagcaggatccactgctattcctccattagaaataatatgaccaaggaatggcaccttgtcaatccaaaactcgcacttgctgaacttagcgtagagttgattatctcgtaacttctgtagcaccaaccttagatgttgttcatgatcactttcattcttagaatagataagaatatcgtcgataaacaccacgacgaatctgtccaaatactccataaacactttgttcatcaaattcatgaaataagctggtgcattggtcaatccaaacgacataacagtaaactcatataatccatatcgagtcgagaaagccgtcttgggaatatccgatggtctaatcctcatctgatggtatcccgatcggagatcaatcttcgagaataccctagcacctctcatctgatcaaatagatcctcaatacggggcaacggatacttgttcttcacagtaacatcattgagtgatctatagtccacacacatccgttgtgatccatccttcttctgtacgaataacaccggtgctccccaaggtgaggaacttggacgaatgtaaccagcctcttgtaactccgtcaactgcttcttcagttccttcaactcctctacggacattctatatggccgttttgaaataggggcggttccaggtaagagatcaataacaaactcaacttctctatcaggtggcatccctggtaactcctctggaaagacatctggaaaatctctaaccacccggatgttgttaccaacaaactcctcaggcataaagaacattgcacgcatggatgaggaggttactgcaatattaacttgaaatctttctcctttagcagtagtgagttctacggtacctcgaccacatgctataacggcctttgcctttcttagccatgacataccaaggatcagatctatactgcttgactctaatattatagcagtagctccaaattctctacccataatggttaatgtcaatctacgtgtcatttgattcgcctcaacaggccctttaggtgtaattactatcatgggttttctcatatttagcagtggtatttcatttgtgttggcatatctagcagacatgaatgaatgtgtagcaccagaatcaaataatattgttgcaggaattgcattaacataaaacataccaattacgaggtccccaccatcaggagtatcatcaacgctgacttgattcaccctggctatagaatatcccttgctagatcctggagtttgctgcctgttctgaactggagtagtagcaatcctctgtgggcagacatttgcatagtgaccagtcttcccacacttgtaacaagtagtgcctggactctgtcctgaaaacttcgtcggggtgccggtaggggtagcctgtcgaggaggtggagtcctcaaaggtgattgctgaattgggcgctggcctccgccagtgcgagctggtgtaccctggggtgaactgtagcgaggtcgaacactgctgcttccttgtccttgagatatagcctttctcttcaaatctcccagctgaacacgcttgtgttcaatagccagggccttatcaagcagcctctgaaatgatggaaatgtatgtgccactagagcatactgcagtggtccattaagtccttcaataaaatgctcctgcttcctctcatcttcagcaacttcatcaggggcatatctggataactggataaacttgtcgcggtactcgctgactgtcatgcttccttgcttcagcgatagaaattccttcttcttaatcttcatcaatccagctggtatatgataattcctgaactgtgtactgaactctgcccaagtgatagtatcagcagcatcgtgggcggcagtatatgaatcccaccagtcagcagcaggacctgtcagacgtccagaagcatataaaaccttctcccggtcagtacattgtgcaatattcagcatcttctcaacggacttcagccaatcatccgcgtccagtggatcaggtgagctagcgaatgtaggtggcttatgactcatgaactccctatgcttatcacggggtggaactggtggtggtggtggaggcagtggtacttgttgctgttgctgttgcatttgttgttgcagctgctgttgttgcgccctcctttcctgacgtatctcttctcgttcttggcgcagctctcgacgtatatcctcccgctcttggcgcatctcctggcgttcctgctgcatctgagcacgcatatctgtcatagtgtccgccatctgttgcatcatcctcatctgagctgcaaccagtgggtcaactcctgccggtggaggcggtggtggaggatccatctctactggttgtggctggggttgtctaaatatcctccgagtgtgtcgattgggcggtaaatcaattccaccaccccgcctggtattgaccatcagttttacactctgcagaggttgcacatctttacccacaagtcgtgttacccatctgccaaggggtcatgaatcccatacacctctaccaaggaagcgaggcagggtaacactacgaggcctttacaaagttccactagcttcagaaaacccgctacagtttctagggagcgcaatgcaggaatcccccgtctgaccgccattgtagcaaaatcaacccaagaacctccctacacagaccactcccctactgtccttgccccttttagataaggtagtcatccagtagctttcctcattagtcagccaagggcgtcccatatcacccttgtgggagcactattttcccgggtggttctccatgttccaattaacataatgatcttgtcatgaatcagtaaataacaaattgataataaaaagatgatcatgaataatgtgtatcttaatacccaaaaccacataaagcaatagcaggtactacccaaaagttcagtggtaaacaaggtataaagatagtcagactacggtaacctattgggtcccatcaaaattaatctatgcagatcataatgattaaaaagaacattattgggcaaatagaagtgatcaagggcacaacttggcttcaacgagctcctgctcaacagtctccacctgctgaacacctgggtcctcagtggcttgctcgtccacgattgcagtgaaggcgcgcctgtccacggcgtgaagcggccctacagcggtgatggactccggtgaggaattcaccacacaccgagggttcctctcccccaacggcgctgaggatacttccgccgcaccctaaaggagcctcccaaccaatgctattggcccaagcggcgtcggagacgagatccaaccaacggcgccgctatcctcctctccaattctcaccacggggaaggtatggcttcagggcgagggttcatcgcgcttgaggactgagggtgctacttatgagctgaagtgatggcatctgagaagtttgggagccgttcaactggctggctgagccgggcaaatcgcggcggtggttgagtacgcggagaaaaaggaggaagaggaacaggacttgcaaggtgactagctgtgggtctagcgggtgggtgtctgggccccg

SEQ ID NO: 90475 - DNA, 276 bp, Zea mays
  Clone ID: MRT4577_182515C.1
atggctggacccacgcatccgaacggtgatatattatctgctaacaaggggggatcaaaggaggatgggcttatgaatgatgacgggtgtgaatctactaacaaaacatagaggcataaaagttaacaggactccataacctcgttcaaccatgcaatcgaggtcttgactgagagtgccgcctctagtgaccatttgaggagctacttgattatagccaactgtgctgtacgagaaggatcaaggatcttcgataaagataacccatacggacct

SEQ ID NO: 90476 - DNA, 1890 bp, Zea mays
  Clone ID: MRT4577_182516C.1
atgtcaccaccagtattgattatgccagatctgcagaagggaattgacatttactgtgatgcatgtggccaaggacttggatgtgtgctcatgcaagaaggacatgtgattgcctatgcatctcgtcagttgcgtaagcatgaactgaactaccccacccatgacttggaattggctaccgttgtgcatgcactcaagatttggagacactacatcatgggaactaagtgccaagtatacacagatcataagagcttgaagtacatattcactcagaaggatctcaaccttaggcaacgtcgttggttggagctcattaaggattatgatttggagattcattaccacccaggcaaggcaaatttggttgcagataccttgagtcggaaggagcatgttcactccgctttcgttgtccagttacctgatgaattagcaaaagattttgagagactcaacctgggaattgttacacatacggaaggagttactattgaattggaacctaccttggagcaagaaattcgtaaaggccaggttggtgatgctaagattcaggagatcaaggatctgataacagagggtagaggcccagaattcacagaggatgagcaaggcacgatatggttcaagaatcggatctgtgttcctgatatcgatagtcttcgggaaaccatattgaaggaggcacatgattcagtttattctattcatcctgggagtactaagatgtatcaggatttgaagcaaaagtattggtggtatggactaaagagggatgtggctgcacatgtggctatgtgcgatgtgtgccaaagagttaaggctgaacaccagaggccagccggactactgcatccactaaagatacctgagtggaaatgggaagaaatcggcatggacttcattgttggattaccccgcacgtctgctggatatgattctatatgggtgattgtggacaggctaactaaagtagcccactttattccagtgaagaccacatattcaggagctaagttggcagagttgtacatggcacggattgtctgcctacatggtgtgccaaggaaaatcgtgtctgatcgaggatcacagtttacctctcggtattggaagaagttgcacgagtcattggatacgagattgaattttagttcggcttaccatccccagactgatgggcagactgagaggactaaccaagtgctggaagatatgttaagagcttgtgctcttaaacatggtggaagttgggataagagtttgccgtatgcagagttctcctataacaatagctatcaggccagtttgaagatgtcaccgtttgaggctttatatggcagaaagtgcaggactccattatattgggatccaactggtgaaaggcggttgtttgggcctgagattatacaagaggctgaggagcaagttcaacaaataagggagaatttgaggactgcacagtccagacagaaaagctatgctgatacccggagaagactgcttgagtttaaagagggagattatgtctatttgaaggtgtcaccactccggggtatgagaagattcaaagtcaaaggaaagttgtcccctcgctttattggacccttcttaatcttaaagcgagtgggagaagttccatatcaattggagttaccggatcatcttgcggatgttcatgatgtatttcatgtatctcagctgaagaaatgcctcagggtgcctgaagaacagttaccaatggaagaccttagtgttcaagatgacctaacttatgctgagtaccccatcaagattctggatacactgactcgtgtcacaaggaataaggttataaagatgtgcaaagtgcaatggagccaccacggtgaagatgaagcaacttag

SEQ ID NO: 90477 - DNA, 936 bp, Zea mays
  Clone ID: MRT4577_182517C.1
tcgcgggacgacgcacgcgtccggcgagatcgaggcagtgcgcacgccgtgcagccgtgcaggcctctcctccactcaaccgcgcgtcatggccatgttgcgcgagcatctcgacctcatccgcgctcacctcctcgacgacaaccacgacgccgtcagctccgatgactcggcgccatcgccatccccatcgccgccggggcgtaggccgctgccagcgctttccgtctcgctgcccccgaggccggcagtcgtcctgcagcagcagcacctgagggcggcggcgccgccgttgcagattcctcagcaggagcagcactgctgcccggaacccgaggaggacgatttccggcggtaccgcggcgtgcggcagcggccgtggggcaagtacgcggccgagattcgggacccggcgcggaagggcgcgcgcgtgtggctgggcacctacgacaccgccgtggaggccgctcgtgcctacgaccgcgccgcgttccgcctgcgcgggtccaaggccatcctcaacttccctaacgaggtcgcgttaagcaccgctgcatggtgggcgacgcctgctcctcctcctcagcccagcgcgaccgtggccggtaacaagagggcgaggtcgccgcaggagcaggacgctaggtgcatggttagggaggtgaagaaggagcggattcaggagcccgcaagcggaggggcggactacttctgggaggatgagtcgctgaagggggcgatctgcagcctgccgccgctctcaccgttgtcgccgcacccgcacctggccgtgccgcagctctacgtcagctgactgcctgacttgatgtcgtagcaagacagggacggtggtcttactcttacctgatgatagtcttctgagttctttgatatgctagaggagtatagctccaaatattctttcgttctttattt

SEQ ID NO: 90478 - DNA, 159 bp, Zea mays
  unsure (1)..(159): unsure at all n locations
  Clone ID: MRT4577_182518C.1
ccctctttcactcgcctccactcccccctcccttttgctgcccaggtaagtcagcttcggcgatggcaacaaaattcaagaagaaccggaagaagcgcggccacgtgtccgccgggcacanccgcatctgcaagcacaggaagcacccgggaggacgcg

SEQ ID NO: 90479 - DNA, 4494 bp, Zea mays
  Clone ID: MRT4577_182519C.1
ttaaggagatctagggaaaaggtggggaaaatctatacgaagctcttcttctctttcccaagttgcttcatcttcactgtggtggctccattgcactttgcacatctttataaccttattcctcgtaactcgagtcaatgtatccaaaatcttgatggggtactcagcatacgtcaggtcatcttgaacattaaggtcttccgttggtaattgctcctcaggtaccctgagacatttcttcagctgagatacatgaaatacatcatgaacatccgcaagatgatctggtaactccaattgatatgcaacctcacccactcgctttaagatcaagaagggtccaataaagcgaggggacagctttcctttaactttaaatctcctcataccccggagtggcgacaccttcaaatagacctgatcaccctccttaaactccagtagccttctcctattatcagcatagctcttttgcctggattgtgcaatcctcaaattttctcttatcattcgaacttgttcttctgcctcttgaataagttcaggcccaaagaactgtctttcaccagtttgatcccaatacagtggtgtcctgcatcttctgccatatagagcctcaaacggtgacatcttcaaactggcttggtagctattattataagaaaactcagcatatggtaagctcttctcccaactgccaccatgcttgagagcacaagctcttaacatatcctccagcacttgattagtcctctctgtctgtccatcagtctggggatggtaggctgaactaaaattcaactttgtatccaagctctcatgcaacttcttccaaaaccgagaagtaaactgtgatcctcgatcagacacgatctttttaggtactccatgtaaacaaactatccgagtcatatacaattctgctagcttggctcccgtgtaattagtcctcaccggtataaaatgagccacttttgtcaatctgtccacaattacccaaatagagtcatatcctgctggagtgcggggtagtccaacaataaaatccataccaatttcctcccatttccactcgggtatcttcagtgggtgcaataatccggctggcctctggtgttcagctttaactctttggcatacatcgcacatagccacatgtgcagccacatctctctttagtccataccaccaatacttttgcttcaaatcctgatacatcttagtactcccaggatggatagaataaactgaatcatgtgcctccttcaatatagtttcccgaagactttcaatgtcgggaacacagatccgattcttgaaccaaatcgtgccttgttcatcctccgtgaactccgggcctctaccctctgttatcagatccttgatctcctggattttggcatcaccaatctgacctttacgaatttcttgctccaaggtaggttccaatttaatagtcactccttccgtatgtgtaacaattcccaggttgagtctctcaaaatcttttgctaattcatcaggtagctgggcaacgaaagcggagtgaacatgttctttccgactcaaggcatctgcaaccaaattcgccttgcctgggtgataatgaatctccaagtcataatccttaatgagctccaaccaacggcgttgcctcaggttgagatccttctgagtgaatatatacttcaaactcttatggtccgtgtatacttggcacttagttcccataatgtagtgtctccaaatcttaagtgcatgcacaacggcagccaactctaagtcatgggtggggtagttcaattcatgcttcctcaactgacgagatgcataggcaatcacatgaccatcttgcataagcacacatccaagtccttggccacatgcatcacagtaaatgtcaaatcccttctgcagatctggcataatcaatactggtggagacatcaatctctccttcaattgatcaaagctctcttggcacttctcatcccacttgaattctcttcctttctccaaaagcgatgtcatgggcttagcaatcttagaaaatccttcaataaatctccgataatatcctgcgagtcccaagaaactccgaatctccgtaactgtagtgggcactctccactccattatctcctttactttagcaggatccacagctattcctccattagaaataatatgaccaaggaatggcaccctgtcaatccaaaactcgcacttgctgaacttagcatagagttgattatctcgtaacttctgtagcaccaaccttagatgttgctcatgatcactttcattcttagaatagataagaatatcgtcgataaacaccacgacgaatctgtccaaatactccataaacactttgttcatcaaattcatgaaataagctggtgcattggttaatccaaatgacataacagtaaactcatataatccgtatcgagtcgagaaagccgtcttgggaatatccgatggtctaatcttcatctgatggtaacccgatcggagatcaatcttcgagaataccctagcacctctcatctgatcaaataaatcctcaatacggggcaacgggtacttgttcttcactgtaacatcattaagagatctataatccacacacatccgctgcgatccatccttcttctgtacaaacagaaccggtgctccccaaggtgaggaactcggacgaatgtaaccagcctcttgtaactccgtcaactgcttcttcagttccttcaactcctctacggacatcctatatggccgtttagaaataggggcggttccaggtaagagatcaataacaaactcgacttctctctcaggtggcatccctggtaactcttctggaaagacatctggaaaatctctaaccacccggatgttatcaccaacaaactcctcaggcataaagaacattgcacgcatggatgaggaggttactgcaatattaacttgaaacctttctcccttagtagtagtgagttctacggtacctctaccacatgctataacggcctttgcctttcttagccatgacataccaaggatcaaatctatactgcttgactccaaaattatagcagtagctccaaattctctacccataatggttaatgtcaatctacgtgtcatttgattcgcctcaacaggccctttaggtgtaattactatcatgggttttctcatatttagcagtggtatttcatttgtgttggcatatctagcagacatgaatgaatgtgtagcaccagaatcaaataatattgttgcaggaattgcattaacataaaacataccaatcacgaggtcaccaccatcaggagtatcatcaatgctgacttgattcaccctggctatagaatatcccttgccaggggtctgttgcttgttctgagctggagtagtagcaatcctctgtgggcagacatttgcataatgaccagtcttcccacacttgaaacattgagtgcccggactctgtcctgcaaactttgtcggggtgcccgtgggagtagcctgtcgaggaggtggagtcctcagtggtgattgctgaactgggcgtggtcctccgggtcgagtcggtgtaccctgtggtgaactgtagcgaggacgaacactgctgctaccctgtccttgtgagatggccttcctcttcaaatcacccagttgaatacgcttgtgttcaatagcaagagccttatcaagtagcctctgaaatgatggaaaggtgtgtgcaaccagtgcatactgcaagggtccattaagcccttcaatgaagtgctcctgtttcctctcatcctcagcaacttcctccggagcatatctcgacaactgaatgaatttgtctctgtactcgctgaccgacatgttgccttgcttcaatgacagaaactccttcttcttgatctttatcataccagctggaatatggtagttcctgaattgtgtgctgaactctgcccaagtaatagtatcagcagcatcatgggcagcagtataagaatcccaccagtcagcagcaggacccgtcagacgtccagaagcatataaaaccttctcccggtcagtgcattgtgcaatattcagcatcttctcaattgacttcagccaatcatctgcgtccagtggatcaggtgagctagcgaatgtaggtggcttatgactcataaactcccggtgcttatcacgaggtggaaccggtggtggtggtggaggcaatggcacttgttgctgctgttgctgttgttgcatttgctgttgcagctgctgctgttgcgccctcctttcttggcgtatctcatctctctcctggcgcaactcctggcgtatgtcttctctttcctgacgcatctcttggcgttcttgctgcatctgggcacgcatatcagccatagtgtccgccatttgctgcatcaccgccatctgagcagcaaccagcgggtcaactccgcctggtggaggattagggggattcat

SEQ ID NO: 90480 - DNA, 810 bp, Zea mays
  Clone ID: MRT4577_18251C.1
ctttggtttcttttcacctggcgagtggtcggcacagttgccggcccgccccttcaagttacgcatggacggatatatgggacctgcaccacaccagcttggcaagctcttgacacggatggcgggacagaatttatatggacgtggatcaagagtgcacgcgtctttcagggattagctcccttgtcgatgtcgccggcgggcttggcggtgctacccagaccatcgcgaagcgttcccgcatgtggagtgcagcgtgttagatctcccacacgttgtcaccaatgctcccactcacaccaatgtgaagtacattgctggtgacatgtttgagagcattccgtcagcaaacgctgttttcctcaagtggattctgcatgactggggtgatgacgaatgtgttaagatattgaagaactgcaagaaagccatagcatctcaaggaggaaaggtggtaatattggatatagtggttggagcagggtcgtccgacgagaaacatgtggagatgcaaatcttgtttgatctctttatgatgtttatcaatggtgccgagcgagatgagctagagtggaagaagattatttttgaagctggatttagctcttacaagatcatacctgttctaggtgttcgatcgattatcgagatctacccatagaaatctactatgtaactgaagtgtattgtatgcatgaataatctgcgtgtgaagaagtgttttgccacttagaatgatgcagtcctcaacaacgtgtaataaaatgatttgatcaccgctggaaggaaggtgtgcgatggtgtatttat

SEQ ID NO: 90481 - DNA, 312 bp, Zea mays
  Clone ID: MRT4577_182520C.1
cggacgcgtgggttgtgattgcgatttttccgtcgaccacgagcactcccaaaggctccttgggctgatctatcatgatgcactgcaacaaatacttatttttcaatagtgatgagatgcattctgactaaaatttgtatcatttttaattttttcatttcaagacattttaggattaattaaattaaggattttcaaattttcattatttgtatatagtgtctaaatgatcataaacctggcttattttttttttctaaaatattgtatattttgttaaagataattttttatatataataatataatttt

SEQ ID NO: 90482 - DNA, 232 bp, Zea mays
  Clone ID: MRT4577_182521C.1
acatagaaaagtggattagggtgaacgtatgtttaaattctaactatatccacttctcacacatatggattgctaaacatgcccttaaaaaaaaaaaaaaaaaaaaaaaaaaaaaaaaaaaaaaaaaaaaaaaaaaaaaaaaaaaaaaaaaaaaaaaaaaaaaaaaaaaaaaaaaagaaaaaaaaaaaaaaagggggggcccatatggaggtccaagcattagggaggcggg

SEQ ID NO: 90483 - DNA, 229 bp, Zea mays
  Clone ID: MRT4577_182522C.1
ttttgagccacactcacgtctccaaccatactgctacacatcaaaggaagggatcgagactatactgcctcttctgaaggccttctaccatgggcggatcgtaaacatctgctcccactggtgccatgtaacgcttactccaaacctggagctcaagcaccaacttaactacattgacaccctcaccacagagaggatgaatagcctgctggacatgttaataaatgac

SEQ ID NO: 90484 - DNA, 313 bp, Zea mays
  Clone ID: MRT4577_182523C.1
cccactcacaccgaagttgtgaactacagcttccatcgtatgatgtcgaggaacaggaacaacagggcaaagaagaaggtgctgtgagcgcaacactggtcgtcgcaccgccatcatctgtggtgtgagtgcatgcagcgaagaagcatgcttgccatgcacgtgcagccgaaaaacttacacgccgcgcgctgtcgccgtgtgagcagggatgcttctctgatgcactacacagaaggcaagggcttatacagaacgggaacacataagccctttcttccagggctccacctctccatctaaatcatacgat

SEQ ID NO: 90485 - DNA, 140 bp, Zea mays
  Clone ID: MRT4577_182524C.1
gccacaggtcctgttcaagagcaagactcataggcagacgcagtgtgacttcggctacggctgcatgacgttttccacgcaggacgccatgcgggtcgtcatcggtgggatggtcgtcacggtgctcaactcccttaact

SEQ ID NO: 90486 - DNA, 647 bp, Zea mays
  Clone ID: MRT4577_182525C.1
ccaggatcggatatgattttgaagaatttattagaagtacgtacgtagtttacatttatgcatggttaaccttgcaaacaaaacttgaagtaaatgtttaagaaacttatatatatactgctcgtatatatgtacagtcaacgacatgcatcactgatccgtttctgatgcagatcatggacgacgacgacgaaggcatgcatgcaagagggcgtttcagctagcgcgcgcggaggatggtctggagcagtatctgattgaacgtgtcgaccggccctggcatgcaccagtgcaagcagtcgtgctgcaccgggcggtggtctcccgtgttattgccgccggcggcggcgaacgggttcttgcgcatgtacggacccgggtggccgtccggccgcatgttggccagcgccgtgacgtccagcgccgcgaaacgcagcggctgggcactatcattggacgaggaggacatcgtcgaggcggcttcctccaccgcctccacgacgatcttcctcatctccgtctcggtgtatcctagctccctgtcggccttcttcttgcacggcgcgccctcgttccagtgcccctcgaagtgcgacggtgagaacgtggtgaacgccactagctgcggcttcttccctccggcgcca

SEQ ID NO: 90487 - DNA, 439 bp, Zea mays
  Clone ID: MRT4577_182526C.1
aggttaaaaaccccaaaagggtaagggcagtattataattccataacccgggaatgagcttccccccctgtttatattgagctgcacaagtgcaacacaaaaaatgggcccatatttacactacaaaggggccgcttttctaaaaataaggtggccactaaaaggcaaaattggtcagggggttacaaaaccttggttcactaaaagtctgacaaaagtcgttgttcctgccaggggtttggcccaaccaaaaaccctcaggaataaacatttctgtctgaaaaaaatgggacaggcttcaaactgaatgtttggcataacccgggtgaaacaacctacaattttaacacaaaaccaaggggactgtgatcactggcaaaaattttcggaagaatatatgaaacatgccctctttttgggattgattcggacacaaaaa

SEQ ID NO: 90488 - DNA, 2433 bp, Zea mays
  Clone ID: MRT4577_182527C.1
aattcggcacgaggctgctcacctaccacgcctccccgtcctcctcctcgtcctcctggctgcccatgtcgtctccacctccgcccatgccgagcctcctcttccgagcccttacaacacctccgcccatggcgagcctcctcttccgagcacttacaacccatccatgtgctcggaatcgttccggtgtggcggcgtcgagatccgctacccgttctatcttgccaacgcaaccgccgactacagcgggaactactactcctgcggctacaccgacttgagcgtttcctgcgaactcgaggtcgaggggccgtcgacgacctggacccctaccatccgtctcggcggcgacaactacaccgtcaagaacatctactatgactatcataccatctcactggcggacagagatgtgctcggaggcggcggctgccccgtcgtccgccacaacgtcagcttcgacgagacgtggctgcacaacgccagcgccttcgacaacctcaccttcttcttcggatgccactgggggccacgcgatacactgcctgaatttgccggcaacaacatcagctgcgccgggttcagtactccaactgtcagtggaggctccttcgtgttcaagcctgaagatcttgacgaacaagaggagcaggagttggcttcacactgcgacgaggttttctccgtgccagtgggaagcgatgctctgcgggcgaccgacaccttcagcctcacagggtacgggtacggcgacctgctttggcaggggttcgagttggaatggaatcggacatcggaggatcagtgtggccagtgcgagggatcgggctcgggctcgggctcgggctcgggcggatggtgcgcctacagccagaagagagaattcctgggctgcttgtgcagcggagggaaggtgggcaacccgttctgcaaaccatcgaagtcaaaaaggaaagcaagaattcttgctggtgccctgggtggtggtgctgctgcgctgcttgttggtgctgccatatttttgttcgtcatcatgcgcaagaggaagcagaagaagaaagtgatcaactcgtcttcgaagctcctcaagtacagcggctctggtgggaccccgcgttcgcgggttggtgacatggagtccggcagcatcgaggacccgccaacgcaccacttcacctacgaggagctcgaggaggcgaccaaccgcttcgacgaaagcagagaactcggcgatggcggcttcggcaccgtctacaaagggtacctcagggacgggcgcgtggtggcggtgaagcggctgtacaacaacgggtaccggcgcgtggagcagttccagaacgaggcggccatcctgtcggggctgcgccaccccaacctcgtcatgttctacggctgcacgtccagccacagccgcgagctccttctggtgtacgagttcgtggccaacggcacggtcgccgaccacctgcacgggcagcgggcccccgagcgcgccctctcgtggccgctccgcctcagcgtcgccgtggagtccgccgcggcgctcacctacctgcacgccatcgagccgcccgtcgtgcaccgcgacgtcaagaccaccaacatcctcctggacgccgactaccacgtcaaggtcgccgacttcggcctctcccgcctcttccccctcgacgtcacgcacgtctccaccgctccgcagggcacgccagggtatgttgatccagagtaccaccagtgctaccagctgacggacaagagcgacgtgtacagcttcggggtggtcctggtggagctcatctcgtccaagccggccgtcgacatcacccggcaccgcagcgagatcaacctggccagcatggccatcagcaagatccagaagtgccagctggaggagctcgtcgacctcggcctgggctacgacaccgacccggccaccaggaagatgatgacgatggtcgcggagctggccttccgctgcctgcagcagaacggcgagatgcgcccgccgatcaaggaggtgctcgaggtgctcaggaacatccagggcgagtgtctgacgtcggggaaggatggggacaagagcaaggacgggcccttctctcccaccacggttcacgctccgtgggacagcaggtccacgacgcccaacaccagcagggactaggatagttagtgcttgaggactgagaccggccgaggtttaattcgtgtctgtattgctgctgtgtgactgctaggcatgccatctgttttcaggcttcgtagttagttcctggtgatgtaaatatttgttttgttggtgctgtcaggacagagggaatgcacatacatgtgtaagagtggcgaatggtattatacatatatatacacgggtacttactgaataaataaaaaaatgtcgcttgtgcctaaaaaagaaacacaaaagcggcc

SEQ ID NO: 90489 - DNA, 939 bp, Zea mays
  Clone ID: MRT4577_182528C.1
gaccctcgaggttggccgggagggaaaaaaataccaaacgcacgcaaagcccacgcacctcgacccgttcccaggccatcacaccaccagcaccacctcgtcccccgtacctgcctcgccgccgccgccgcctcctgccggcctccgatggcgaagacccgcaagcctccggcccctccttctccgccgccgccccccgcagaaacgccatccccgcagcggcggcgcaagaagaagggccgcccgtccctcctcgacctccagcgccgcagcctccgcctgcaggcccaaaaccctagccccgccgcctcgcccacccgccgggaccccaatccctccgacgacgatgaggacgggaccgggagcgggcggcggcggcagaagcgcctcaagagcgtcctctccggcgtcgtcaaggaggagcagggggaggggaagaaggatgcagcgaaagcgacggggaaagaggacgctgcgtcggatggtgggcccacggggactcccctcccagacaaaaagttgctactcttcatcctcgataggctccagaagaaggatacttatggagttttctcggagcctgtcgatgcagaggagcttccagattactttgacattattgaccatccaatggacttctcaacaatccgtgagaagctgttgaatgactcgtattctaagttggagcagtttgaggatgatgtgtttctactcacatcaaatgccatgtcttacaattcagctgatacaatctacttccgacaggcacggtctattgaagctcttgccaaaaaggattttgagaacctgaggcaacccagtgatgaagaggaacccaaacaccagctcgaaggggtaggccaccgaagaatcccaagacagagggtgatgtgtcaccagacctatctaatgtgaaagcaaataaacctgaagacaatg

SEQ ID NO: 90490 - DNA, 745 bp, Zea mays
  Clone ID: MRT4577_182529C.1
tgaattcggcacgaggggattcggccctatctcccctaaacctagattcaacgcatcacctccttcctcgctcctgtggtacccggaggcggaggcgccttgtgccgtcttgtcccggccgagaacgtgggacggttccgcgcgggctcgcgcggctctctggccaccagaccatagaggatctctccaaggtcacttcctcgctcatgtcacctaagggcgaccaagtctaggcggaggaggcagcgggtcgagggtcaccgaagaggtgatgaatggtgtgcgcccccgtctggaacaacttcgtgctccgtacacagaggacaatgtgctgtgggtggtgttgtcggccatgtacaacatgaggtgtgtgggcatagggttgtccgagaacgacctcattgtgggagtcgactgcgtggtgtaggaggcagtggtcctaggagacttcccaagaattcgccacccaccttcacacaagaaattccagcttttcacatttgatacaagaccgcaagagacacgcaacccccgaatcctctgcatccagcacctcatcaaccatcccggaatcataaaagcatatggaggaactatgtataggctacaaagaagcataagaagcatttttatagcagaagccaagtgttctgatgattttgttttttcaattgtgttttctgttattggttcagcatgcacatatattgacatgatttatggcatggcatctgccatctttgtt

SEQ ID NO: 90491 - DNA, 870 bp, Zea mays
  Clone ID: MRT4577_18252C.1
ataagagagatggctttttcaggcaactctttaaggagaaaaacgatgagaaaaaggaaggcagcacaccaagcaagaaagaggaagatgataaaggccataaaaatgcagatgatgataatttctttcgcaggcttttcaaggataagaatgaagaaaagaaagggattgttcatgacaggaatgaagatgacaagtgtgaggaaggtgataaagaaaacttcttccgcaaattatttaaggataaacatgaggagaggagaactgagggacctgataaaaatgatgattatggtaagggaagtagtggtatcgaagaggaagataatccagagtttttgtcattccgtaggttgtttagagtgcacccagaagattctaagagtgggcacatagaaagcagtcaatctaacaatctttctgaggggagcccaggatctgaaagcttttttaagaggctattccgtgatagagaccgctcacttgaagattctgagatttttgggtcaaaaatggcaaaagagaaacaccctggtactacaggaatcaatgagaagcaaagtggaaaaccaccattaccaattaatgcagtagcagagcttcgaaaaggttcttactatgcttcgttggaacttgttcaggctttatgtgatacatcttatggcctggtagacatatttcctattgaggatcgtaagattgccctccgggagtctcttacagagatcaatagccagattgcttctgctgaaaaaaatggaggagtatgctttccgatgggaaagggcatatatcgagtggttcatatacctgaagacgagtctgttcttctgaattctagggagaaagctccttaccttatatgagttg

SEQ ID NO: 90492 - DNA, 165 bp, Zea mays
  Clone ID: MRT4577_182530C.1
tgacaattcttcccttaatgctttcttttctcctatatgctctcctatcttccggggggacttttctattattttctggcgtttactattgcgataaaaccctactctacaaccatattttgcttcaacaagcaacatgttgtatgcaacacacctttatcgccc

SEQ ID NO: 90493 - DNA, 234 bp, Zea mays
  Clone ID: MRT4577_182531C.1
taacccaactaaaccatctttttcatcgaaaaaacccaggttaaccccaaacataggtggtttcaatttttccatgggacactgataacaaaattcaaggggcttgtaacatgggtaggaaaatttaacgatggaacaaaaattccaaattctatcaaagcttgcctgaggtaggttccacagtagcagaacattaagttgtttgtgctcaacggtagcgggggagggaaaggg

SEQ ID NO: 90494 - DNA, 842 bp, Zea mays
  Clone ID: MRT4577_182532C.1
attcttagaaattttattgatttttgcgggcagttttttccactgaaatatctgctacttttcgtcgtatcagccaatctcaatcgttaggctgttgctttcagtgtgcaaccgcccgttagaatgattgattgaattgtcatatacttacacactgttacatacaacaacacggcatctgcaatggaatcgtgcgtctgatttgtttgtttggttgtaggctggagtgggcacccggtctgcgtgaagcggtaccatttcatcatcgagaacgacagtagccacctttctggccgccggcgcacctgctgcctccgctgcggaacacccatggccgctaaaggcttttgtggaccttgagtggtgttaaatggatcttgtcgctgaccactgatgtgatgttaatctgttctccttgcagttgcacccatttcccattgcctgatgtccatcttctgttcgaagcatatcagacttttcatggctgcctaataaacaccataacaaaatcctagcaaatggtgccagaacagaggagctggcttctaacatatccaaatcgtatcgaggacatactcctcacatttccagcaccttgcggcagccgcgagctcgagctagcgccagcctcgcgccctaacccgcacggcaccgctaggcggcggccccgatcagcgcgattgcttcctggggtccaatgaggcgtggagagcattgggatggcgtcgcgcgtggagctgctcgaggaaggaagggggagagagagagagagagagagagagggcaggctgaggccggtgcgggaagaatcagcaatatcccggccggctcgaggtcccaat

SEQ ID NO: 90495 - DNA, 1502 bp, Zea mays
  unsure (1)..(1502): unsure at all n locations
  Clone ID: MRT4577_182533C.1
tgatttgtttgtttggttgtaggctggagtgggcacccggtctgcgtgaagcggtaccatttcatcatcgagaacgacagtagccacctttctggccgccggcgcacntgctgcctccgctgcggaacacccatggccgaattgattgcaagcagttcatcaaacattatgatgagcatgctctgcggactccttcaaacccattcctgctctgtgtgaggtgctccattgaactgcttgatcacccaaaagattacacgacacctccagaagaacttgtacttctaccagcaagtgctaccctaggtgacctgaaagtacaggcttcaaaggctttccaagaaacgtacctgatgttccaaagcttccagactgaacagctccctgactttccaaacttcagtgatacaacccccgtgaagcatgtgcttggatcaggccagttgcttcgagtaaggggacgttgcactggggattacaggagaattgtacagttcaggatggagaggggtttggagaactggacggtggactgctcatgtggggccaaggatgatgatggggaacggatgctagcttgtgacatatgtggagtctggcagcataccaggtgctcgggaataagtgattttgaggaagtccctgaaaatttcatctgcagaaagtgtgctagtccacgcaagggagacggacgtgggggtggaggtagcaacggtggtggaacaatggaggttactgcgtctgggaggtgcaaggatgaaattggagcatcagttggtggagcaggcaagtatgggcgcatggcaacagttggatgactgtacataatgtagtgaaacgtaaatagtgagatggagagtagtaaggtgcacctaaaggcttttgtggaccttgagtggtgttaaatggatcttgtcgctgaccactgatgtgatgttaatctgttctccttgcagttgcacccatttcccattgcctgatgtccatcttctgttcgaagcatatcagacttttcatggctgcctaataaacaccataacaaaatcctagcaaatggtgccagaacagaggagctagcttctaacatatccaaagcgtatcgaggacatactcctcacatttccagcacctaggcagcgattagggctgcggccaccggacgggcgcctggacccagccaccgaccttgcggcagccgcgagctcgagctagcgccagcctcgcgccctaacccgcacggcaccgctaggcggcggccccgatcagcgcgattgcttcctggggtgcaatgaggcgtggagagcattgggatggcgtcgcgcgtggagctgctcgaggaaggaagggagagagggaaagaaagggagagagagagggcaggctgaggccggtgcgggaagaatcatcaataacgggagaanaaaaaaaaaaaaaaaaataataaaaataaaataaaaaaaaaaaaatacaaaaaaaaaaaaaaaaaataaaaaaaaaaatat

SEQ ID NO: 90496 - DNA, 705 bp, Zea mays
  Clone ID: MRT4577_182534C.1
gggaccctcgaggccggccggagatcaatattctctccattatgaagaacgtgcttatcaactaccaatgatgaactctttgaaggagatgtgtgttctgactcaagctcccgggctaagtctgtagtctcgctgagcgccgaccactcctccgcctgtgctcacgccacaaatgactagcgactcttctatgttgacaggcgctccgtggacagaccatgatacactactgcgaaggtccgacgctagcgacggaggctccacgcaagtaccattccaagacacctactcgatggtgcatcatgcatcgtccaacatgatcaaccaaaattacttctatcactacaactacaacaggatgtagaacatgacactactcgaacagactacacagagtgaacgcttcgtatagacaactgtctgaaatagcaccgacgacctactatacgatgaaagtgcaacgacctgcagtcgacactcatacaatggaagctcatgacacttgactagaacacaatcggagatcctaaacaatcacccaactaacgtccttggtacattcagctatgactatggacccggaatatctcatctcacacatgacagatcctgtggacgctaactagtatctaggagaaatatttgtactcctcaaacatctgatataccgaataactaaacaacgccgaattccaagacatgaac

SEQ ID NO: 90497 - DNA, 431 bp, Zea mays
  Clone ID: MRT4577_182535C.1
cgcaaactttgtcgacgaggttggggcggaagtcgaggaggttctcgaggacagcgaggttgttgttgaacacgtcacgcgataccgccgaggcgtggtcagcgtcgcggagctcccggagcatcagcacgtgtgcgcagaacccgagcgagagcgcgccggtggccgtgcaggcgccgagcacgctctgcacggtgtaggcgtcgggcctgtcgcgcttgagtgcgtcgaggagcaccagcttccggaattgctttgtcgcttccatctggaccaccgtgtagaggctccatttccagagtactgcacggtcgggctccgattcggaaccagagtcggtaacggagccgacgcggaaagagtcggtggcggtgcagtcagacgagagcgcgatgatgcgctcgtcgtcgtcgcagggcgaggacgggacg

SEQ ID NO: 90498 - DNA, 340 bp, Zea mays
  Clone ID: MRT4577_182536C.1
cccacgcgtccgtccaaacctgacattaatttattacaagcgtcagtatacatcttgcatgtggtcataggcaagggccggctggaaacttactaaatcatcttcctcgcgctcctcgcgaccgagtcatgccttcacaccgtcgacaccgccgctttatggttttgctggggcaagtgcagagctcagtgcgcacggtcaagctcacacaggacatgggccgcgtgcatgagctcatgcagcctctgctgctaagagtgcaactgcttgcccaacgacatccatgactgcccctgctacagaaacattttcaccacctgtcccaacaatatgcccaagt

SEQ ID NO: 90499 - DNA, 596 bp, Zea mays
  Clone ID: MRT4577_182537C.1
cggacgatgccaaggtggatgcgtcgggcacgccctgggacggacccgaccgcatgaaggacctcgagcccttctccggggagcccccgagctacctcaccggagagctccccggcgacgacggctgggacaccggcgggctgtgcgccgaccccgacaccttcgccaagaaccgcgagctggaggtgatccactcccgctgagccatgctcagcgcggtcgggtgagtcttccccgagctgctctcccgcaacggggtcaagttcggcgagggcgtctggttcaaggccggctcccaaatcttcagcgagggcgggctggactaccttgggaaccccagcctgatccacgcgcatagcatcctcgccatctgggcctgccagggcgtgctcatggtggccgacgaggggtaccgtattgccggcgaaccggctcagtagaagtcgtcgacccgctgtaccctgacggcagcttcgaccccctcggcctgggcgacgaccccgaggccttcgccgagctgcaagtgaaagagctcaagaacggccgcctcgccatgttttccatgttcggcttcttcgtccaggccatcggcaccg

SEQ ID NO: 90500 - DNA, 512 bp, Zea mays
  Clone ID: MRT4577_182538C.1
gtcaactgcggggtggtgctgttcgaccacctgctgtggatgctggacaacgccgtcgacctccacgacgacgacgacgccatgagggagctggcccagctctacgcgtgctgatcgaacgtcgtacgtcgcgcgttcgtcagaatacatatatacatccacacgtaaacacgaccactagcgtcacatgcatgtcgatcgctcggtccgctttggttcctctaattatcagtttctattcatcctcgattgacttggaaggcgggcggtttcgttttcttcgctgcttttaacttcttggcgccatgcatgcatggcttgtaacttcgagatcgatttgtgtgatgcagtttccctaaggtttccttgtgccggtctcatgtttgcgttacagactggccggcgtcagccgtcaggtactcagatctagtttgttttaactttactgtcactgcactgtttattttactatacattatattgcgacctgcgtgtgaggagacaaagaaaaa

SEQ ID NO: 90501 - DNA, 283 bp, Zea mays
  Clone ID: MRT4577_182539C.1
cctccttaccgcggccgtgagggagaacgcggctcggccgtagcggagctgcgagttacagaatgtctgaaggggacaatgggggagaatccgtccatgggaaaccttcggtggtgtacagatttttcacaagacttggacagatttatcagtcctggctagacaagtccacaccctacacggctgtgcgatgggtcgtgacactgggcctgagctttgtctacatgattcgagtttacctgctgcagggttggtacattgtgacctatgccttggggatcta

SEQ ID NO: 90502 - DNA, 120 bp, Zea mays
  Clone ID: MRT4577_18253C.1
ctagctactgtcttacacacctcaacaggtacctcctatagctatgcccagaatgtaactaggtaaggagagtaagacagtagctagcaaccctggcccaagggttccggactcggagcg

SEQ ID NO: 90503 - DNA, 1218 bp, Zea mays
  Clone ID: MRT4577_182540C.1
ggaatgctgtttcatcctttgcacagttgcgtcagcaaggcatccttggtgctaaacatggggagaacccaggagctaattttcaggctatgaatgtttcccacaataatgctaatcacagtggtggccgtgtgttacatggaagtccagcacctacaaacattcagcagcaaaattactctcttctacatcaaatgcaaacctcgaggcatatggatgttgatccaggcagtttatctggaaagacgacaaaacctgatattggttctgatgctgcacagattgattggaattctggccagagatttgctcatgtaaccaataactcaaccaaatcgtctgcagataacattggaagccctggtgtcccagggtcattcacatcggacttgaaaatgttgagttttgcttcaaggaacgaggagagaaatccaaacataccttctcggtttccttccggagagtgcccgtctcctggtatgattaccacacaagatgataatcagaatcaagttcagcatatgggcacaggtgcaatgtcaaattctgatgaaagaagtgagaggccgaggataaaccctcaaatggcaccttcttggtttggacattacggaaactacagaaatggtcagagtgttgctacgcttaatgctgctacgcttaatgcgcagaagcccacggctttgccatttaattttccgaaagcatctcggaacaatgaaaataatagccatgctgaaaatagagttgaacctagccaatctgttaggcctgggcatcatctcccatcagcaagaatggaagctttggttccttccaatgtaaaagtgtcttcaatgatgagaaggcctaagaagcgtaaaactatggactccacacttgtttcttggcataaaataattgaaagcccacgaaaattgaggggcatcagcacacctgagatggactgggcttgggcagctaaccggttaattgagaaggatgaggcagaaactccagacgatgctcctttaaattatttgccgcggaagaggctaattttgacaagccagttgatccagcaacttctccctgctataccagcgaccattctgagagcacaagctgtgtctgcttacggaagtgcgacatacactctatcaatgttgacactaagggatgcatgcagcatggcatcatcatcatcatataactcttgctcacctgtggaggatgaaa

SEQ ID NO: 90504 - DNA, 625 bp, Zea mays
  Clone ID: MRT4577_182541C.1
caatccggtcctccacttcgtccctccccagcccagaaaccctagaccgtcgctcgcctgctttccttccccgacgcgacaggcgaatccaaggtttcgcggcggtcgcggccctagcacgcgctggatctgacgcggcagctcccggcggccgcgtactactgcctgctcttcgctgcgtcggcggccgtcctcgggctcctcggcggcgtcgcgcgctatatgcttccccggaagcgggagatcgtcgccggcgaggtcgaggacttgcagaagaagacccgtgccggggagggcgaggccaccagggaggaaggagacgcagccatggctgggagggggaacgagatcgacgaggacctgcacagccgccagctcgccgtctatggccgcgagaccatgaagcgcctcttcggctccaacgtcctcgtctctggactccagggtctcggtgctgagatcgcaaagaaccttgtccttgcgggtgtcaagtctgtaaccttgcatgatgatggtaatgtggagctgtgggacttatcaagcaacttcttcttctcggagaatgatgttgggcaaaaccgagcttcagcttgtgtacagaaactacaacagctggaacaacgct

SEQ ID NO: 90505 - DNA, 225 bp, Zea mays
  Clone ID: MRT4577_182542C.1
gagattcggagcagaccgagagcggccgaccccgccgactggtagactggatatactcgccggtggctttagttttttttttcaaaaattaacatgagccgtgggggtagtgccggcgggggacaaaaaaatctgtggtctctcttgggaagcggtgagccccccataccagcagtgggacccgctgcgagtgctccacctattgttaaaacatttgctgggaag

SEQ ID NO: 90506 - DNA, 2150 bp, Zea mays
  Clone ID: MRT4577_182543C.1
cattgggtacctcgaggccggccgggaacgtgcggggagcgcaatacgccgggccgccggctaagcgggaggcaaaggcgaggatgttggggtcgcgccggtggcagtctccggctgatgctcctgcggccaccgatgacttggaggagggcactggtggcgtcgggggcccgtccaggcggcctctgcgccacgggctgcaccgcgcgtcgccctacggtggtgccccccgccggtggctctccaagctccccgtgacttcgaggatattccccaccatgccacgcgaccgcgcggcctcaggcaataatcaagaggttcattgtgaaccactagaagttattcgtgaaagacactccacagaaccaaacatcaatgctgcagctattctaccatcaagacctgtgagcaatacatttaacctgcttctggaaggtgacatgaatccaagtcatggcaatgggcttgctgaaatagagaacataatcaaccagagatatttttctagggatgagacactacgtcttatagagatcatgcggtcaaggacttctgattttactgttgaagaccagagacctccagtatctactgcaaaaggttttgaaacaacattttttacacctgctaaactgatcgaggctcagccatcttggaggactgatatcgttccatcatccaatgtgcatgatattggttcttcgccagttgaaattgccaaagcttttatggaagcgcagacctcagcttctgtacacgagtccaaaaagcggaaattcagagctttgagtcatggagttgcggctgacacaccaaccatggcctctccaccaaggaccttgccaatcactaacgaggatgttcccaagttcacctttgggtcatccagcatggccaacaaactcgttttctccttcaactccacaagcagttctcctggtgctggtggaacagaaccaaccttcaaatttggatctgattatagaacagcaggcatggtgatatacacaataatggacagacacaatttcccactccattttctattggaagtaagagaatactagaggataaacaggtatcagcaagtggtggtatagcgcagccatcatcttccaggggacagatagatgtttttggttctattccaagagaaggttcgactgcaataaacaatgttgcattcaacctgcaagagtcagatggtaaaagcatgacagaaagcagaacaacttttggacgtgcttcaggtgtagacaatatctcaagggttgcttcagtatctgttcatcccaagtcaagcgaaacagcattcaaaatacttaagcaacttgacagaactattccttcccctacatcaaagccactagggctgagacagacattagccaagaaaaatactttttctgttgctacctacagacagattaaagagcctgatatcattatcggtaatgataataaacagagcagcattaatgagagtggtagtgctagctcggagactacatatggaaaaaaggttcagcaacctcaaagcagtcctatttcaggagagtcaagtgaaaaagtccagagaagcggagctaactcagatgtttatgaagcaggcacttctcagcgtcctctgaaatcaaatctaacacccacttcagtcgccgaggtcttggataataacaacaccagcaaaggtttcagcttcacatttcctattcctaaagctccaagctctctacttgaaccgcctcctacaccaaccatggcctcgccaccaaggaccttgccaatcactaacgaggatgttcccaagttcacctttggctcatccagcatggccaacaaactcgttttctccttcaactccacaagcagttctcctggtgctggtggaacagacccaaccttcaaatttggatctgataataagcgagagcttgtgttttgatacagttggcaatttttttttgatagacaccatgcccgcggatctgaaccgtaccactctatctattcttggtgtgttgatgaaagacgtcttaagagagttggagtgtgctacttgagctacacaacatgacattcttttcattcattagcatattcaaacattacatattttaaaaaaaaaacgttggcaggacatttccccc

SEQ ID NO: 90507 - DNA, 204 bp, Zea mays
  Clone ID: MRT4577_182544C.1
atttggggggttttttaagaaaaattgggggccacaccaccgcctaaaaaaaatttacaccactccatgcccccaagataacatccctccacacaacagaagttctataaacgtcctacaataacaaacaaatacggcccaactaccaggtaatccaaccaacgacagctcttattaaagtgccatcattccggaacgataaga

SEQ ID NO: 90508 - DNA, 1780 bp, Zea mays
  Clone ID: MRT4577_182545C.1
ccatacctcgaggccggccgggatttctcctctcctctcctctcccctcgctcgttcgtcgcgtcctcctcagatcaacaaaccgtgtcctgctgctgcctctggaaaccaccgggggatcgccccgccctttccttcccgcacctcagatcctccgtccgaaaacggcagcttccggaggtgtcccgtctccctgctccttccggcgcgacgggtggcacggctcgcggatccggcggtcttcggtcgacggcgaggcggcgctcgtcttggatcgggagtggttgctgaggcgcggagatggtggccgaggcggaagtcatgcatcagtcccccgttccggtgctggaggtgcagtaccaccggcgcgcgacgaccaagggggttgacgacgtcgtcgggatgtccgcgcccgcccccgcggaggttggggttggggttggggttgaggtcgaggtcgaggtcgaggtcgccgtggaggtgcctcgcatggggttggagcagcctgatgtcgcaccaagggtatccatggacatgatacagcagtttgtgcccaacatccgttctggtagcttcgccgacattgggcctcggaggtatatggaggacgagcacatccgaatagatgatctttccgcccatctcggctcgatgttggtctgccctctgcctagcgccttctacggggtctttgacggccatggcggcccggacgccgcagcctacatgaagaggcatgcgatgaggttcttgtttgaggaaagcgagttcccacaggcgtcgcaggtggatgaggtgtacctcgagtccgtggagagctgtgtccgcagagccttcctgcaggcggaccttgccctggctgatgatctggacatcagccggtcctctggaaccacggcgctcactgcattagtgtttggaaggcaactggtggtcgcgaacacgggggactgccgcgcggtgttgtgccggaaaggagtggcgatggagatgtcccgcgaccaccgcgcgaaccacgtggaggagcgcgagagggtggccgcgtcgggcgggtacatcgaggacgggtacctgaacggggtgctgtcggtgacgcgggcgctgggcgactgggacatgaaggcgcccggcgcgtcggcgtcggcggcgctgatcgcggagcccgagttccggcgggcgacgctgggcgaggacgacgagttcctcgtcatggggtgcgacgggatctgggacgtgatgacgagccagcacgcggtgagcctggtgcggcgcggcctgcggcagcacgacgaccccgcgcgctgcgcccgggagctggtgatggaggccaagcggctggagacggccgacaacctgacggtcgtcgtggtgtgcttcgcgccggagatggggtcgccgtttacaccgcagcaacagcaggaggaggagctgcccgcgaggcccaggagctgcaagaagggcctgtcgacggaggcgctgtgcagcctgaggagctggctggatacggaccaccggtagagggaggaagagctggggggtgtgtaaatactggagtattatgctgacagcaacactggttgattatgagcgctgggccatctgttgaggattttacgtaggctggttcagcagccagcagttttgtaggtttcgttcttccttttcacccttgttatctagtcgtttgttgtacatacatgtatggatgctgctgatgacatctgtgtgctgcgctccattgccaccaactttctttttaccgagagcccagtgagaagag

SEQ ID NO: 90509 - DNA, 1160 bp, Zea mays
  unsure (1)..(1160): unsure at all n locations
  Clone ID: MRT4577_182546C.1
ccacgtgtccgcgtcctcctcagatcaacaaaccgtgtcctgctgctgcctctggaaaccaccgggggatcgccccgccctttccttcccgcaccccagatcctccgtccgaaaacggcagcttccggaggtctcccgtctccctgctccttccggcgcgacgggtggcccggctcgcggatccggcggtcttcggtcgacggcgaggcggcgctcgtcttggatcgggagtggttgctgaggcgcggagatggtggccgaggcggaagtcatgcatcaggcccccgttccggtgctggaggtgcagtaccaccggcgcgcgacgaccaagggggttgacgacgtcgtcgggatgtccgcgcccgcccccgcggaggttggggttggggttggggttgaggtcgaggtcgaggtcgaggtcgccgtggaggtgcctcgcatggggttggagcagcctgatgtcgcaccaagtttatccacggacatgatacagcagtttgtgcccaacatccgttctggtagcttcgccgacattgggcctcggaggtatatggaggacgagcacatccgaatagatgatctttccgcccatctcggctcgatgttggtctgccctctgcctagcgccttctacggggtctttgacggccgacggcggcccggacgccgcagcctacatgaagaggcatgcgatgaggttcttgtttgaggaaagcgagttcccacaggcgtcgcaggtggatgaggtgtacctcgagtccgtggagagctgtgtccgcagagccttcctgcaggcggaccttgccctggctgatgatctggacatcagccggtcctctggaaccacggcgctcactgcattagtgtttggaaggtacagaaaggaagcttgtgaagcagtgatagatagctgcatccacgcgtacacattgatctgaacaccgatcccgcggcttgcttgcaggcaactggtggtcgcgaacacgggggactgccgcgcggtgttgtgccggaaangaatggcgatggagatgtcccgccgaccacccgccgccgaaccacgttggaaggaancgccaaaaagggtgggccgcctccgggcggggttacatccaaaggacgggttaccctgaaaccggggtgcttgttccggtgaaccc

SEQ ID NO: 90510 - DNA, 389 bp, Zea mays
  Clone ID: MRT4577_182547C.1
gggaaaagggggttttgaaaaacaagggaaacaaagggtttaaaattgacgattgggtaaaaaacccaagttggaaccccccatgtccccatcccaaaaggttttccttggcccaaattttatttggaaggccaccccccaccttaagaggtaaaaacccaccccccccagtcccgggctctcttaattaaacacaaagggggggggcaaaacccccttccaaaccaggaaccgccaccccgggaagcaagggggaagccccccttccccccccttgaccggttttttgggctcggggagataaggggggggggcatccttgccccaccccaccccggggggggcctttaagaattggcccaccggggggcgcaacttcgggggggggg

SEQ ID NO: 90511 - DNA, 272 bp, Zea mays
  Clone ID: MRT4577_182548C.1
acgctgttcactcgttcggtgcccattccattttttttccaatttacataactcctcgggggggttctgctcgggggcggggggctactttatcccctccacatgctatgtctagatcttcacatatgcgctcggtttactgcttggccgggcaccttcccccgtcgtgagctcgcgctcaacggagcttgggccctgccgcgtgttgcttcagctctcgctcgcgcccacctttttggtcgaccccctgcttttctttctctttcctttgg

SEQ ID NO: 90512 - DNA, 610 bp, Zea mays
  Clone ID: MRT4577_182549C.1
gcgcagacagagctgcagcgcgcgtgtgggccggattggcggcccaggcccaggttacggcctgggcgcgccttgtcccactttccctttcctgtttgggccgccagcccagcggccgagcaggctaggccgaaaaggccggccaaaacaaacagcacctccactccagcggcttagaagccttgctgggcctggccgtgtggccgatcaaggccattttggtattttttttttatccagcgatttttttttccagaaattagaaacacagaaaagaaattagaaaaacagtgcagaaaatttagaattatatttttccagttatagaaaatttcagagatatttatggactatttttattccgctgcgtactttggtacttttatttatattttatgcaatttttccagttaattatgaaaccaacgtggattgattattgcttaaattgcatagaattcagaaaattttgtggtgattgaatattttaaccaacgttggatattgttaccacaatttaatacaagtttaatgtttttctagatcatccaacgatgatttagaaatttgggatcaggaaatttcatagatatggcatgggtattatttg

SEQ ID NO: 90513 - DNA, 434 bp, Zea mays
  Clone ID: MRT4577_18254C.1
cccacgcgtccgcttaagggttcctgtactagaaaatctcgcccgttacgggaacagcagctcaaatgggagtccaagcagtgagggtcaaggatccttgttggatcagtacaatggtgtacatgatgcttcccatggcttgcatcggaagcgaaaaaagcaccttgatggtgccggcgatgatgatcatgcagatgcctatagtaacaaaatgatggaggatcactaccgtgcgatgctcagtgaacatgtccagaagtaccgaaggtcaaagtttaaggagggtgcttttatttccgatccttctcaggtggcaatcccccacataaaacacaaaaacggtggtaaaaaagttatgaagcacattagtaatttcagggatattgcggcattaaatgggataggagcttcacatgagtataattggagggggg

SEQ ID NO: 90514 - DNA, 160 bp, Zea mays
  Clone ID: MRT4577_182550C.1
aacacacatacacagataagccaaacttttttacaaatacatcatacatactccaaacggggtggttcttcctcattgatgacatcacatgacctttttccaacgttgacctagcctttcttttcacgcactgcttgacccactgcaatgtcctttactt

SEQ ID NO: 90515 - DNA, 210 bp, Zea mays
  Clone ID: MRT4577_182551C.1
attcggctcgagatcgagttctccgtctttttgcacattgcagccacttccaacatggggggctatatgaacccgactgcttaatccagaagggagagcactaacctcagtccacaggcctcctggactgctactacatgtagtaagagcgattctgactccggaggcttcaccaatatgcctgatgactgcatcaagtctaaggtcttt

SEQ ID NO: 90516 - DNA, 732 bp, Zea mays
  unsure (1)..(732): unsure at all n locations
  Clone ID: MRT4577_182552C.1
atacccctctctccctcttgtgggtagtgttgtgcgtcttttcctagcagcaaccggagagcggctgctcgcctgctcctcctcctagggaaaggacagcggcggcggcggcggcggcgagaagttgggcctggagcccggacgctttctcccgagataccgcaatactgctagagcactgtgtaaggaaatctctctctctccctctctggtttagatctctagccacagaacgtgtactaagttagctaccgcggaggactttcacttgctccaatcgtggccatttgggaaaaggttctggcaactgctcaggtacccgctgtggtctctgttcccctaatttcgtgcaaagttttgtgcattcggccggtgtcgatgccgacaaaatctaggtgcccccaaaacgatgcgagtgctcaatactctagatttgaaggtcatgtggtgcgacctctttgctggagtggtgtgagatttgtgcatctcaacagcctttgctgttccgtgcgatttcctttttttttgtagctaaagattttgaaataaaggaggtcagttggccagatattcttagtggtagatgatgccaaaacacgagttgngtttgtgtatatctgcaactattctatttgccatttgaagcgcaggcctggtgcgtggtggaagctattttactgagtcacaggtcgctgggttaaagcangcctctggatctgcctttctattcta

SEQ ID NO: 90517 - DNA, 425 bp, Zea mays
  Clone ID: MRT4577_182553C.1
gaaaactcgctcccagacaagaaatctacaaaactcacttgcagagtggatcagctcagagtacccttgcatcaaacaaaattccatgcaagttctgatttatccccagtacaaaattgttggacctggcacctgggagtagaatatttctgaaatttacagattcctgtacaactcacagtaacgcaccaaaatctccacaagagcatcggccgtccttgaacttgtgaagccgtttactatcccggacaacaatctctctgttcgcaagcaatgagaaaaacttaatagagctgtggcagtccctgcacatggtgatgttcttcgtgacgcgaactgttgcgcctggaggtgttgggagcagccccagtgcaacagccaacctctcgctgtggtgtcttactgaacctgcaggaggcttcttg

SEQ ID NO: 90518 - DNA, 348 bp, Zea mays
  Clone ID: MRT4577_182554C.1
cgagagccccaaggtttttgggtttaaaaaaaaaaaaaaaaccgggggcaacgcccttaacgatcgatgaaaaacagattccggctgggggccccccctcgtagatggccattacatgctttcatataagggggatgcttggctccctacccgaactacaatcacgaagcccattacgctttattccggattaattctgggaacaaagacggcaaaaaaccccagatgggcctgcccctaatggggggctctgggctctagctcctgaagggcaagcccaggggtttcccccgttgccggatccggacccaaagccccccccgccaccagagccgccttgggatcccc

SEQ ID NO: 90519 - DNA, 285 bp, Zea mays
  Clone ID: MRT4577_182555C.1
aacaggagtccaaccgcaacgggggggggaattaaagccaattaactatggagctgggacattcgactggaatgggatccaaaaatactcacggcaatgtaactggcgacacaaagcagacatattgctccggataaaccaggctggcgcattgcccggctaaccccatggacaagaccccaggggaaggactgatcgaaagtcaccccaagatcttgttgaaagcaactttgttgcaattcttaacgtactcgttaactggcttaccgcacaaaaaggccccaa

SEQ ID NO: 90520 - DNA, 236 bp, Zea mays
  Clone ID: MRT4577_182556C.1
ctttcggaggacgtgcagcaggtaagcagcagcaggaacgctagcaccgccgcatccgcagccatgggtatcgacctcattgccgctgggaggaaccagaagaccaagcgcatagcgccgaagtccgaccatgattatctcaagctccttgtcaagctctaccgcttcttggccaggaggacctagagcaacttgtaggctgtcattctcaagagggtattattgagcagaaccat

SEQ ID NO: 90521 - DNA, 365 bp, Zea mays
  Clone ID: MRT4577_182557C.1
ctctgacagtgccaaaaaaaaaatattggcacccatcaacgtgccgccgagccatggcttccccatccgcttgctcatgtcgtaacccacaccagcagcgacctcctacgaatgttcaccaccaattccaatccctaccggcttggatgccggcaccggcctcgtgaacagcatttacaaaagcgctcgaacttgagggtaccggcacttgcgggacgcacctttagaatgtaaactggcgccgtggggacctgcgagcctactgtgcgacgtatcttgacccgtcgagccaatccgttactcgacctgtcgaccgcagagggtgcagaccaacctggaacgtgcggatgacgctctcatttgcg

SEQ ID NO: 90522 - DNA, 586 bp, Zea mays
  Clone ID: MRT4577_182558C.1
gaggaatgaacccatgatacaccacttcattttggatagagggattcatcaaaccaaacacctcataaataaacagtggaacacatttattaaaaaaaaacatattacgggctttggcaaagtggtggagtcgtggaggaagatgatgagagccaggttccattccgttttggcatgcaaaaaggtgactgtttttagccaagaagatgatgagatccactgctcaaagcaagggcaagagttcaaagctcaagcccagagtctccacatcgagatcctccaatccccatggctgtgtagctgaataatggtgcaatggagctttttggcgacggcgacgacgacaggccaacgctttcgtccaaccttttggacttcatgcgtgttgatattagccttacatgttccataatccatatgcctggggagtttgcacttctgacgagtacagggctctgtagacagacttggattaagagcacaatgcatccttctctgtcctctctatttaaaatccataaccaaactcttcatccttccatgttttatttatttacaggacacaatgtttgatccggtctctctt

SEQ ID NO: 90523 - DNA, 444 bp, Zea mays
  Clone ID: MRT4577_182559C.1
taagtcatgtcttggtggtgcgcaattctggtcagcggaaacacactgaaaaagtagagggcagaaatgaaaaaataatcaggctaggagaatcaaagtggataaagtatctttctcccggcacaccattggctcggtggttagcactactgttgttaggaacagctcacctaacaaccaagttgcagtccaatttcatagagagaaatatcaacgaggacgagtctcgtatcgtattagcaacagaccaaaacccagctcacaatttccctgtccccaaatcaaacaaaacgtactgtaactacagactgcgaagaacattttgtattccctatttcagtgtctaaaaaaatactgctatgtcatgaaaacaaagaaatattaatattaccatgaaaagtaatagaccacgattggtttcatttatctcagttgcaaacagtt

SEQ ID NO: 90524 - DNA, 319 bp, Zea mays
  Clone ID: MRT4577_18255C.1
gaaccacgcgtgcgccctgagattgatgagctcattgacacccttttcaaacacttctctgcacagagtatctctgctggacgtactggggcatagcatgatcactcttctccatggctcgtcttgaccgaataaacaactactactgccttcggccctgctaacccgccggaacaagctactacaggagctgaagaacctgttggtcgtttgccgcgaccatcgctaccctttcaacgacaaagctgagctagcctagttcaactagacgtatgtcctcgtcgagcagtacaacctgaacgggcacatccgcttgatc

SEQ ID NO: 90525 - DNA, 211 bp, Zea mays
  Clone ID: MRT4577_182560C.1
cttaaattctaggaggcatatacgacgaggaattccgggttgcaggagccttcccgttcaagatgcacttcactgttggaattttgacgggggttcttgaatccaaggggctttcttacaccctaagtattgggggggtgtctaagaacaaaccggtttcgatgggaattaatttagtaactctcgagcctaaaccctaacaaaaactctc

SEQ ID NO: 90526 - DNA, 498 bp, Zea mays
  Clone ID: MRT4577_182561C.1
gtacgcctgcaggatccggtccggaattcccgggtcgacccacgcgtccggcagctacgggcaagatggaggcgctgattttggagccctccctgtacactgtcaaggccatcctgattctggacaatgatggagaccgactcttcgccaagtactatgacgacacctaccccagtgtcaaggagcaaaaggcctttgagaagaacattttcaacaagacccatcggacggatagtgaaatcgctctgttggaaggattgacagtggtctataaaagtagcatcgatctctatttctatgtgattggcagctcctatgaaaatgagctgatgcttatggctgttctgaactgcctcttcgattccctgagccagatgctgaggaaaaatgtagaaaagcgagctttgctggagaacatggagggcctcttcttggctgtggatgaaattgtagatggaggggtgatcctagagagcgacccccaccacgtggtgcacc

SEQ ID NO: 90527 - DNA, 5303 bp, Zea mays
  Clone ID: MRT4577_182562C.1
acagttagttatacgcatccaaagatagtagataaagatcagctctatctagatagttatacttatccaaagttagtagatagacttgagatagctctatatatagatctgtaaacgctggaataaagacaagcagaattccaatctattctggcttcccagagggagccagagtctcctgtgatcttctccctgcgcacaacccagccaggatcacgacggcgccccagcgccgccaccctggtcccaccaaatcccctccctacaatctgcgcaatctgcccggtagaatccgtagttctaccaatctggtatcagaggactcgacgatcatgagttcctccaagtcgccgtcaccgggacagcagacgccgccggcctcaagcccgcccgcagcgccggtcgtctccctggccgcggtccctgcgtcgtcggaggccatggcgctcggccctcccggcgcggccatcaaccagcaggccgcccccgcgctcacaccggcccagatcgcggcgtccttggcggatctcagccacgccgtgcgcgatatgcagatcaccatgaacgccatgctgacaggccacctccccttccccaatccacaagccgcccggacaccccagccgccgcacccgtccctgacagcgcagccaccgccggccgcactgcccccacccacgcagccacctgcgccactccctccactcgcccggcaaccaatttcttaccagtacggcatgccgatcgaccccgggccgtcatccaccgcatcaccgaccacagcccccatccatatgatccgcttcccaccatccccatcccccatcccatcttgggcgcagggcgcgcctacggtttcaccgccagtgtactctgaggcactcccgcgaccggcgctcacgacttccttacccagcagcaccgtcggtgggcctcccgggatgctgttaggaggcggcgacgaccccctgttcccgggtcgggggcccttgcgccctcacgtacccgcagcgacagcagcgtggtcaccgtaccacgggctacctcaggacgacgacgtggagaccgcagcctacgggggcgctgaggcgcgcgcgcctccacgctactacaaactggatttcgccacatacgatggctccgaggatccgctgaactggctaaatcattgtgagcagttcttccgggggcagcgcacgccagcctcggatcgcacgtggctggcctcgtaccatcttaaggggccggcacagacgtggtactatgccctggaacaggacgagggcatgccgtcttgggatcgcttcgccgagctgtgtcgccttcgcttcggtccagctgtgcgcggttctcgccttgcggaactgggacgcctccccttcctgtccacggtccaggagtactcggaccgcttccaggcgttgctgtgtcgagctcgggacgtctcccccatgcagaagacggagctattcgtgggcggcctccccgagtacttgcgggtggacgttgagctgcgcgacccgcaggatctacaaactgccatgtacctggcacgggcgttcgaacggcgcgcggcggcctggcccccattccagcagcgcgggtcgcgaccaccgcaacgggcgcagggctcgggtcgcgtgacaccagcaccgcccggggctctaccgaccggtacgacgacgccaggcgatagtacgactccgacacgcccgtttcgccgattgtccccgggcgagcagcaggagcggcgccggcaggggctctgcttcaactgcgatgaaccctacgttcggggacacgtctgccagcggctgttctacttggaggtcgacgacttcctcgacgaggcgtccggtgtgggtggggtcgacccccttgaggagccggccgccccagacgtcacgggagccaacgcgttggtggtctcgttacacgcgctggcgggcatccggacggacaagacgctgctgctaccagtcaccatcaacggcgagcgactactcgcgctcatggacacagggtcaacccacaacttcctcaacgctgacacgatgagccgcctcgggttagccatggcgggtggcgagcaccttcgggtcacggtggccaacggtgaccgcctaccctgcgccggcatcgcccgcgacgtccccgtcatcatcaacgacgagtccttctccatcacgtgcgtcgggatgcgcctgggctgcttcgacttcatcctcggcgtggacttcctggagacgctgggcaccatccagtggaacttccgagcactgaccctgtcgttccagcgccagggccggcgcatccactggcagggtgtgcgggccacgcaacagcctgccccgcagcagctggctgtggcagtcgtcgacactgcccaacagcccctcatggacgtccttctgcagcaacatggcgccatcttcgacgagcccacgggactgcccccggcccgcccctacgaccatcgcatccacctgctgcccggtacagctccggtggccgtacgaccgtaccggtacgcacagctgcagaaggacgagctggagcgacagtgtgaggccatgctcacacaaggcatcatacgacccagcacgtcgccgttctccgctccggtgctcttggttcgcaaggcggaccgctcgtggcgtttctgcatcgactaccgcgccctcaacgccaagacgtccaaggacaagttcccgatcccggtggtggacgagctcctcgacgagctccatggagcccgtttcttctccaagctggacctacgctcaggctaccaccaggtgcggatgcacaccgatgacatcgccaagacggcgttccgcacccatcatggccactatgagttcctggtcatgccgttcggcctctcgaacgcgcctgctacgttccaggccctgatgaacgacgtactccgcccatatcttcggaagtttgtgcttgtcttcttcgacgatatcctgatctacagtgcatcatgggcggagcacctccagcatgtgggcatcgtcctcgagacattgcaggcacaccacctccacctgaagcgctccaagtgttccttcggcgccacatcagtggcctatctgggccatgtcatctccgagggcggggtcgccatggacgccgacaaggtcgcggcagtggcctcctggccgcccccgcggtctgcacgaggcctccggggcttcttgggactagcagggtactaccggaagttcatcaaagacttcggcctcatcgcagccccgctgacacgtctcttgcgacgagacgcgtttgcctgggacgatgacgcgacaacagccttccacgccctaaagcacgccctaacgacgggtccagtgctccagatgccgggcttcgccaagctcttcgtcgtcgactgtgacgcgtcaggtgcagggttcggtgctgtccttcatcagggcgcgggacctctcgcctacttcagcaagccatttgcagcccgccaccttaagttggcggcctacgagagggagctcatcggcctcgtgcaggccgtccgtcactggcgcccgtacttgtgggggcgccacttttctgttcggactgaccactacagtctcaaattcttgctggatcagcgcttgtccacagttcctcagcatcagtggaccagcaagttgttcggtttcgatttctcggtggaatacaggccggggcgcctgaacaccgtggccgacgccctgtcccgccgcgactcggaggctgccgtggaggacacggctatggcagcactggccatctcgggcccgacattctccctgctggacgacatcaggcgggcgctggcagctgcacctgacgggcagcacctcctccagcagctgcgggacggcgtattggctgcgccatggcgcctcgtcgacgggctgctcctgcacggcacacgcatcttcgtgccgaactacgacgacctgcgccaccaggtgctgacactggcgcactcggcaggtcatgagggcatccagaaaaccctccatcgactacgggcagacttctacatgccacatgatcgcgcgctcgtccaggactgggtgcgcacctgcaccacgtgccagcaaaacaagacactggcgcagcagccgggcggcctcctgcaaccccttgaggtgccgtcccaggtgtgggccgacatctccatggacttcatcgaggggctgcccaaggtggcaggcaagtccgtcatcctcacggtggtggatcgcttctccaaatacgcccacttcatcgccctcggccacccctacaccgcgtcgtccgtagcacgggcattcttcgacggcatcgtacgactgcacgggttcccgttgtctattgtcagtgaccgggaccccgtcttcaccgggcacgtgtggcgcgacctcttcaggatggcgggggtgacactaaagatgagcaccgccttccacccacagacggatggacaatcggaggtggtcaacaaaattattgcgatgtatcttcggtgtgtcaccggcgatcgaccgcgggcatgggtggattggctgtcctgggcggagtattgctataatacctcctaccacacagcattgcgtgccactcccttcgaggtggtctatggcagatccccaccgtccatgctaccttacacgccagggacgacacgtactgaggccgcagacgacatgctacgctccagagatgagatgctggccgaggtgcgccagcgccttttgcaggcccagcagctcgccaagaagtattacgatgccgggcatcgggaggtccagttccaggtgggcgactgggtgtggctacgcctgctacaccgcacctttcagtccctccatccgcgcgcgaagggaaagctgggacctcgctacgcaggccctttccgtgtccaggaaaggattgggtcggtagcctaccgcctgcagttgccagatggtgctcgcatccatgatgtcttccacgtcagcctgctgaagccgcatcgtggggatcctcctgcaactccggggacgcttgacccagtgatggatggtcggctgcttcctgtgccggccaaggtgcttcgcgctcaacttaggcggggcgtgtggcaggttctcgtacagtggcgtggactggctgaagatgacgccacatgggaaaagcttgaagagttccgtgctgcttaccccaacttacagctcgaggacgagctgtttgagaaggcggggagagatgttatgtatggccaagcctatgttaggcgcaatagggccaaggctgcccaggtggggcccaaggcccaatag

SEQ ID NO: 90528 - DNA, 238 bp, Zea mays
  Clone ID: MRT4577_182563C.1
ctcctttgttttgcccatgtcttccaacagcaccaaagccgccggcgcacgcctctgccggcgcgcccgcgcccgctcccgccgccgcccgccgctcccgaccatgcccccgcccgtcgtgcccgccggcggggccgaaccccagccccgcccgcccgctcgccgtgttctcgacagcagcggcccactcaatggcggcggctctttttcggacagcccgtcggccaccccggagatc

SEQ ID NO: 90529 - DNA, 824 bp, Zea mays
  Clone ID: MRT4577_182564C.1
ccccgcgtccgactcacttagcgtctggttacgagctcactactagattttagatctccatttttggtgtacttctgctgcatgtgcctcccatagttgcggatttgcaggtatcacctgattccttttgatttttggattgagatacagtaaaagttatctttgcctctttccaccacactgtatcatacaggtaaacatgaatacaaggctggcttgatctggcaagtgctcgccattctatgggcccatcacacttttcgagtacactgtttgatcatgaagagcagtctgctgccactaaacttgaggttgttgatcatgattgtctgaaaatttatcggggatatgccttgggatggagaaatgtcacagaacacaggatgaagacgattccaagaatccacccatgtcaggactagaagacgccttcacatcacggagtagagctctcagcaacaacagtgcaacgatgtttggacttttgttcacatatgggagtgcaccaccatgtaaaatagacaaggcggtgcttttgcaaacatgatgctgccacgagacccgaacttatgtatggccaaacatgttaacatattttgtatgtcatgggctgttccagaaacattctgaaatacacggttccttctaaattatatattttgttttgataaaacgcccgtaaaaaaacttcaatgttttagtttacatgaaagggataaagccattttctccaaaaaaaaaaaaaaaaaaaaaaaaaaaaaaaaaaaaaaaaaaaaaaaaaaaaaaaaaaaaaaaaaactccagggggggggcgtgtacccccc

SEQ ID NO: 90530 - DNA, 227 bp, Zea mays
  Clone ID: MRT4577_182565C.1
agctcggaattcggctcgaggttcttgcctgccttatttctttaaagcatcgacaatagcatagcttgggtcattgttgatggctgcggtgcaggtcacaacatttgtaatgagcctccatgattgcacgctacagctcggcatacctacacggtagccaggctattacagggcgcatgctaagctctggccacttccgagcacagggcagatacaagcgcattcct

SEQ ID NO: 90531 - DNA, 1363 bp, Zea mays
  Clone ID: MRT4577_182566C.1
ttcgaaaaaaggatgttaagtaacttagtgactctgcttaacactgtaggatttgaggctgccatagtatgctctctgaccgtgctaacgggaggaaggagatgatttaagttctccatgtttataaccagaaagaggaggatagtccaatcatggtaactaaatagtaggtagtaatgtttcacggtaaatcacagttgttgaatgtgatatagtcttgtacactaagtaaggaagacttttttagtagttgtttgtgtcattattaaactctcacatatttattgttacgagctcactactagattttagatctccagttttggtgtacttttgctgcatgtgtctcccagagttgcagatttgcaggatggcttgatctggcaagtgctcgccattctatgggcccatcatgcttttcgagtaccctgtttgatcacaaggagcggtctgctgccactaaacttcaagttgttgatcatgatggcctgaaaaattatcggggatatgctcatatgccttggccttaatttaaactacttgtatgagatggagaaatgtcacaaaacacaggatgaagacgactccaggaatccacccatgcctctcagtgactcagtggcacaaacgacagcctagtcaggactaggagacgtcttcacatcacggagtagaccactcagcaacaacagtgcaacggtgttcggacttttgttcacatatgggagtgtttaagctcctgcacctagatttagaaacaccaccatgtaaaatagacaagacagtgcttttgcaaacatgatgctaccacgagacccgaactcatgtatggccaaacatgttaacatattttgtatgtcaccaaaacgcttatttacatcaatgagcgattatctgaactgttgaatgctcaccaaaatgcttatttctatttcctactgctacttgctcctttgaagccttcagcgatggaggcctccacagaagctactaggatggcctccagcttatgacctctcactgccgaccgcaccttcctcagaatatgttgcttcatcaccgccctctcagcagactggagtttcttgcacatgttcaatccctggatgtacctcgacaccgcgccgccgaaaggatcaccggctttctcaagggccacgagcttctcgacgatctgagaagcgagcattctctcgatacagggtttggttccaacctccgtgatgtccaccagaaattgcatggctagatccttggtcttcaaagacttgcggtccagcaagttcacccggacgcgtgggcggacgctgggcggacgggtttctctatggttcttagttgcagaaatctttgcaagacaagg

SEQ ID NO: 90532 - DNA, 1005 bp, Zea mays
  Clone ID: MRT4577_182567C.1
cttccagtgacgctagcgtcagcctcgtctcgctcgttttgctccgtctctcttcctcctcacttcccacccaccctcgctcgttttgttctgtctctctttctcctcactccctccgtcgatcctctgcagcttgcatcggccgaccagtagtcttccactgtaatcgcctctcattattctttctgccacgctcctcttcgtccttactccctccgtcttgtctatctgtagccacttcgtcttcctacgtttttgccagatttttgtttaaccgcaatttcgatttgaggctgtcatagtatgctctctgaccgtgctggcgggaggaaggagatgatttaagttctctgcgtttatagaggatccagtatacggtaaatcacagttctcgaatgtgatatgatctttgactcggagtattgaagactaatttagtttgagtttgagattagttgtttttgtcattaataaactcacattagcgtctggttacgagctcactactagattttagatctccagttttggtttgctgcatgtgcctcctgcctggcaagcatcatgctcttttagcggtctgctgccacttaagtctaagttgttgatcatgatgccctgaaacattatcacaaagatgctcagatgcgttagctgctatccaatctacttgtatgagatggtgaaatgttacaaaacacaggatgaagacgactccaggaatccacccatgcctctcagtgactcagaggcacaaacgacagcctagtcagccttcagcgatggaggcctccacagaagctactaggatggcctccagcttatgacctctcactgccgaccgcaccttcctcagaatatgttgcttcatcaccgtcctgtcagcagactggagtttcttgcacatgttcaatccctggatgtacctcgacaccgcgccgccgaaaggatcaccggctttctgaagggccacgagcttctcgacgatctgagaagcgcgcattc

SEQ ID NO: 90533 - DNA, 2977 bp, Zea mays
  Clone ID: MRT4577_182568C.1
attcttgggcccatatgcttttcgggacactgtttgatccaaggagcggtctgctgccactaaacttcaagttgttgatcatgatggcctgaaaaattatcggggatatgctcatatgccttggccttaatttaaactacttgtatgagatggagaaatgtcacaaaacacaggatgaagacgactccaggaatccacccatgcctctcagtgactcagtggcacaaacgacagcctagtcagacaaccatcttgctcgtcatgttggtgtggtgggggtcaaaagcgtcttgctgctgaaattgatggtataccgtacaagcatttacctttgatttttgctgacgttaatatgttgcttcactaaaggactaggagacgtcttcacatcacggagtagaccactcagcaacaacagtgcaacggtgttcggacttttgttcacatatgggagtgtttaagctcctgcacctagatttagaaacaccaccatgtaaaatagacaagacagtgcttttgcaaacatgatgctaccacgagacccgaactcatgtatggccaaacatgttaacatattttgtatgtcaccaaaacgcttatttacatcaatgagcgattatctgaactgttgaatgcccaccaaaatgcttatttctatttcctactgctacttgctcctttgaagccttcagcgatggaggcctccacagaagctactaggatggcctccagcttatgacctctcactgccgaccgcaccttcctcagaatatgttgcttcatcaccgccctctcggcagactggagtttcttgcacatgttcaatccctggatgtacctcgacaccgcgccgccgaaaggatcaccggctttctcaagggccacgagcttctcgacgatctgagaagcgagcattctctcgatacagggtttggttccaacctccgtgatgtccaccagaaattgcatggctagatccttggtcttcgaagacttgcggtccagcaagttcaccagtttctctatggttcttagttgcagaaatctttgcaagacaagggatccacccttcgcaaagacgatctgatggagagcgtagtacgctgaatcctggagctcatcgatgttgcactgcagcatgtcaatgagctcgtgaacaatattaagctccaggaacctatgcacgtatggctctcctccagtgcaggccaatttcatcaccaaaaaggcggtctgggacctcacctggttcttttcaacctctctgcgttgtagcagccaagccaacctatcaaacagatggcttcccagaaggaggtcctgcacccttgtatcatttgccgtttcagcaagagataataaaccttggatgcctttaatgatatttttgttgtctctctgaaggatattatgaagaatcacctcaaatgattgttgaggctttggtgattgcggcacatttctgtcagataaaacaaatctttccaaactgatccgagcatgccagggcaaatgaagcagcactgcaggccctatgcacccttgaagtggagcaccaagttcacagaatgtttttagcgtgataatcgcgtggtgctgtgagatctcagaaccattgcccagaagcacaagaagtttattgtcaattcctgattcaatcattgtctcaacagccttcagctttccaacctttgtcagagatgcaagtgttgtaaacacaatttcatgccactgctcattttctgcagtcaagagatctgcaattcgaaccatgggaattcttgacaaaatttcatccgcaattgtggcatcaacatgctcagatatcttggtcagaacagaagagaggttggctagagttgaagtatcttcacaggcaccaagaagatcaattaatttatctatggaacctgctatttcaagagagtgagcaagatttatgtagtctgatggggaaaatataactgtaattgcggcagtgactgcaaaaataagatctagtgaccctatagaaattatctctgctattcgagggccaagtattttgctgaacccaattctatttgtctcaagttcagacagggatctgcatgccatgagagcttgagttgtgtttaccaataaaatctcgatgtccatgaattctagcagagaaaagaatgatcccatcttctgttcggctggccgtttcatacactctttgccaaaaacaaaaagccaaggagctactaatgccacattatatgaaatggaatcagataaaagagcacgagtggcatcatttgttttgttctccaggtaaagtgagaccatgtcatgcatatgatacaacggctggtcctccagtttgataataagtgatccttcgactagttttgaaaccacgagagagaacagtccgcactgctcaagcgctgaccaaatggattccagacaagcctcaggaacaggttcttcccaagagatagctgcaagagccatgaaaaaaattcttgaattttctggcattgcttctaagctgaactcaaaagatccaaatatggtcaacgtagtctccacatctttctcattgacgtatgaaactggaccaggtgcacatgtggcatatgttgagaggttggatatagctttctcccatttttccactctagtttccttcctcagagccttgcccatgacagcaactgtaaggggatggtgaccacatcgatccaacaagacttctgcgacaggctgtgaagtatagagaagttaaacattcaaaaaccatggtgtttggaatttttagttattctattttttcatgatgtatcttcttctaaaatatcttactttgcaagtttggcactactctttgaaaataaatatgtatataaaaaatactgaacatatttgtaaagctaaacacgatgctagttaagataatatgttgttaatagaataagattaatcttgaaatggagatatgtacaagtag

SEQ ID NO: 90534 - DNA, 128 bp, Zea mays
  Clone ID: MRT4577_182569C.1
cggccggcccgacgccccctgactctccgacgtcttttagtagatcggcttagtacgatgagatgtatgcaggaggctagtggcattcttgttgatgacccgtactgccgtgatgaatcactaactag

SEQ ID NO: 90535 - DNA, 263 bp, Zea mays
  unsure (1)..(263): unsure at all n locations
  Clone ID: MRT4577_18256C.1
cggagagcagtgttcagtgtgtgtgcaagagatagaagagcagcagttctttgctgngttattcctagactgtcttgagaatgtcatcatatctgaaggctgtcgaactcttatggtgcttcagtgtgctgtccangattatcctctgcagtgtgacacctggctgtcacttgcctgactatgatctagcacttcacattattcttcagcaggttgtatctcctntagagcattagatgngtatgataccttgatgttggcag

SEQ ID NO: 90536 - DNA, 561 bp, Zea mays
  unsure (1)..(561): unsure at all n locations
  Clone ID: MRT4577_182570C.1
gttttataataaaaaaattttttttttntctggaacagcccatgacattcaaaatatgttaacatgtttggccatacataagttcgggtctcgtggcagcatcatgtttgcaaaagcaccgccttgtctattttacatggtggtgtttctaaatctaggtgcaggagtttaaacactcccatatgtgaaccaaagtccaaacatcgttgcactgttggtgctgagagctctactccgtgatgtgaaggcgtcttctagtcctgacatgggtggattcttggaatcgtcttcatcctgtgttctgtgacatttctccatcccaaggcatatccccgataaattttcagacaatcatgatcaacaacctgaagtttagtggcagcagactgctcttcatgatcaaacagtgtactcgaaaagtgtgatgggcccatagaatggcgagcacttgccagatcaagccagccttgtattcatgtttacctgcaaatccgcaactatgggaggcacatgcagcagaagtacaccaaaaatggagatctaaaatctagtagtgagctc

SEQ ID NO: 90537 - DNA, 615 bp, Zea mays
  Clone ID: MRT4577_182571C.1
aaagaactgatttcaattgaggtggcgagcaaaatacactcaatgacaactgtggacagaacatctgggcgatacaagttccaacctccaaagctctgaacacaacattccattcgaatggggttgcacaaccaaagaaagatccaaaagtatgatcttgcgaagttgagcttccttacatagaatgtgtgatagcatgccattgcaacgaagttaatggggccaatgtgatcctgaatataacggcaaacagctgcccaacctcgaatatctaaaagaatatgatcaattgccacaagcaagttctttcaccaacggtaaaactaaattagaaagacaggcaaacgtgtgttaacctcctctaattagcacattgcataatatatgctaaacataatgcctaagcagtcctgttaaataagaccagtctgctggatattgtagaaatattttgaaactttaataagcttatgttatttgtattacggccaaaagagttagaccacagagaaaccaacaccaaaagcatcaaaagatatttttcagttttcggaactagttattgagtttactttatgcatatacgtagtaccttgcaggtcgagcggaaccgcg

SEQ ID NO: 90538 - DNA, 356 bp, Zea mays
  Clone ID: MRT4577_182572C.1
ggtgaggcaggagttatgtctactaatcaggagatacaaaacacccatttgcctttctgtagacagagaaaactcctggctggccatatacgactatctatgtgccctactccatagtacaaaaggaattgaaggacccggcgggcgtagacgcagcgagcataactacaggtaaacgcgcgtgcgtatctcaccctcatgagaaacagtaaaaaagatgttaaaaggccacggataccaggctcctgctggcatgaagagaggggcgccctctgtactccgtggaagaggccaggaacaggctactctacttacaaccacaaagagcgagagggttctctattgtggcaggtagc

SEQ ID NO: 90539 - DNA, 229 bp, Zea mays
  unsure (1)..(229): unsure at all n locations
  Clone ID: MRT4577_182573C.1
gaaaaacatacgacacgaggcagncttccatatccagcaggagaaaccttacgcatgatggattcaggtcaattggctcttccctgaaaactaccaactatacttttcccctaataaggcagaaccatagaccaatacttggccatacgataccaaaaaggcgtcgagaagcctatctcaaactggtcagattatatgttagcctcttctagttcgcgcggaagtcctc

SEQ ID NO: 90540 - DNA, 225 bp, Zea mays
  Clone ID: MRT4577_182574C.1
cggctcgaggttctagatcgcgagcggcggcccttctctttttttttgggcgatagttctgaaacgttagtatatgggatggagaacttggtccgcaaccaatatcctaacgttccagaactctggacagaaaacggaagacaaaagtggttttctggggcaaagtgagaagaggtgaaagtgctagaaattagaattcaatgaaaatctttaaaccaggcctga

SEQ ID NO: 90541 - DNA, 525 bp, Zea mays
  unsure (1)..(525): unsure at all n locations
  Clone ID: MRT4577_182575C.1
ggttacctttttcgctagggacggagaggagctcgtgcagtccaccagcacgccgtcagcgagacgaggcccgctagggccccggtggctgggtccaggaccaccgcgcggacgtagccggggttcccgaccatggtgaataccacttcctactccgcgttcacggcggacgacgagtccgactgtctggtgcccgccttgacggggctttacgcccttgtccgtttgtgatcttgcggggtttccgtgtactctgttgngtggtggcttttggttttggttccttctttgtgttgggtttggtttttttttttttttttttctgttttttttgtttgtggttgnttttggtttttttttttttttttttttttttttgtttttgttttgtttttttttgtgtttttttttngcgggggccttttttttttctttttttttttgtttgttttttttcccttgtttttttttttgttctcgttttttttttttttgtttttgttttttttttctttttggcttttt

SEQ ID NO: 90542 - DNA, 400 bp, Zea mays
  Clone ID: MRT4577_182576C.1
ggatatttgaaaggtacaagcatataatttaagttaaacaccggcactaaggaaggatcacgtgcgtgttgtcgagctggtagctgtgtcagaagtcattgacagttggtgtaattctgagaatgagctcacttggaagaattctcgaccacgacaatgagaatctgtatgagctgcgaccaatcggatgcatcatttctatgtcgtcctgccggagctgactttgtgtgagattggtgaccccctcatgtttcttgataaaggatctttttgtttctaatgatgcgtaccttgtatcgaagataatggtcagcacctacgatgccattgcttccatcagcaatatttcctgatttatggataatagcccagactaagacagctacaaaatcaagcacgt

SEQ ID NO: 90543 - DNA, 386 bp, Zea mays
  Clone ID: MRT4577_182577C.1
caaacaagacgcaggcactttggaaatgtgtaatagtaacacagcattgttcagacttcagagtgctctactggctcatcaatgcttccgaaagaaaatggcttttgattcaaattgccaccatatgtactcattcatatatccatgtctcctacgttctgatgagatcaaaaacattgtgtggactggactccaccacctacaccccaggctcagctttcctggttctcattctccctcttcattcgagaaggttaaccaaccaactgccagaaaccaaatttttacaattcttcacaagatggttcctgatcactggcacgtaccaacttccaccttaggatctacccgcatttggcttctttaaaacccagtcctttattcaa

SEQ ID NO: 90544 - DNA, 410 bp, Zea mays
  Clone ID: MRT4577_182578C.1
tctaaataaaaaattttttttatataaaaaaaaaaaaaaaaaaaaaaaaaaaaaaaaaatttaaaaaaaaaaatataaaaaaaaaaaaaaaaaaaatttaattcaattttaaaaaaaaaaagggccgccctttttaaaaattccaagtttacttccccttccatccaacttcatattttttttttagcgccccctaaattcaattcattgcccttttttttacacctttttcactgtaaaaccctttgcgtcccccaacttattcgctttgaaacacattcccttttccccactttccttattaccaaaaaacccctccccattcccctttccaaaaatttccccaccttaattgccaatttgacccccccttttaccgcctcttaaaccccggggtttttttttttccc

SEQ ID NO: 90545 - DNA, 337 bp, Zea mays
  Clone ID: MRT4577_182579C.1
accaactagcaacatagaaagcacaatagcgttccaacaatggcagctaaaatggggtgcctcgtcatgcttcttggtcttcatgcaagtgctactacagcgaccattttcccacaatacaaacaagctattaatgtcttctttcttcccacgtacctctcactaacattttcatttttgataataaaacccaattttacaactctacattatacaaccaattgtcgcaagtgatattttaccttcatcacccttgttcctacaacaatcatcactattattacagcagttacctttgctgaatatattggcacaacacatgagggcacaacaactg

SEQ ID NO: 90546 - DNA, 283 bp, Zea mays
  unsure (1)..(283): unsure at all n locations
  Clone ID: MRT4577_18257C.1
aacttagggggggccctttcttttttattggggcggctagccaacnataacaatctcttaaacgggagcttgctatagtggcatcacaccagctacaaaaatacataggcagtcctgattcgttctgaaaaataacatatacccctgtggtcaacaacatgctatccatttctcattactacaatatttcagcctacacataacacaacaccatatccagattatattcagatagtaaagtctgtaggcccatcgagcaggctctgcaggatcaaaatattct

SEQ ID NO: 90547 - DNA, 317 bp, Zea mays
  Clone ID: MRT4577_182580C.1
agttgctgcacaaacaaaagctattgctgctaagatcaaggtctgtatcaacgtaggggttgcctattatccagtttagtctagggtaactggtaaagttgctcaccccagctcatgctcaggaagtgcacacctccctgaggtattggctaaatgccaatatcatccctgactgagctgcatctactattatcattttcttaagcagtgtaactactgataactgtaaagagctttcatcacattctgatgaagatgaataaatgccagaggagcttctttgaagcctgacttcatcgacatcatcaacgcggtca

SEQ ID NO: 90548 - DNA, 736 bp, Zea mays
  Clone ID: MRT4577_182581C.1
tctacgatcgggaggactggatctggaagcagctgtgaagagaggcgagagcgaatagcgaattgggatgatttggaggctggctgtcgggctccttttatagggccgagtccgcgaccccccgtgcttatccgcccacgaaaatctcgcaatcagttgagattttatagcgatcggttaggataagcgtaacagccaagaaaccaaaaaatcaaacggcaaaaggtagccgcgcccccgcaaggcgaggggccggatttcggcggaccattcacgcgcatgtcgtgcgcccgcgcccttcgccccgcccaggcgaggcgagcgagcgcgcgtgtggctctccacactctctcctctcatccatgacttggtgagtgagtgtgacttccatatttaagctagctctactccactagagctagcaatatggtgctaatggttccacctatcctctagccatcctcttgtatgggcttttgagattttctgggatttatttgaatatcttaattgggccaagcccataaatcctaacacctccaaacttgagcttgtagcttggccatctgctgtggattgcgcatcagctcggccatggcgagctctaggaccaaggatgacgtgtcagtgcccgcaccgaacatatccaccaagatggccttgagatcagtgacggagctacatggtatgccgtatatgccacagtataccctgtgagcggatggtctcctcggtc

SEQ ID NO: 90549 - DNA, 1319 bp, Zea mays
  Clone ID: MRT4577_182582C.1
ttgggtacctcgaggccggccgggttaacagttctctgctgaaaaactagtatattaaacagtagtgaacagtggcgaaaactgcagatgggcatttgagatctggtgggggattgttaggatttatgggcttggcccaattaagttattcaaataaatcccaggaaaatctcaaaagcccatataagtggatggcaaagggataggtggaaccaatagcaccatattgctagctcttgtggagtagagctaacttaaatatggaagccacactcactcaccaagtcatggatgagaggagagagtgtggagagccacacgcgcgcgcgcgctcgctcgcctcgcctcgcctggcctggccgggccgggccggggcggggcgaagggcgcgggcgcacgacatgcgcgtgaatggtccgccgaaatccggcccctcgccttgcgggggcgcggctatcttttgccgtttgattttttggtttcttggctgttacgcttatcctaaccgatcgctataaaatctcaactgattgcgagattttcgtgggcggataagcacgggggtcgcggactcggccctataaaaggagcccggcagccagcctccaaatcatcccagattcgctttcgcctctcttcatagctgagccgccttttagttcccttcgtcccgaccgcagacgtgcatctgcgatcaggagagcaggtctccggaacccttcgtcttctagatcctgcaccgggagagggcgaataaggtttttgggaagcgtcctcacgcgactgctcgtgatcttctaacctcgtcgactctgctgatttcgctgcttcgacgtcgtcgatcctgctgattccggcgcgtgccatctatcggtatatctaatcagtacgcatcatctgatttgactttttacttcagttcttctgatttggtcatgatttatattcagaatttaatctggaatttgtctaattactcaacactcaccaccactcgtctcgacatggcccgacagacaccgtgctgaccaccatggccagacccgcgccgttggcctggagcatgtcgcgggagacggcctccttggcttcacctggtgcggactgctcctcgatctgtagccgcgcggcatggagaggagctgagcatgcgctagagattagagagaggagaaagacgacagaagggttggaggcaaggggaagccgagcgcgttgttgttccaccggtgcggcagctcggtggtgaaaggagctggagcagtgagaggggcaccacaaaggtgggctggaggacgaacgcacaaagcatgtgggat

SEQ ID NO: 90550 - DNA, 357 bp, Zea mays
  Clone ID: MRT4577_182583C.1
cggactcgtgggcggacgcgtgggctccgcctcccgtccggaaggtttatagtttttaagcggctttgtcggaccaggctacccaacccactgttcttcataagctcgggggctcggttcctaccagctggatcatatctgaagggactcgggggccgctacacatgctgcagctgcgtgatcttatgaacgctgaacctcactggagacaagcatggcccaaagcctttgctaccgaatggttgatggattggtggcatcaatgtaccatggatggacgccgagtgctgggatagtgtttatgcttgaaaaggaggccagaacttcatgaatgatcacatgatggggggggtctca

SEQ ID NO: 90551 - DNA, 399 bp, Zea mays
  Clone ID: MRT4577_182584C.1
catgtcaaatgtaaccaggtaaaaccgcgcgcatctgttttctcttggtcgctgctgtgtggacccaccgtccagattagtcttctcgttttagcttcctctgtatccatctgtgatatcttgaattaatctcaacaacccggccacgattaccggggttggttcatcagctgaccctacccgcactagacgccgccatggccctgtaaatcagccgccttgctcggtttatgctccagtcaggttcggctaccgctcaactcgcggacacggtatcaccctccgttgcatcctcaagcacgttgacgcccagtcgttctgctgttccgagtttatctagtcactgctctgcatcctccgtaggctatcttctgccagcgccaaacccgcgctatttcc

SEQ ID NO: 90552 - DNA, 731 bp, Zea mays
  unsure (1)..(731): unsure at all n locations
  Clone ID: MRT4577_182585C.1
ccggccggctctttcctctaatcttattcccgcgaaagggacagggggcggcggcggcggcggccgtgcctgccttcctccagggtggtggcggcagcagcttgggtcccgtgcacccgcgtgcctgcacggtgaggaagcggcggctatgcgctcgctcgcgcgcacgcctaggtggcgtggcggcgagactcgtgctgccaggctgtgaggcggcgcgcccgcacacctgcttgcggggcggcgtggtggcagcgcttgcgagatgtgatggcgacatgacctgctgacggtggtagccctgctcggcctgcccgtccgaaccactatctccttctctttcttctgcattcttatggctcttaacgacgacctgtggtttcttcgacttgcggcggcgcggcctgaagtggcggcggggctgtgcccacgtgctcgcgcctgcttgctcgggtgcggcggcgtcggtgcccgtgagcccggcctgctcgcggcgtagcagcgtcgacggcggcctgcgtggaagcctgtggcgtgttccgacggcagttgtgcctgcgactcgtgcctgttcatggtcacggcagcagtgcagccttcttgcttgccttcatcgtggactcgtgggatgaccgatggcactgnttcccgagcgtgccctgccccctcactccatgtcgtcttgcacatctggacagagactaanaggagggcgggcggcgccatgtccc

SEQ ID NO: 90553 - DNA, 453 bp, Zea mays
  Clone ID: MRT4577_182586C.1
agggggggatttggcccgcccaacccccaaagggggcccattggttttatggcccccgggcccaaaaaaagaattcccgaaaaaaaccatccccaaccctgggaggccaccaaaagggggctaaaccttcagaagggggtaaaaaaaaaggtaacgggccccccggcccaaaaaaacgggggggaagctggagaaaaataggggggccccccccctggggggaacaaaaagggggaaaattcaggggaaaggcctgttttcaaattttggggggggggaaaactccagttacaacctagtttccccccaaaaaaaaaaaaaaaaaaattggggtcggagtttaaaaaaaaaccaaaccatttggagtctccccggtttcccccgggggggaaaaaaaagggggggccccctggggggggggaaattttgggggatttggggaccaatttaaaa

SEQ ID NO: 90554 - DNA, 498 bp, Zea mays
  Clone ID: MRT4577_182587C.1
gggcaagtgcggcctcgccatgccagccaactgctgaggcatggtcaccgtgcgtcactggctcatccacaataatgcaatgcaactgctgatgccgcgcgcgcgtgctgcgtgcgtattctactgctatatatagctacgacatctatcgaataaatgaaggcgcacacaaagatatgtgtgtgtctcctgtgcttctcctgggtgcacgtactgcactatgttgagctgtgggtgagcttattgatcagtgcagaagtttgtatacattactattctcaaagatgtattacacagtaagtattatgttttacatgtctcgtctactccaaagctggacgcattcatgtaccttacagagaaactcacctttcacaagtacagaaaagctctgtggtgatggtatatatacaggtgattttagttatcaagcaccggtacaaagaaaatggccggccaagactcaagtatttaaagataaggccttgtttagatgcg

SEQ ID NO: 90555 - DNA, 424 bp, Zea mays
  unsure (1)..(424): unsure at all n locations
  Clone ID: MRT4577_182588C.1
tttntttttttnttttttttnttttttttttttnttttttttttttttttttttttttttttttttttttttttttttttttttttttgggtaaaagcaagcaaagggcaaaagccgggtaaaaaagggaaaaaaaaataaaggggggcacggtacaggacaccaaaataaatgcatgcacgggacgaagggggggcaaaactagccaagggggttacttaaaaccaccaaagttaaattttggcaagccaagggggttaaaagagctttgttaaaaaccccttttggcacccgaaaaagcggggggggaaaaaaccgggggtccaccccccggccttcttgacccactttttgttgaaaaggcggtcggagatccaagggaaccaggggggctggcttttgcccaagcaaacccgggcccccg

SEQ ID NO: 90556 - DNA, 627 bp, Zea mays
  Clone ID: MRT4577_182589C.1
ttttttttttttttttttttttttttttttttttttttttttttttaaaaactagaaatgtacatttttttatttcttggggaagccaccaaacatcattccaaaaaactttattattgaactataactcataaacaatttaaaagagggcaccgccaatgatgggttgttggtaaaacgttgttgggtttgtcaaaacaagttggttgaatggcaacaattgttgcagttgtaaaagggtgccagcgttaggcccaacgtgcaggtagaacggcaacaactgttgttgtgtcaagaaggcaacagggctcacatcaactagctggctgaatgggggtagctgttgctgttgtaaataagcagcagagttcaatgctgccagttggttgaatggaaaaaattgctgggggtgggcagcacctagctgactgaatggtagttgttgttgcaaataagcagcagagttcaatgcaacccgttggttgaatggaaaaaaatgctgtttgctgttagttggcaccaaggtttcctaacacaagttggtgtaattgtttgggcccttgattttttgggcccaccattcccccaaagtaaccggtttttaacgggcctaccgttttaatgaag

SEQ ID NO: 90557 - DNA, 467 bp, Zea mays
  Clone ID: MRT4577_18258C.1
ggaatcttaaaaaaaaaactcggggctagcccaggaaaccaatcctttggggttatcaaagggcccggttggtttttccccggttggggccaaattcccccggggtgggcccaaaaataccccgggggttcagctacccaccccgtttttttttggtcccgcccagacccccaggggggcccctccttaataacctaagctttcccttacggggggttaatttccgggcgggaaggccccggcgtcgctcgttggccaggcggggcccagtcgtccccaggaaaccgcaccccgcagctgggctgagcccaaggggggattgacccggggatgatgatgtcccccatgttgttgtcccacgggccggccaggggggaggcgaggttctccagcgggccggggccggggtccccccactgctggacccaaaacccgaccaaggccaccatggcgagggggccgttctt

SEQ ID NO: 90558 - DNA, 262 bp, Zea mays
  Clone ID: MRT4577_182590C.1
ggccatgtttgctggtccctgtggttatctcaaacgcacgcatgctctattatagctagtcatcactatatatatacttgggtttgtgtattgttagctctagttctgcaggcgtatacggcgtttaattcgacctatgttatcgagcgcgcgatatatgtgccgatacatccagtatatcttgaggagggactagtgggtatgtgtagtactggactaaataccctgcatatgcatgttttgccagctcgctatgaatgtc

SEQ ID NO: 90559 - DNA, 710 bp, Zea mays
  unsure (1)..(710): unsure at all n locations
  Clone ID: MRT4577_182591C.1
cattgggtacctcgcagccctcggggaaggaaaagactatagtcgcagctcgcagcagtcgcgcgcctcctcctacagttactaccttcctcaggtgagaccgtgagagggcggaactagcatggctggtgtgccttccgtcaccacaaccttccccgtccggcgaggtgagcggaagctcgtgtcccccgcgaggccgacgccctacgagttcaagatgctctccgacatcgacgaccaggacgtgctccgcttctaccgttccggcgccttcttctaccggagcagcgcctccaaggcggggcttgaccccgcgaaggtgatccggtcggcgctgtcggaggcgctcgtgcacttctacccgctcgccggccggttccgcgagctccggcccacgaggaagctcgtggtggagtgcaccggcgaggggatcgtgtttgtggaggccgacgcggacgtccggatggatgacctcggagactcccttgcgccgcccgtgccgtgctctgacgagctgctgtgcgaacccgagtcccccactgcagatgtaatcgatcgtcccctgctctatgttcaggtgacgcgactgaggtgtggtggcttcgtcttcggcttccagatatgccactgcatagccgacggaaccgggattgtccagttcctgaccacgctaaccgagtacgcacggnggcgtgcccggcgcccccacg

SEQ ID NO: 90560 - DNA, 738 bp, Zea mays
  unsure (1)..(738): unsure at all n locations
  Clone ID: MRT4577_182592C.1
gagatcatgtagagaccctcaaggcccgattccctttttttgtcacggggggggggggggggggaataaagggggggggggngcaaaaaatgatatnaacgnngataggagaaatatgggacgtgcggtnngatagcactatcaaannaaaaagcaannatccgaggagncnnttaaatanngggcatnntagagnnaaccgnnttgggtgannctgtagaanntttacgggctcnnncgacgacgcccctcaacgattttaatnttntttcannnagcatactntannagggtggtgggcaatccgcnntgttggggggcacntnnaagttggggnntgctgnngtggttagggnnaatacacgnngttaggatnttntnngccgctnngcgactgngnccgtgatanngtatcnctnnntagctatacccnnnatgctacnnggttaggacnaatagcannnactgtatcnnaataagngnncaatattgtttgggataanncggtaccctagccccgaatagganntccttatnanngggatctanannctctaatacnnncttcagtnnaccagagttgnncgtcgcgnnagttgtaganacacnnaccaatcgtgtttacttttggtagggnnctactagacgtatcgtgaattaactgtggnatggtagtaccttgcagtggcgcagccagagttgcaagtttgctggtatcccggtgcatagtgtcctagg

SEQ ID NO: 90561 - DNA, 1592 bp, Zea mays
  Clone ID: MRT4577_182593C.1
agccggccggggatataaataccatggccagccaccactcgccacatctcatgcaccgatcacacattggccttgcttgctcataattagttcatcagcaaacaacaaacaatggcaccgaggctagcgtgcctcctagctctggccatggcagccatcgtcgtcgcgccgtgcacggcccagaactcgccgcaggactacgtggacccgcacaacgcggcgcgcgccgacgtcggcgtcgggccggtgtcctgggacgacaccgtggccgcgtacgcgcagagctacgcggcgcagcgccagggcgactgccagctgatccactccggcgggccctacggcgagaacctcttctggggctccgccggcgccgactggtcggcgtccgacgccgtgggctcctgggtgtccgagaagcagtactacgaccacgacaccaacagctgcgcggaggggcaggtgtgcggccactacacgcaggtggtgtggcgcgactccaccgccatcggctgtgcccgcgtcgtctgcgacaacaacgccggcgtcttcatcatctgcagctacaacccgccgggcaacgtcgtcggcgagagcccctactagactgtcatgcatactacaattatatatatatacgcttaatattaatttcagcatgcatgcatattataaatagtgttgtcaactctgtatatcattatattacgatgattatattgttgatgaacataataagtcaataaaaccatgcaggcgatttgtgagccattgtgctcgagccggggccggccgggccgggaaacaggcaccacagctgagagacgatagaagcacgcagcagctgaaagggaggggaactaggaatgaaggggagcaaggtccacgagcacgaggcagacgtccccgcctccgacctctgggcgatctacggctccctccgcgccgcggaactcctgccggagctgctcccgcacgtgctcgccaaggtggagctcgtcagcggcgacggcggtgttggtaccatcttgcagctaatatttcctcccgggattcctgggctacagagttacaaggagaagttcatcaaagttgacaacgagaactatatcaaggaggcagaagccattgatggcgacattttgaagctggggttcgaggcatacatgatacggtttgagatcattccaaaaggggccaattcgtctgtcatcaggtcgactatcgagtatgtgattgctgatgcgcacccggagctcgaagctatggtgagcacagcaactttggctgaaactgctcagaaattttccgagtttgctaaggcgaagtaggtcccataaggaatgtcttgaaatatatatatatatatctcgagagcggagtttatgtttatcatgaaacaagtgaaatacagtttcagcgctttcgtgttgcgcctcaaatatatgctcctacattgcagtgaaaaaaaaaaaaaaaagcggtcagaaaatttttttccccctccttcatcttttccacactccacagcccaatctcatctgcacgtgttcttatcgcaacttcgcaagtggaatcgaaatcattttgcttcc

SEQ ID NO: 90562 - DNA, 446 bp, Zea mays
  Clone ID: MRT4577_182594C.1
ctgactattagcatggaatcaaaaacacatagggctcacaggcacacgaagtttggatgggtaaactctacttaactgacccaataccaaacatggccactgacgccaacataacagggcgtaaagcgcaaaacgcagcaccctctttagccctcaaaatgactcttactacctacggtacaatatggcccctcatgtcgaccttaaatgtggtgcgctggtgcatataaaccactaacgtctgctcaacatatctaaacaaacccaattgtatggtatgaggtggcatgacacctgtctgcttttactgcgaaacttacatagagagaaacgaaaccgacagactatcaacattcgataagggttacaagtcaggacaggtacggagatccacggacatgaccccggtcttttattatgcctaacttataaaggaactgggtgag

SEQ ID NO: 90563 - DNA, 147 bp, Zea mays
  Clone ID: MRT4577_182595C.1
gttggattgattttgattctcctgcagctggatgactgggtgctgtgccgcctgttcagcaggaagatctagtgggagaagatgcatcatcataaggagaaggagaaggagaagaaggcgatggagtcggatgcgttgcttttgcac

SEQ ID NO: 90564 - DNA, 407 bp, Zea mays
  Clone ID: MRT4577_182596C.1
ggagcagagaaataaaatcagtggataaccagattttccatacacgatgagaaaccacagcatgattttccccctctccatttccgacaagacttgatctgacatatactgttataataagaagaagacagagatgaatagggttattgagagagcaactgaacccgccttcttagctcttcaaaggcatgcattgcttcgcagtcaaggcccccagcaaactggtggactctgtaggtgaagcgcacgctctgagcaaccagagcagccttgttccccgtcgtcccacttgcatccagttccttgaggactgtcttggtatacagtttcgcaagactcaccgatgccaatctcatctttgaggccatccctgaatcaagcatccagttcgttggaatcctcaactc

SEQ ID NO: 90565 - DNA, 454 bp, Zea mays
  Clone ID: MRT4577_182597C.1
agatcttcaaatctcaagcaacactcacacaggatcacattatgttccaaaaaccctcatacaagcacagagcagttttcaaatgacatataacctctatcacataatcattgggggcaaagacaaaagacatgaggaaaaggcggaacgacaaccatcaaatgaccgcgaagagtctaagggatctcctggagagaggggccagtggcggctccaccagcggcagttgcagcatacgtcggctgcagtaaacttgcccttagccttggggggggagcacccccggtcctagcagttgaggagagccttacagaacttgtcgatcttcaactttgtgactatcacttaggaggggcggaagcccacatttaatgtggagccgttgaccttctgacgggagatccattatacttgtatgacccagcgggggcggtacacctgaaccacctttaca

SEQ ID NO: 90566 - DNA, 185 bp, Zea mays
  Clone ID: MRT4577_182598C.1
attgcctcttcaccacttcatacccccagcgcggcggtgccggagcgagcagagcagccggattgcctgtcggatccgccgccgtcaagatgaatgactccgatgtatccaagcagagagaggagatggttccgtacataaaaacaggagatcgcattacaaacttacttaattatgcacatcaa

SEQ ID NO: 90567 - DNA, 412 bp, Zea mays
  unsure (1)..(412): unsure at all n locations
  Clone ID: MRT4577_182599C.1
gaacaaaaaaaaaatttttttttttttttgttcaggaacttcttttgtttaacgggggagtttcgggtttcggcccctggggtttgccttggtttgccttgggggtaccccggtcccggttccgccttgttaaccttccggggctttttgtttttttgtttctgcctccccggggcccccccccgccccgtggggggggttccccttttttcatgtggtttaagcttgccgtgtttttacctctgcctctccggggccgttggggccgggccccttttcccccttttttccccggggaaaaaaatttttttttttttgcgcccgggggaaatggcttttttttttttaaaaggggggcccccccctnnctttttttgggggggggttttttcttttttttttcccccccggg

SEQ ID NO: 90568 - DNA, 519 bp, Zea mays
  Clone ID: MRT4577_18259C.1
aaaaaatggggggggggccaaaaagaacacaaaaggggggggggaaaaaacccaaattatgaaccggggaacaccaagaaagagggaggacccctgacgatggggaggggacgaccggggctgggagaaaaaaaaaaggttctaaaccatgcaaaggggaaagcggggcttaaattttggcgggggggcccggggggggggggtcctgggggccctttttgaacgggaggggggccggggacccccaccccctgacgtaggccaaaagggagcccccccccaacaagaggaacttgggcagaaaaccttttttggggaaaggggcccgaaacgttttaaaaaaattgctttttaacgggttggagggggagggcccctaaaaacccaaaagggcccactggccggggggggggcccatgtccccgaggaaaaaagaaacccttttggcgccggacttggccaccacgggggttgcccggggcccggggatgggaggggcccaaggcctgggaaagggaa

SEQ ID NO: 90569 - DNA, 250 bp, Zea mays
  Clone ID: MRT4577_1825C.1
ttcttttgctttacattttaacattgggggttttttacattaatgcgggggtcattccccttacggaacaaaaaaaaaagaaggcccctacatgctatggcccagcccactgctgtcctactgaactaacaaatcataaactgggtccaggtgccggccgaaaccaaaagaatgcgcggccacccaaaccaaggagaaacaggttgacccccattgtgtccataaggggactgcccgattcgaccccggg

SEQ ID NO: 90570 - DNA, 312 bp, Zea mays
  Clone ID: MRT4577_182600C.1
gggacacgtgaataatgagcctcagtccactattgtcttctctgctgcgccggaccgttgatgtgcgattccatccctgcaccatgacgaaagttgttacggctgtgcgcctggatgaatgcataccagaagacactctagggtatctaccttcgaaatcacaatggaccgccaccggcaaggttactgcttagaaatatgtattaattattgcgcaagacaacgtttgctatccagatgacctataagtgcttacacatgacagaaaggtgctcagctattataccaccgttagagagacatcatgtgact

SEQ ID NO: 90571 - DNA, 281 bp, Zea mays
  Clone ID: MRT4577_182601C.1
taacacagtttaatgcaacaactgaacaaacaaaaaaactttctattttatataagttattgatgaagcatgttctttgcaaaatagttgatataaaatctaacaaatttaaataatagatgccataaaatattcaggattttatattttgaaaataggaaaatcacatagattcaatcccacatgtctgtttaaacaaccaagcaattggttctccagtaatttcgtttgatcactgataaaaagacagctctgagcgctcccctaaggtaattgccaac

SEQ ID NO: 90572 - DNA, 235 bp, Zea mays
  Clone ID: MRT4577_182602C.1
gcacgtcgcgcttgcgcagtctcggtcacgacctgaaatatcgtgggcttccgtccacgcgtgaagcgagagcatggacacccaggtgaagcttgctgtagaggtaaaggtgatgggcaggaccggctccaggggtcaggtgacctaggtcagagtgaagtttttggatgaccaaaacctgcttatcatgaggaatgtcaaggtatccgttcgcgaggatgtcattttcatcctg
